United States Patent Application Publication US 2014/0057251 A1 - sequence listing, part 22

SEQ ID NO: 23214 - DNA, 1553 bp, Cannabis sativa
aaaaaaaaaaaaaaaaaatcgtattgacttatttttgtattttttttttctaatttttggtatattatgtaattttttctaaaatttcaaatttacataatagaccaaaatttcgaaaaaaaaaatacaaaaatatgttaacacggaacaaatttattttacgctttcgacttttttgtttacaaaaatacgtatgttagtaaaataataaactattttgttttggttgttttatattatatttatagttgtattataatttttggagctggaggacaattttattcatataaaacaagacaaaatacacaaacaaactaccaccaacatggcagcagctaacacctaaactcaaaatgacttaaataactcaattacacgaatatcacctttttcaattctatgaaaacccaaattcatcactctagatttaatagctatctttacatcaagactgaaagttctagctaatttacaagcaagtttgacaatacagttatttcgattgcgccaagctgcatatatatagcaactgaaaaaactgcattcacaaggcctctttcaaagaaaaaatgcctttcgaacagagatttttccactcttctaagttcccaggccaatcggtcatacccatcgacaaagaaatctcattcatcaccttcttggtaaaacaacaatcaaaatataaatgttggtgtgtctccaatttagattcacaaacagggtagagaagagatagaagctttaaaaatgcccaatttgatcttgagtaagttgctgattgtttattgcttgccaaacaatgaaacaatgcttcggaacacacaatttgtgccaaatagcaatatcataaggcactatatcagcaattgttggagataaagacaaataaaagattttagttttaaatttaccaaacttacccgcttggataaactcctttttgtcaatcgaacatctaagcttcaaaagtttcttgaaatactagcttacatcacatttatcaggaacatcccaaaaatctcttcctttgagatacatggagttaatccatttaacccatagattcttgcttactcgaaatcgcccaaataaatttagccattaaagctcgatttcattttctaccttcacgtaaaccaattcctccaaatttcttcgggagacaaactgtgtcttgctacagttaccattagaaacccataagaaatcccgacaacacttatcaatggttgcaacaactttttgaggtaaaatgctcatctaaaagtttctaactccaagcagaacaaagttgcgctcttccagcaaaataaagattcctactagcccaattgttaagcattttgtgaagattatccagaatggcatcacaatctaaggatctctattttgttgggcgaagatggaccccaagatatttgagaggaaatgaaccttcttccatctgcaaagtattcagcaaactccttttacagttatcagtaactcctcgaaagtaagccaaagagtttattggtcgaaaggcatgtggcctcacaaaaattgttgaa

SEQ ID NO: 23215 - DNA, 5077 bp, Cannabis sativa
atatacgtaccaaacgaaccctaaatgtactagaggtctatcactaacactcgcacccaatttatacaagtgcagcaaaacagaaactttgaggaagtagtaaagatttaagtcatgataggacattatttctgtcccttgtaaagatatataacatctttaaatttgcaggcaaaagaaagcaaattcagcgtgttctaagtataatctatcgtcaattgtctgtacctcatttaaatatgaggtcaacacttgttgcttacaagacttgggaggtggagcagggaaagatagctgatatccaatctggccagttggatagggtgccttctcatgttgcctcaggcattggatatgtattgaagaaaagatttgtaagcaggttaaagctgacacagaaacatttcaagagtacatatatggtacattgatttagaattataatatataaaaattctggttttgcttttccttttcttaaaagttgctaattacggttatgttattttttatagaaaatatatgtttgctatctaacactaaaatattgcctactcttgcatggaaaaaaaaactagtttcatggatgtataaaagaaacaaaaaaaggagccataaaatgacccaaaaattcactaaacagcaatttgtaatgaaataaatttcatgctattcttcataatcggaagctgcttctttcaaacatgttctcatgatctccgcaagctttgagcaagcatccacgcatagctgcattccctgtgcattgcaagcaaagtagtgttgaattgttgataatcccattcaattttttgccattagccaatggttctaatgcacagatcagataattattaataatgcattgtaaaaatgaaccattgaggcctagattgttctaaacgtttaccaaaacgagaatgatttcaagggaaaagaaagacttgaactcaagttgaaccaacaagttgccatacctcattaacttttggggttgaccattcccctgtgatagttagctgagtgacctcgtatcgcttaggcatacacgttatcattaagcttccatcttgggagctttcctcttcccaaactgggtcaattacaaggttttttccaaggcaagactagtttccggaaacacaaataccaaaaagtacaataaatcagtcagctaaatggataataatactaacaaaaccagtcacatgaccttgcctttcctataaaacagatttataaactctcatttctataacaggttatgtatgcaagcccaccctttgactagaggaggtatagaaggcttgagaattgcccaaagagggtagtatacatctttacaaacacttaataacaaattaaaagtaggaaaacaaaacacagagcaagatgcttaccactgaaactgaagttacaaggtcatacatcattatccctgcatctgccagagctacactagcacatgaaattacaacaggtagatcacctacaacccgaaaatgttaaatccatgggcatgttgattagcttaattgtacactaaacaaactcatattaggaactaaattctaacaaagagaaaaaggttaacattttgaaagttattctcttgctatatacaattcagtttaagtatataattaatagaagaaaaagatttcttataccccaaacatgcttcccaagttggccattttttttttttttgatcaagaaggaagaaacttcaataatcgacaaacaaatacaaccaaaaggagcactatataaaaaccggctccttacccagtagccaccttaatacaaaagaattctgttcaggtataccctttcccctctagaaacattcctgtgtttaacaatttgtaatctacaagtcattacacttttgacctctttaactatacgagagttggccaatttattaactactagctaaatagtaaattttagaagtcaaaccggcatccagaaataatgatgggtgcgaggcaggcaaatataaccaatttgtacaatatgatgctgtcatccctaacttagatgatgcatttcccaactaacactcagcacaatataaaatatgatgtcgttgaccccaatttgtacaagtgcaacaaaacagaaactttgatgaaatagcaaagatttaagtcatgataggacattatgtataataaactgtcactagaacttagtaattgtactttaccaaaactaaaatgtgagaaagaaggcatcatactatgcctaagtaataacatgagtttggattctgctcctatatcagtaaaaagtaaaagtaaccctgatgcaaggaaaaagaagaaatacccaacactatcaaaagctttcaaatccaccgagcaagtcgagtcaaacctcttctaatttaggagatcatcataaaagctttctacaacaaggagcttataatttaggacatctaattctagtttttcaaaaagaagagagagactttttttgctataatagggacactcaaccaataaaaaaaatgctacagaacacaaacaagaaggtggaatagggaataagatacagcaggtggctaatctcatatcttgtgaattccctaccaccctttctacaattttatttactatgtttctaacaaaaagtaaggatctcaaatctgtgtataaaaaactaatgaacttactgccaccagattccaacaccagtgcaaaaacgtccacagttgttttggggaaggtttccaagatgatagcaccttccaaagctttatgaagcattgaagaaaactccttgttgtctgacccctaaattatgaaagctcaaatattcaatacatgttatcaattcaggcaggagtaagctattgtaagagtcaaaacatgatggacctattacctgtccacgcactggagtggcaaaacttgtatagctcacattacagttcaaccttccaatatcactgtacatcattgccttcttactctctcttggcccaaatctaaagtgaaagaaattaaaaaaaaaaaaacaagcatcaaaactagtcacatatcaattcatatgtaaatatttatatgtataaatagagagattcatgtgtaaatatatatagagagagaaggaggtatagagatactcacacagacacaatgacttttgttaacccaatctctgcataagcagatcctgcagcagcatttacagccccagtcttgaaaactgccaaaatatagccttcattttatgaaataacatgacatttgacaataaactaaaatacaaccaacaaagcaaataatgagatgctaaactctcttccaaacaaaaaaaaaaaatacacgcacccagaaaaaccaaagcttagaacagcatattttacaaagaatagaatagcttacaggcaagcctgcattggtgaaaatcacggccatcaggtcgaacccaatcgacgtcgtggtttttggaaccctttttgtgggtcttcagtgatggagagtatgtagtcggagttgttccagccatttgcagcgactccctttccctctgtagaggtgtagagtatatctactactcttagacgtcgatttctgactcaaccctgaataaaacaatgtttaaaaccaggattgcacacataagttgggttggctgggttgagggtattcgatgagccaacccaattatatcagcctacaaaattttaatccatacacaattttttttcagttgagttggttacaacccttacattttcataattaaggctttagattatgaccaaaaacaatagaaaatccaattaaaactattaaataaccaaaagataaacagttcaaacattaggcaaggacaggtccaaataagtctcaaaactattgaagttgtcaataataatatacattactaacagtgattataaactatcaaaaaacatacaattttaatctttcgccgttgtgctttgatctttgtttattacctacaataaaaacagtaccaataagcaatccttaccccaaaaaaaagaaacatatatgtcattgctatcagaagttgagacaaacaaaaagaaatcaggaaagctttaacattgtaaaatcactatatcactcatcaaatgcacaaaatccatataacagtagaaagtctaacattgtaaaatcaccaagcattattctaattcatcaaatcattaaaaccatagccataaaagcagcataaaaagaaaagaaaaagattggacctgagattgaacccttcctagtcgctgcctgaggtgagaactgagagtgagagagagatggagaggaaccttgcttgattcttctttttttttttagcaaagaagaaaaaggtaagttatcctagagagagggagtgagggatccactgatagagaggaaggagggagtgaggatgaggatctgtttattcgtggagtatggcttggtgaagaggaaggaagggtcggactggtctggtctggtgctggtccatggggtctgaaggtagtaggagatgagggagactatggaatattaggttagggtgttggagggagtgttacacttttttctgtaaaaatttacaattttactgctacacataattttttacaaaatattatttttttaacagaattttttacaaaaatattgttttttttataaaataactgtaaaataataaaatagaataattacagaaataactaaaaaataaatgtggaacaatagtgaaaacttaacacagtacacaacagtataaacttacagagtatttttgaaaaaaattctgcctcacagtaaaaaactaaaaaaattagaaattttagtatatggtgtaaaaacttctagaattaggtaatacaaagcctatataaaaatatgttttttttacagggtttttacaactttatcgtacaagacagtagttgaacatacaaggctacatgagttgcgtttgaggtgtgtcctttcagaaattgattggcaaaatgctcaacaattatgtgataactgatagttgtttcatgaagtgacacaattattttttggaacaaagtaccctaccg

SEQ ID NO: 23216 - DNA, 3184 bp, Cannabis sativa
atccatacaactaaaaatattagttgtaaaaaagcattaaaaaaaacactaaaatttaatcacttaatgataatgttttcagtgtcttggtggttcaggttgctttgctcttcagtcttcacctcatattgctgttaaaattagaaaagcagcacctttacgaaaaaatggccaaagtttcagtgacaagaatcatcgaaacccggactgattttaagttctaatactctaaaaccattctagatttgttggtggagaaggtactagcacagaaggctgcaaatcaaaccataaagtatgaactaatacttctcatttatagattgtgtttcatatttcttctttctgaactaactgttctctgtcatgacagcatgaaaatcaagctgaatatgaaatggtaaaaacagctaacaaaagttactgatgggtaagaaaatgtgctttgattacccctacaagaagacaaaacttgcctcaaaatgaaagctgttttctttaacactgacatgaatgttgattgcaaaagacagaaaatgaaaacagagacagattgaatgcaaaccttttgaagagagaatcctccaaagataagttgaagcagtttcagaatataaattttatacaatattcataatttctacttgttaaagttaaaactaaagtattgattgtaagaataaagtggatatttaaatgaatctgtcactttcaattagattagatattggattgaattagattaagtggggattagattagattgaattgaatggattttcaacacccctttaaaacagtcacaactgtaacaaagagcctaaatgaaccacaatgatttctcataactcatgagctgagaaatcttaattttatatgacagaataactaactatgcactttaattgttcaatcaacctgatctcttaccaaaaattgaaaaaagatccaaatttccctgttatgtaaataaaattcaggtgaaaaaaagcatatatttatcacaaaaatgaattccaattattcagtatctcactacttctacttgtacatactatccaattcacaaacataagcacatcactatccaattcacaagagtatgaaggctatcctattaactcaaaattaaagacaagatatagtcaacaacaacatagaaaggagaaaaaaacatagtaccagttgtatctcaataatgcctataataatctgatagagcaagacccatctgtgattgatcgaaaattctatcttcgaggcgagttacaattcaaattcatcctcgagcttcaaagcttcggcggcagcctcttcttcatcatcatcaatcacaaagtaaggattgtgagcctcaggcttgaacttgtaaccagtaaaaacatagaaacctagagtggccagctccgaagccactacactagtccaaagataccggtaagaggtgatagtttccaaagcaaagaacacaacacgagtgaagtaaatgtaacagataaccacaatgtaatactgtctgaaaagggtcaacttcatcaaattaacagcagctttgccatcagttttagcagcttcgcgcaagttcttaatcgaccaaacgatagggaacaacaccgcgcaacaacaaacaacatcgacgagcaaaaacacctgtctccaagtgaaccaatcctgcccaaatggccctgtctcatcaattacaacttgggcaatattagctacaacctgaagtggaatcacaatcatcaaaaccttcttttccttgtcttgcaggtaaggtttcaagaaagaccaaccagtcccaatcaaaacaatcaatgtaaagagtgtgataccctttaagaaactgaatatataaaacaacacatcccaaccatgagcactaccagtacgcttaatatacttcttgtcttcagcctcacaaagaagattcaaagctttgagaattacaacagcgagcataaagaaatggattctaaaaacagtgagccgtttcttgtacaacacataaatccaaagaccagcgataataaagtaagacagcgagaataggaagtaaaccctaggaagaacagttttaccagcggagaggtaatctcggacattgccctttccgtcaagattgtacatcgccgaccttacattcatcgtgaccgtcgatccagaattgcaattagcgaaaagaagcgtgtactgatccgcatcggtctcattatacaaaatatcgagatttccatcatttagggttttgagagaagtgaaagtgagaacctttttcaccatatcagatctgagaggacaatcgatctcaccatcttcaagctgctggaagacatgattccacgattcccgtgtacagaggaagaaaccgacattagcaagattaggctcagaattcttaccggaaatcgagatcttcgaaacattgagctcgagacgacccttgtgtgtgaatccaaactcgtctaaagggacaatcgaccgtacctcgtttcgcatctcggagaatcgaatttcagcgaaacagagtgacaaaaaagccattgtaatcgtaagaaagaaggcgaattgagtccaattagtcgccatgattgtctgattgagctctgatcttttcagatctgatgattttagggtttctgagaaagaaacttcaccaatctcagatctgaatttgtatgaaattctttggtctttatgaatggggtttattgaagagtttagtaaaaatttgatctttaacgaaatcgactcaattccatttctggtttttttttaaaaggaaaatgttatacacttcttgtgaaattatggatttggggcttgggtattgtaatttggtaagtgattaatgggtttgtattgtgagggtggaattgtaatttcgtacatttgaactattcgattaagtcaaagggttattgactgagtcggagacttaaattaattccggtaagtcaaacattttaccttctctccttctgtttgtgtagtacccatataatttgcgtattaaagatttttatttttaatgtcttttatacgttgaacatacacactacacgatcttttacactctagcttcaataaaagcaaaatagatcatagtaagtcaacatgaatacgacacgatcttttataagtcgaattagggttgaaaaaattaaacacgagttaacagaca

SEQ ID NO: 23217 - DNA, 7818 bp, Cannabis sativa
aaattcctccaacaacagtattgtacagagaattaagattacttagtcatgaataaaatagttaataacataataaagtttaagaatctttaatcaatgattgctagtgcagttcattgatgccccttattcagtgtaagtaatatctattcaaattattgatgtagcatgacatttaagtgaatgtgatgtatataatagagattatatatgaaagtgatcgatatttaattaagatgtctttatcaaacatgtcatttataataaagacctaattcatattataatgataatcaatgatatatcgacctaaatctagagcaatcatgaactcttgttcatgttattagtttatttaattgacttgttaaagtttctcagagaagatgattctcacaacttctattttgggaatctaataatgttgatagatagttaggagcatgatctataattataaatcttaattttcctgacggattgaatgttagtttcctttatatgttaattcaccactatgaacgtggtcatgatggtggtctaccttgaggtagtgccgactgtgagtgatagttcaatcttatcacatgaagttatgtctgctctactgaagttatacattagttttttgcatggctctaggtcttcaagtgataaacccatccgtattagggtttatctgaataagatatttgaggatgctctgtcattgatcatcactcttgccaccatcatgttggctatttgtaccttaacaactaagagatcgttgtgagagaagctgacatgatatgagtcaaagtctacgaatgtgattggatcacactcgtagtgttgagacattagaggacattctaaaacctctaataattctgcttttggctcatgttgtaaggaccttgcatatctttctgaggtctttctcgaattcccaacaaggtgtgggccttcaatcacaatcttgaccctgtctacaattggcgcatgttggagaggtgcattgctcccaactagagatttaggtcatacataccgttgaagagcagcatgcttctgtctaattaagaattctatctcgtcttgcaactgtttacacttatttttatcatgaccataattgttctgatagctacagaaattgttaatatctctctttcctgactctttgaaaggaagatatttacattcaaaatcattgacagggtgaccgtatagaactcttctctcacagccaagagaatagagtaggtggtgaaatgaggttcatactcttgcataggcttgcccctagttttgggtttcttctcactaagggagtttccttgtctccctccgttgttggctctttttcctccatttgagcctccttttctttgcactactatgcgctccattgttaggggttgggcaatatagcgatttcttcttgttattttttgagctcttagctagagtgacagattcttcaagtttgataaagtcatctgctctaacaagaaagtcattcatagtgtagactgacgtgagatgaaggtcggacccttgtgtcctcgctaagtatttttgtcttagtggctgcctctaagaaccgttgaatatagtccttgagggactcatcttcttattgtataacatctaccaaatcattaggtttgttttggcactaaacgaattggttgcccaaaatcatccattagatctttccttaaattgagtaatccatgggaaagattaaggtaccatcatgagctaagcctatcagcgtggaaattctacaactaacattgtctcttactccttgcagattggtctgcactttgaagtaatgaatgttggacttctttcacagtgtactgatgccaggaaggattcttgaactttggaggaattagtagagctttgatttggtcggagagcaatgagcgatactctatatctagtttgagctctgacaattttcgggtagtgattcctttcacaaaggtcgctaggttgtcaaactctatcctattgacatcgtgggtggtggtttgcgtctcgattggaacttctgttacccgatcagggtcacctcttaaaactcctacctccaccaaccatttcctggttagggtgccacgcaggtcttttggtctcctaagtcgatcatgaactcctgtcgacttaggcctagttgttgtctcttgaacacagagttatgaaggcaacacttttgatatctctagaatgaaattcgagtcgtcttgggatgacgctttgcgcgagctgtcatccggagcattgtagcagctactccccttgaagtagtctttggctagatcacaagtatgaaaagaataaaattagttgctcaagttcaactcctcttcatgtactcaagggaagtattcatattgttgaacatcagggccatgggcaaagtaatgtcacaactcacctctttcaacttaaaaatactttcgagtatgaagcagctcattggtccttacttgatgaattccataacatccagttttaaagtagagtcttcaattttctacatgtctttttccctttacaaggtctcgaggcatggtgtcattagagcgatagagagaatcaagtggagtagttcagttggttctctcagtggttcgtggtccctccacataaggtggagggcctattggtttgctcgcttgagcttgagtccttttaatctttttctcaaggttcgctaccctcaggggagccttagcacctgttgtttacttagtacttacacagttactgggtgtggtagtaattttccatgcattaagggtctcccctagagtactcgttcccacatggccagttggttgatggggaatctctcttaccaactcagaaagacacttgcgtggggtagttccgtgaccagagcaataagcttctctaatatgttgaaacaagttagctcttcattgtactgttcaactcgttggctctctatgttacaccagttctctacgaactagttttggaactattcgtgtttcctatcgagagagtctcacatgtgttgttgcaagtcagccacaatttggctaagttattcagcccaaggattgacctccgcggggttttctagttccacacgtggttcccctggttgaatatgcttgttggtttcagtaccaagagcagttggtggccttgagggacaagctatggagctggttttgaggcctccacctggcacctgagatgtcggtgtactcccatcaccagcttgagtgattggtgtgccctcggtcttttggtcggttgttgtggatcttctttcaacacttgagggtggtgttgcaaccatcttgtaagtgattccttgactttagctctcaatgaaagcaccaaaatgttgatacaaaaatctggatagagatctccaggccacacccgctcgctagattgtcgagaatgaattataagttaagtataaatatgacaaacataaggatttatagtagttcactccttatatcgtgatagtatttgagctacgtctattttgagttttatttctcacaatatgagctgctttgaacttatggatacttttttgaacttaaaatatgagcttgtggagctctctccttttttttttatagggaatgatgatgtcctattataatgataacaaaataatccaaaaaatatggaaaaaaattttacactatttttgactgtatatgatgatctaattgactctggaggtcgatcgtcaattttcagagcttgagtcgcacctatgggacccgcttcgggtaagttataacttaaattcgtaactcccttgaggtgaaatttggagttggtaactttagaattgagattggagtttaagacatgacttggtagtgcattgaaataacttctaaattcaagttgaatcgcatcaatcagataaatattgagtgagttatggctattttactgaaggttattctggcccaacgcctaggataacatcccagtgctcaggttgacatccaaagcccaggttgacatgtgacataagcctaaatgttgggtgagtaggaaaatgtgccagggatgtattttttattcctaagtgatatttggcaaagctggtcaccagttcttggagatgttattgttttgcggaaatgagagactcgaaactacccaatttttgagtaagccactttgctagaaaaacgaaaaaatatgaagttgcgaattggactctttcgacttcatggctctcatttattatggaaaactagatgaatggtcgggatggaatcaaaatcaaataaacagaatctaacacaccaaactatatgtcaacttgggcactaggtgatctttttagagctttcgagatgttgtttttacactttgagggttctttaacttgaggatgaggtctcctaccccatttttttttaccattttagagagaatgcttggaggagaattttgatttgagtgattaaaaccaacacactaggttgattgtcaacctgggtactagctcagcaccagatcaacatgggcactgggctcagttttgaagcccctgtaattatttttttctacccgagttcacttgtatattcatttcctgatgacggaataatgcccgaaatacttttttggaatatttattggaaatagccaaggttgacaatatgtaaacctgggcgttggactcagtgccatgtgtcaacttgggtgctaggtcttatttcaggccactcagaagttttttttgctccatagaaaaagttaaatcttcaaaaaaagaaaaaaaaaaaactcctcaaaattagcctaggttgacaatatgtcaacctgggtgttggtcccgtattttggcctccaagttggtctgtttctcccccaaaaacacatgtttccccatttttgataaacaccaagaacatgcacgagtctattttttggttgatgcgtggaagtggcctaggttgacaaattgtcaacctcggtgctgggtgcccaggcaccgggtgctctgggtgctcaaaaatgaaagttctctaaatttgatactgatttctcaaatatgttcgtgcgatgtctagttcatgttccaatgtaaagtttgacccatttgcactaagacggtccaaaaaattgaaaccctggttaggttgtcaacttgggtgttgaatgaaaccctaggcgcccaggttgatttctgaggtgcatttgtgtatgttttcaactttcgaggcctagacttggatgctccatttcttcatggtacatattactgaaagatatttagttggaaacaacattttagaatctaaacacccattctggagttcccaaagtcaacttgggcgtagggctagggacccctcccaggtcgactgctatgacttgggactactcaactctaagatgttctctttcttaccacatgttaaatattgatgtctacatcaccagaaaatttttgagttaacaattgtgtaattagacaaccaattatccatccatcccttgaagaacctaatgtatcatgaagaaagtaagcatatagatataagactctactggattagagacaagatagaataagggttggttgaattaaaaaaggtcagatcagaagatattcatgttgatgttaggactacaggctgaacaatcaacaagttcaagacatgcttaaacttgatcaatcttagaaattagcataccgagattcctaaaacactaaccatgatgcatgcatactttcttcatcaccatcacttttatttttaaaggaactaggtggaatttgtggtatagttcctttaaaataaaatgtcttgcgaaaagctagaagtggcccaaaaaggagttccaatcttggggcatttcagatgtagccttcacggaagctagttgtcctttggaaaagagttccagaaggctagttgttccctccaaaaagggcctctggatagtttgctccagctggctttgtatctatctagaacatccctccagaaagatgcttcttctgtctcggactttcatccaggaagtgtgccgctcattcagatgctctcgtgtgagctaacgttgagatattgttacgaggagtttgttaagtttattaagttgtaactgacttaacaacttagttgttatagccaccgactttggaatccatttcccaaacctataaacacaaccaccctcatctacaacaaatagaattaagtgagataatttagagagtgagaatgagaggtagagagagagaggtacagagaaaagacagagattggcctttaggatttgtatgaagaagctttttttgttagagagataaacactttaagagaaactaagcaaagaatcctcacaaatgtattgtacccctgttcttgctcaatcaataaagactgtttcgtggtgttccagaactggagtaaggtcatagatcacattggtctataggactttaactagtataattcttggtgttgcttttactgttttcttgctttgttttaattactctattctactctgttatttttgcaattcttgagttgcaatttcataaatcttgtcattgctaattatttgttgatttgtctttaagtttgatttgattctacagattagttgtaattttctcacaatatggttagtttccaatttgttgatttgttgtatttacatttgaatatgcattttggtaagtgtggtttcagaataaggggcgcgcatgggtttgaactcaatgactttaagagccgtttggttgatagtaataggctataaaggaatagaatggaatactaatgggcctgattcttttatttggttggaaattaaagttttggaactgaattccattgtaattcttattcctccaaactaacgaaattgtttttctatttttcatttagtggaattataattctattccactacttactaattcataccctagttacccttctttctcattttgcaaatccacaaattttctctcttccactctagccatgggccaagccgaacaaaccttagtcctagaaaactgaagtagaactacttactgttgtctcttttttttttctcattttagcttaacttgctatcgaccattgtgaagctcttcttctcagactcacactgcaagtgccaactttcctttgttgcttcttcttagctaatatcagcttcaccacttacaaggtcaatttccctattcactatttttagactaattcaatttttctctcattcacaaggtcagatgtagagactagacaacctttatttttagttaactaattattatatttactcatttaggtttgatgctttttttctgtgtcttttttcttgctatggataatgatatatgacaacgatcttggcattagaattatttatgctgtttggtgcttttatttctatgttttatatgacactgtagatgtatacatgtatttttcttttttaatttattcttttaattaattgtggctaaatcagctatatgatatatatcttttgataattgctgctatatatttcctttgggtcttttttgacaattgtttctatatattttctttgggtcttttttgacaattgttgctatgtactttcttttgggtctttttatagctgtgtgggtcaaattaatatctgcaatatgaatttggtatgctgaatgttatgtagtttttaacaaatcaaattttattatagttaattattgatttcagtttttgtttttcaataagagaagtaaaaagtgggtaaataagctgtaattatattgtg

SEQ ID NO: 23218 - DNA, 8209 bp, Cannabis sativa
  modified_base (41)..(48): a, c, t, g, unknown or other
ttagagatattcatatattaggatgttaattcaacatactnnnnnnnnaatctagatccttgtaaaataatcccaaaataccttctttgcttcttcttttttcctacattcttcaataatatgccccattcatttacaattagcacatatgataggaagccattcatacttcaccttaactttcaatgtctttatgtagctcattagtgaatgaaattttgtccggaaaatcccgagacatatgaacttctaccaagacccttgcaaaatttagtcgatcttcatttttagtaatttgatctagttggatatgatttccaatctgacctacaatcttaaatagtgatcattctccctagtatttaaaatctaaatcatgtagctgaagccaagtaagaacacaactcacatcctctttttaaaattcagtatagggatcccatggtttcatcaatatcggtttcctatccaaaaacaagaaaccaccatttaaaatttcaaatatgatttgaacagagataaatcgaactataagaactcctagatttaacactcctactttatccatcccttttccttctaaacacgacgagcaaatccctcaaaaaaattccctagcagattaacacctaggacataacaaaccaaagcagaattcaaaaaattgacctcatcttctatgtcttccatatcaatcttaactttgtttccagagacataattagtgtcaagcatttcatcaaatttcccacttaaattcttaataaaagagcttttctgacctagaattgggggagagctacctgatttaatcaaagtttcatttcgttttgtagcttccaagaaactcacaaaatcagatctgatgctttcttgttgaaggtgacgcaaagaagccctcagagaaaggagctctgctacctcttcaatgttctgcggtagcttctcatcagcaccatcctcatccgaatcctcctctaaaaattcgagagcttccacacctaacacctcagccatactcttagttttgagaaccacatcagaagaagtcaaccccaatttcttcttgatgcccaacaacttcctcttcccctaaaacgcagagcttgtcgtcatcttacctgtccctgtaagttgttcttcctagggcgtccacgaccagccatggccccaattctcagattggagtcatgcaaaaccctcgcagaggaaaagaggggcaaaagttatcgttctaatcatcgttttgcgtatttacctttttccaacaatttttattaattaaatagaattaaaaaattaattgattggtaattaataatcaatcatcatgggaacaatactctatttgtcattaaatttcttgatttgataacgtatacttgcgtactgaattcaccaaacttgtatgtttatttattgtaagtttaaaaagacagcaataaatagataattttatatatgtgcagtaagtttaaatttgaatcacaatgtttaaaaagaataagattttttttgttacatagctacattgaatataagagagagatattatattatatacatatataataaatttaattgataaagatttaaagattaataatattaatttaattacacgataataataggaatacaatttaaatctaacgagtgagatttaatctgagtcacttataatgaattatcctattattttaattaaatggacatttaaataaagtctatttagttgcatatataaggagcattaaatctagggttgtcgaatgaagttttagttgcgatttttcgaaaaattgataacctagatagactttttccttctatagccaaaatgtacagtttctctttctctattctttagtcatctatttatgtgctgagaatttctcacattagtctaggtgattccaaggtcactgaggaaacctgtgttgaaaatagttgatagattagagtttttgagtttggctcaggttcttggcaataccacgttacaaaaaagattcaagggttagagaatataaaagaaggagacattattgagtattctaataattgatgtgattaattttacttttagaaagcatgtttcaggtagtttaataattaagttaattattgaaatacgtgatagtaaataagattctggtaaaatatttccaacaattgatgctgcctaccgtggttttgttgctttttgtgctaggattacttttgattgtgaaggtcaagtgatgaaagtttttacttcgaagtcccagatggataaccctctagctgatgaagcttctgccctcctctttgcagctttagttgcaaaggctaggggctagtcccgcctgatcttcatttgtgactgcacgcaatggtttctggagccaacaattatgttttcccttcttggtgtgatagaggcttatttgctcaattgtttgttatttttgatagattgcttgattttgttgttttttggattctttttctaaatgaagcaactcataagtttgttgcttgggttgcttcttcaaacttaactggttttcttggtatgagagaggtaaccctttgtttctactaatgtaagtgatttcagtttcctttatttaatgaaatggttgttctgcattaaaaaaaaaaaataaagtaccaaatgactacctactctattattattatcattattgaatatataactctatcttgtcacatttgacatcccatttttctcgtacccttttcaccaagaaaacaatttcttctcctatgcgtaatacatagatagacatttgttctagttatgggcacttgtcctttttataagttgggaaaaatatgtaccaattgtagggagaattccctcattatgtttatgtaaaaaaaaaaaaagaaaaaaaaaagaaagtgattttgtcaaattgatgaccctacctaatgccacccagattggtgtattattttttgtttatgaaaaaccttacaaagagaagctaggaatgtcactttcaccaatagaaatattttcctgctttgtgatcatgtttaatctgctgtgaaatcaaagttacccagtttttatgtgatgtgtatatgaggacaggtgattctgattcccaccaatacaccttaataaaagaaacaaacatgagtatattgttgaatggttttcatacatattttagcttttctaaactattataatgtaccaatgttcttcttctactcaattataatacaactatagtaagattctatatatgcacccgggtgtgacaaatgttatttattttctttttagtaagtcatgtacgtagagattcataaaaatcgagtgtaaaacagtttttgttttgaagtgaaaaagtgtttaccctatattgaatgaatgatatttgttgttatatagcaattaatttggactatcagattctatcaagttcatgttttaaggaagaaaataaaaaagttctcaaactctgcacttttcatttgatttaaggaaactctctctcaatgatcattgggtgccacgtgagcaaaaaagactaattagtaggaggaagagctttttattggtgggctagggcgtagataagcctttgagtttgatggcattcaatatagggtccaaactggcctatttaatggtagtggaagcttcactaggtgtaatggtgttgaattggaatgtccttagccttaggatcaacacatattggtttaggatttttcaagattagggcatatagataatagtagattttttttttttttttttgattttgagatctcagttttatcactttaattaatccctcactagtattaaattaatgttatgattgaatgcaaagagccttgaaatatgaagctgagctaagggaatcatgcacaggcccccacatgtggcatgtgtaattaaaagattagtcaattaagaaatcaagccttgagagcttaatccaagaagttactttgttctctgcctatctaataaactaaaacacaagattaaagaggtgtttactcgaaaccccatgagatttagtggggtttggccatgttgagggggcaaagccagctctactagggttatagggcctaaacaagatcctatcttagtgcaaaactaaacaaataatattttttcgaggtaggcacttcctaaacactaattaaaaaaaaatcaccttaaccgatgagtaggagtagtattaagagtgaactaataatattaatgtgttaccaaatgaatttgctcaaactatataagaccaccccaaagctgggacatttgccttggacaggagtcttgtaaataccatagtaacacattgtcctgcttaaaagcaacaaatgaagtttttattgaaacaatgaattttacttccaatgttaggtttagctttaggaccacaaaaacaaatactacaaaatctgcccccaaaaccccaaaaaccgcatacattacaatgcaaaaaacatcccctttccatacaaaaagttcccactatcaaaccttatttattaattaaggtaacaattcttccaaagctaaatgcccacacgtctttaattaatatctatttcaaacagtgccaacacgtctttaaagattaagtcaagtgattaatacctataagcactctttaaaagagtccaatgatacatttctatgtgtttcaacatttagattttttttttttaatttatcttaggtttgtagttatttaagaattttataaaattttgaaaaaattaaaaaaatttaacatattaaaaacaaaattcaaataattttattctatatgtctataaaataaattatttaaattctatttttaaacgtattaaattaatttaaattttttaaaattttactaaatattgactactataaacaaatggactaaaatataattttcaagagttttgagtcattctaaaatttttcaatatattttatgtacaaaataacctgaaaaatactgtcaaatttctcaaaagaaaaataaaaataaagataaaataaactgtcaaagactgttaaacaaactcccacttttacccttctgccctctcttttatattttttttttttgtttttgagtgaaaatataaaataaatttgtttctctcctccgtagaaaaccaaacaaaggaatgcgtacactaaagtacagtgctacttgaggtagtagatcaaacctaactttgctgaccgcgggcagcagttaagtgtgtttgtgtgtgagagaagagttcggtcaggtcaatttgggtaggtctgtgttttggtgaccaaagtattaaccattgcccctccccaagtcccgagcttaggtgggtcgaccttggattttgggggtaaaaagcctcgagggaccgaggctctctcttccttcgtctctgcactttattctcttcaaattcgatagttttactctgtgccctcgaacgaggtttcctttgagacaaaactctctctctctctcttctgcgttgtcgtcttctaactctcagaatctcatatcttacttctatgaataagggcagtacctctctgttcatttccgtttgagtttctttttgtttgaaagaaaaaaaaaacctttgttcactgttgactgaactcggtccacaaatcatagaaccaaaatgcatatcagagtttttcgaatgaaaaaatgaaaatgctgtgagtcatgagaatggaatgttgaaaaagctgttcttttcttggttgtcttcataacatgaaggaaaacagaggactgcccttttgttttttgtccctaaatctgtgaccagctcccattgttttgagcactaaccattacttcaactcctatttcttatttttgatttttcacttttgtctaaaacccaactttcctttttcttgcattttctccaacttcttcttcttctttttctggtaagaaatagaatcattgaaagtatcgaagagttcaaacaataaggggaaaaagaaaatctgaaaccgcattgttgatataaatcaagtttgctatatgaagttgtgaacaatgagagatgagaattccaagaaaagcaaggtttgagaaatggcatcatttccatggttttttttcttttttttctttttttctaaaaagtttgtttgtttaggttgtatgattatactgaatgaatctgtttctcgatgaagctttcatggcctaagacacttgtgaagaaatggttcaacataaaaagcaaagctgatgattttcaggcagatgatgtcatttacgaaggtgattggtccaactttttcgtctgttatataccatttttcgggttttggaatcttaagtgggaattttctgctagagcctgaaatacgtttgcattgtgttttagttctagtctccatcacaagctagtcttgcattttgcagttctaagatctgttgtttgttttcttcctcatcctgaaatagctctctaaatttggagttttggcatgagtgggactgaagttttttgttttttgtggcgtttgaatgcgtgaaatcgatgcataaacagtggaaagaacacaactttagtaactttaagatttatcctttctcaggtgttgatgaagagtggaggaacaactattcagagagggaggcatgcacaatcaagaaaagtaaaacaggttcagtctcagatacctatgctatcctttggagtttggaccacatacagagacaattaaactcttagaactcccctaatttcatatcattatcctttaaatcttaattatccttctgaatatcccttccttaatgcacagaaagattcagcaaaaggcaccctgatagagcccgccgaggcaaaatcgatctagactcctcccaagttactgatgtgcataattataggtatgtatatattactctttcattttcctattcattgtatacatatatacgtatatttatattaagccttcttcttcttctaagtgggtttggattctttttttcatgcgagcagagtctttgtagcaacatggaatgtggctggaaaatctcctccaaataatttgtgtcttgaggattggcttcacacctcgcctccggctgacatttatgttcttgggtaattccactaattcaaaagttttgttctttcttccttttctagtggtgacatctcagtttaacgcggagtcatttctgggtttttcgttttcctttttcattcaggtttcaagaaatagttcctttgaatgctggtaacgttttgggcacagaagataatggcccagctagaaagtggctagccctcataagaagaaccctgaatagtcttccagggactagtggaggttgccaaaataccccgtcacctgttcctgatccaatagttgaaatagatgcagattttgaaggttcaacaaggaagaaagcatctgctttctttcaccgccggtcgttccagtcattgagccggagcatgagaatggacaatgacatgtcagtcattgaacctcggctcgatcgacggttcagtgtttgtgaccgggtgatctttggtaacagacaaagtgattatgatccaaattacaggtggggctcctcggatgatgagaatggacccggggattctcctgtggctggtcactattcaccaatgtcctacaatggctctctgtccatggaagatagagacagacagacagggcactctaggtactgtttggtcgctagcaagcaaatggtggggatttttttaacggtctgggtgaaaagtgatctgagagacgatgttcgaaacttgaaagtgtcttgtgttggtagaggattaatgggctatctcggaaacaaggtatgatgtttgtaatttgttttgtttcattctttgttgttgggatagagaaaatggtgacaaaatgaaaagaataagaaaaagctgtattctcataccttttggggtctttcagggctcaatttcagttagcatgtctttgcaccaaacaagcttttgcttcatctgtagtcatttgacatctgggcagaaggaaggagatgaacttcgaaggaattctgatgtcatggagatcctaaggaagacgagatttccccgggtccatggcattggagatgagaactcaccgcagacaatactggatcacgagtaagttcttgaggttttcctcttgtttgtttatttgttgttacta

SEQ ID NO: 23219 - DNA, 3199 bp, Cannabis sativa
  modified_base (1029)..(1031): a, c, t, g, unknown or other
ggtagttagggtgttacaagaactcatccaatagagcatctctgacacttttgggctcaatttgagagagataataggaaaatgctaacaggttctgcagtttccgtctggtaactatggtgtcattcggatctcctatgacaacttcctgaggatgagctttctgaacccaggagggtggtccatttttgtacaatttggcttgttggggttctttggtcatagcactactaacttcaggttccctgtttggatcactgacatttgcatccatgtcacctgataatcctggttcggtgtttagagactctgtaagtgtcaggatacatttgggtcagtctggtgataactggtctaggtccagagaggacaggggcatcatcctcgaccactcacttcttcatccttctaagtcatcaaattttacattcattgattcgactacagagtgagtccttttattgaataccctgtaggcacgtctgttgatggagtaacccagaaatatcccctcatcacttcaagggtcaaacgtggctaagtgattacgctcattcagaacatagcacgtacatccgaaaatgtgcatgtgactaacattttgtggtctccctttccatagctcataggcagtctgagatgtaccagtgcgaagatgaactctattgcacacatagcaggaagtattgacaccttctgcccaaaaacgttttgaaatgtccttggcttgcatcaagacacgagccatttcttggagagttctgttttttcgcttaacgactccattctactgaggagtttttggggatgaaaattcatgagaattcccattccattgcagaactcagagaatatggaattttcaaattcttttccataatcactccttaacctaaatacttttccaactttggagtctttctcagtttgtagtctcaatatcaaggcagagaagaatccaaatgtctcagatttctctctaaggaactcaacccatgtaaaccgagagtagtcatccaccaagaccannncatatctttttccactgagactttaattttgcattggccccatcaagtccaaatgcatcagttccaacacgcgtgaagtgagaagtctattgatgggaggatgtgatgggttatgttatctcgcaagttgacatggtccacaaattctctccttggataccttcatgttaggaattccccttactgcttgaagcttcaccagtctttgaaggtctctatagttcaagtgccctagcttgtagtgccataaatcaagtttatccaagaaagttcgattgcacacaatggtattgcatactgcatatcactgatctacagtcctatttcatgtgaagacaacacacccattagatgaaactaagcactgagttttagtaaaacttactgagaggttgtcgtcacacaattgaccgatgctgatgagattggctttgagtccttttacgtacagtacatcagttaactgagccactccattcaggtttacatcacctttaccagtaatatgccctttgttaccatcaccaaatgtcacggccccctccttgtcctctttgtagtaaactaacaattttttattcccagtcatgtggtgagagcatccactgtcaaaataccactgcccttcaacaaaggcagacatagccagcttcaccaccaatccaacatttggactttgtttagacttttttttccattatcgacgaggtttgcgcccatgagatttatttagttgaggaaaactatttggtcgattaatcattgctttcaagtagttcttcaatttatagcacttgggacaaatgtgacctttcctattgcaaaaatgacatgttggaatgtaattatcattttgtggcagattcgtacatcaatccttctttctttgaactttagattagtgggttgagttggaacttgtctcttctcagaggaatttgattcgttaatggtggtccagatttctggtagcccatcttcctttttggtcagatcgacatttgagggcagtgaattctcaactgacaggtcattaccttgttcatacaacatcttataacctaaggaggttcgatcaccataaggcttttgaagttgtaaggtttgattgatagcagctgtgcctgagggaatgaattgtagtgcttgcttagtcctaataagatcaggactgagtttataaatctcattctccttctcatcaagaagtttgttgaggtttttgatcgtgtcctctaacttgcctttttcagtctccacttgctctagggagctttttagacctctgatctttttagtcatgtactcccattggggaaacatttcctcatatgcattttgtcgacctacgctatcagcttctaagaaagtggagactgcatcatcttcagactcaactgggtgacagctttgggccatgaaagccagtaccttcttatcctcatccgtgcttttactggcagttgagttcttttcttcttcactataactccaagttgctgcaagggccttcttctttttgagtgtgtttgcgcactcggcctggatgtggccatatccatcacactctctgcacttgattccacgattcttttgatcagtagtttcttgttaacaaggaaacagtctcgtcagtaatgccattcaattcctctaaaatcgtttcttgttttcttgatgaatgagggcgacactcacatcagatttatccttgaccgcatccttctgtttcttggttttcttccacctggacagtgacagctcataattttgcaaggactcaatgaggtcatcaagatccagttcctcaatgtttctcatttcttcgattgaggttaatttagacataaatcttctagggagaactccaagacttttcgaacaagctttgaatttgagtaggttttccccagagcataggactcatttgagatatcacacaactttgcatgaaattcagctactgactcgtcttcctccatggttagattttcaaaatccttggccaaagctcgcaaccttgatttctttacagcatttgttcccttatttttaattttcagcttctcccatgcttcatttggaatttcacatttagcaatgacctttaattggttcgtggagacagcattaaatagagcatgtaaggcctttgagttgaagttagc

SEQ ID NO: 23220 - DNA, 1608 bp, Cannabis sativa
tagggcataaaacccaacacccaatacgggcataaagatccaagcttgaccggttcgctattaaaataatctaatctgcaacggctacacccttcggggaaccctggtggtggatatggatatttcttccacccatcatttatttgactccataggaacctccatttgtttgccacccctttattttcaaaacgtttaaaagcttctatatattcttgcttttctggagtaatttcgtcactagattcctgtttgatctcttcaacagatagaagtttgtgtttgttctctttactagacatttagaacttataagacaagaataatctatggttaaagaatgagaaaatatgcaacttatgaagatgaaatgtgcttttatagggcagaataatttttgggaaggtaggaaaaattaattaacattaaatctgttattgtacatgtgtatggtatgtaatgtgcatttatcgatataatgacgatacattgtcaataggttgtcgataatagaagaaaattgaggccacactttatcgataatatgccgacattgtcgattgcctcgagatagaacaaaagttggaaaggtgggaaaaaattagcattaaatgtccaattgtatacgtgtatgacatgcaatgtgcatttattgatattatattgagtgtgtgtcgatatttttttgatagaacaccttgtcaatttgatatcgatgatatgtcgacattctgtcgatgggacaatctctcgaaatcctaacatttcttatcgatgatatgtcaatggaatatcgataatttgtcgattatgtaaattttctgccctttttagtttttaataattttttggcttttttccctaacttatcttttctttttgtttgaaattgcaggatcaacaatgtttcttgttgtatcgtacgatggtgtttggtgtgttgagggttttaattagatttataaagccgaaggcagtatgacgttgactgttagaattgacacaaccatacaacaaatgtgccagattttatatgaagagttaaaggttgatcctttggcatatgctttaaaattggagatttgttccttgtacatgaagggacaaatggttccgccagagcttaaaaatatatcctaatcaaaatatcgataaaccatagataagatgtcgataacctatcgatatacattaaaaaagaaaaaattcttatgctcaaactattttcagttttggtcggcattatatcgataatctattgatatctcatcgataacactcttaaaacacacagataccactgaagaacatacaaaaaaacacacattatccaaaatctataaaaattcaactaatatgaagaacatacacaaatttgtatccaaatctatgaaaaatctaatttttatttaaaaaaaaaacttacttttttactgagcttcgtggtggcgacagtttgactctgggttctctcggtggtggtctgatatcggtggtatgtggtcgtagtcgttgtgggtcgccttctgtggtatgtaatcttcttcttcattatcgtggtggttgtggtgagcgttgagctgcttgcgggagagagagagagagaga

SEQ ID NO: 23221 - DNA, 1606 bp, Cannabis sativa
  modified_base (1191)..(1191): a, c, t, g, unknown or other
attaataaactcttatgctataaattcagcataagtgaaattgtgttttgcatttattttaatatgttaaatgtgaaaatttttgcttaacacaaacatcatgtaattttatttggaaaatttaatttaatatacttaaaaaaaactcaaatttcaaaagaaaaaaaaaatcttctttaactattttataaaatattatcctaataacttctcactttaccaaaaaaaaaaaaactatttttttttcaaaacctaaaaaaaataaatctctctctctacatctccattagccaagtcctccccttttccaatccccatcaaccgctcctccccattttttgcaaaaaaaaaataaaaaataaataaagccctcctcccttccctctagcttcgccgcctacaccccttgaggatgtccgtctagccaactctcaccagcccaaccgccatgaaggacgttggccagccttcactcatcagcccaaccgttgcaccgcccctcctctacctccccttcattgtggattcatgggtaacatttgttaaataattgtaaaagtatagtatatttcgctagatttatgcagttattcgtataattttcaccaaaattgcgagatctcgtttttcagagtattctgtgttatcctattttttgcacaatgacgtggcagaaatacacaagtgacatgtgtcttgcattccttgcatctgggcggagatgaatgtcttcaacagacttcatattatacatctgcatgtataacttctaattacccaagcagggtggaaggcagactatccgagaaggaacaagtttggctttccaaactacttatcaagagttaactatttcagaatgatctcgtgaagtccaagcacaaaaacaatccctacgattgtgggattgagtcagaggaatatgacaacatgttccaatttcttattttgtgtagcataattatgtaatgaatattctttcctattttatacattgtaagaaaaagggaaacctttcctcatgcattaaggccctataaaatagtgacttagcctcactgtgaaagggatcgaaagaattgcttcagagagagagagagatctaagagagttactcagagatttcattgtaagagctctgagagagaaaaaatactttattctttgtctcaagttaatacaatctaaggngagtaggctattaccacacttacagggtcgaacctctttaaaatctagtgttctttatttattggtttttgctctattttaattatattcttaattgcttaataattgactcactgttgttggttaaaatcgaggtcaacatttttgtgctttcattgagagcaaaaaccaaagtttgttgtttgtcttaagtcttaacaggcatacacaatggtggtgcaaactcgcagaggcttggtcaatcaaggcgacccaatggtgatggatcctaacatacaaacccctgggaatacgagaggaccactagggacaaatcccgaataggccaatacagaatcacctactgtgggccatggtgtgacttcccctctagctgggacacaccaggtgtgcaatgttgggttttgtgccctaa

SEQ ID NO: 23222 - DNA, 2434 bp, Cannabis sativa
  modified_base (46)..(47): a, c, t, g, unknown or other
  modified_base (375)..(375): a, c, t, g, unknown or other
acctctcaattagaatataatttatttggtcccaagtgtattcttnnatagaggttctactgtatatcaaagttaattaaatatgtcactttttcattaaacccaaaaatactcttctcataactcaccctttctctctctcttcctctattctctttgtctctctcgctctcttcttctcacgcacacgaagaccctagcaaagcacggctgccaaccacagcgcctccaaccgaagaccaccaacccctcgacgactaccaacccgacccaagacctccgaaccacaatcaccgctccatgaatgcaagtttttcatttcattatattgtattctgtgtgatttaggattgaaatgtatgattttatttatangtttattgatttaggaataaattatatgattaatgtatgttatttgtgagtttatgttaaatttatagggtcaaaaaaagtcgcgactgtttttttgctaggctcgatagtgttccgataccttcttattgttaaaatgaataaatattgaagacgaaggtccgatggtggcccaatgctacctataaatgtaggatatgttccgatagtagtctgatggtggtccaatcatagcccaataccttcctcacgaccttattgaatgaagcttaacatctataaatgtagaatatgatatgatggtggcttgatgctataattttgttacatacaaaaatataaaaaaaaaaaacgtagcatcaggccaccatccggccaccattggaccttaatcggaccactatcggtatggatgggaatgggaagttggatggtgaagtttaagagaagagaaagaagaagggtattatgagtattaaaatgtgttttcatttttttttttaaaattttggtaagcttgtgttcaaatatttaatatgcaccaaatgtatgcatataaatttaaattttcctctatattatactcatagccatagctgtatcgtgctagcctaactcatatttttgggtattttaaaatacaagtcgtaccggaccataaaaaaaaggtcatgctttgttgtgccataaaaaatatgggtcgtatagtgtcgtacaacaattttataggataaatccgacacggcttgcaagtctagtaattttgtgttgtgttcggatttgtgtcgggctttattcaggccgacctatttttcttaaatagaccagcatatttccttatacgggttgaattcgtgatctatatttttatatttttattataattgatgagctaaatactaaaatatatgtattttaagttttaactacttttatatctcttttaaaaaaaaataaaataaaaaaattatttttataccttttttaataatagttacagataattatataaaaaatataattataatatttatattttaaatattataaatatttatcattcttattattatattttttttaagtatattacattttgtagaaaacaaaaaaggccgtccgtttataaaaacaagtatttccccacttcggattgccagtagctctacgtctacattcatgatgaaacattgtcaaaacctatttgtacttgtacgtactcagtagttttttttttttgttcatagaagaaaaagtaatattgttatctattagaatttactacaaatttctatacaatttagtctaaaaaattttatacacttgtagaaaaaattatctaagaacttaagaaatttctaaattagattaaatctaaaatatactagttatattgaactctagaaacatttaaatttatttggatatgtataattctttctagtaaaaaaaaggatctaaaaaaaataattctaaccataaagtgtaaggaggagtgagcaactatataaatactcaacaacaaggattccaaattgtaaccaacacctaaaagctaaatatacaatctttaattttaataaaagcttactactttaaatacagttctttaattcttttaagtaaacactaattttatatacaagccactgaggctagcttagtaatgagaaagggataaagaaaaaaagaagagatcatgggtttaaacctaccaccttaaattattaagctattaattgattgtaaaatattattatgctacactaaaaataatactaattttatatactaaatgaacaactactcatcaatattactacttcactaatattaccacacattattatccaatatcctgcaaaaataaatgggcgactaatatttcacattaaaccataagagtcaaaatgtggaataaattcgtattcaattataccaaaaaaaaaaaaaaaaaaaaattaagaccacaaaagttagcatgtagtgagggacgtctcaaattagtgagggggcctcataattaaatttgatagaattccgatatttaattacgcta

SEQ ID NO: 23223 - DNA, 3515 bp, Cannabis sativa
aagtttggttacctaactaattttgagtacttgttctttttgtttacattactctaaaagacttaataatataatgaaattgcagctaattaagtttcttctattgcaattgttgtacacttatcaatttttcaaagatcagaacttttttcttctcatgttgaatttattttgatacattaattgataagagtttcattttcttgaaacagttttctcttgtcagagttgaaaactttaccatggtatgaaacattatagaacatttgactagatttctctatataccctttttggctgataaaatctcattcacatatttcataaatgacttttaagacattctctgtgtagttgattcagttatggtgtctcttagtgattaataagcttaaccctctaaattaagtctagtctacaaatagaagaagaaaaagaaaaagagaaaactttctttcatttgattttaaaaatgaattaagtttgtcattaacttctcatatctgacaactgtgattaatttcacttatggcttagctatacaatatacaataattatctctatatataattatttatagagtagaccaaaaccatgtgcaataatcccacttcaaaatttctggcccagcattaatgtacctataatatgtcccattctgtcattaaggactaattgaatttcttttcctttcaaaattgatttgctagtttaatgggttttcaatgatttgcccatatcattgtataattcacttgaatatagctgataggtactgctttttaacagctagctaattctatgtatatgtattcttttttacttggaaggggaatttgattctgaaccatgtgaatttgttcttgaccatgtgggtttgttccaccaccatagcctaaaacttctcttggagttctcatctaccgacatattagaggacctaccttactatctcttccacttctgaatttagtgttttgtttttgtttattcttcaattatttatttttttcaagtgatttaccatttgtatttttatagcacaataaaaaagattaacattctgtttgtaacgttcccgcctcaaacttttattgggtccttgcttgcactcacagaatggtgactcttatacaagaatatgtcactctggctatacgagtgttttcagcatgttttgtcctcactcccacacttcctgggaaaacttcccaagagatcactcatgctgtcttatacatgagtacgtcactctagttgtttcatggactgaccctacaaatcaacacgagtgtttttagcatgctttatcctcactcgcacacttcttgggaaaatttcttaagaggtcacccatcctgaaattacctcaagtcaaacacgcttaactgtgaaattctttcgtgatgggctactgaaaaacaagatacatcttattgatataggtagtaccaatatatccatttaagtcatcttcaactatgtagtctcatacttacacaatctcacaatcatcacacttgaccatccccaagcgatgtgggattgcacagtttactcagtatttccctttacggatcacgggactactaactgtcaaactgtcttagcttctaaagaattaaaaaagtctttctacaagtgtttggataaaaaaaaaaaaatccatttggaagaagttaggattagtagtttttcccaaaaagacttttgagaagctaaaaaattaaaataatttacatgatttttaatttactcacaaaaagatctctttttaataatgatcttcaaattaattttcaaaaataaaacaaaatttatacctattttatacttctaactataaaaaaaaaagtagaaaacttaattaaagaggtcatttgtgcctttttagagtcttcttcctttacccaagttttgactttctaagattggtagactaactacttctgtggcctttttttcgttgtaaaattcatatgacagcttaatctagactatcacataaccaacctttgggatttgtaaagcttttttctttttctttctctaaagtgatttgtctaagaaacttcctttaattagcatccattctaacgttgatcaaagctgagtttgataaaaaaaatattccttaggcaagcaatgaaaggttctgattataatttatataatcctatatagttagggagagttacgatagagtttttcttgctgaggagtgcattgttattagttaatatttttggcactaacatcatttttaatggaagatttaaaatttgtgttaaaattgacataaaaaaatatgtttgtgctatatttgatctactatttataattgtgctttaatacacaagatgtaaaatatatatataaaaatttaatcatattgatggtcatttaatattttattgagaatatataatttttttaattatttaaataatagtaatatggtaaataaagaatgtaaagtttagtaaaagtcaataaatcataataattagtgtcattatagtaaataaaaaaattatcatttattgtggactaaatttgacacaatattatatcttgtgccaaatttagcacaatttttagcaagtgctaaatttagcacaatttttagcaagtgccaaatttagtacaatttttagaacactactttttcttagatcatctccgatggatggtgtatattttgaattgaatttgacctaaaatacactataaaattatatttggcccaatatttgtgctccaatgcacaaagtacaaatttactataaaagtcaacattaccattagtacacattaaaaatatacaaaataattaactttatttatatatatattttttaatggtaatgcttttattaaaaattgatatcagctaaaacaatgtctaacaattcaaaaggagaattgtttacatcaaaggtacgacccaacaaataacaagaattaaacgcaagaaaatgtgtgaccttattagcatatcgctttacaaaatacaacttaatatgaatcatctcagataacagttgttggtagtctcgcataccaaaagtagaaggcaacaatacctgactgtggatagcttgaactgcaacaaggcagtcggtttcaagcaaaacaccatgtcatgctttgtccttgatccaactaagtgcttctttaatttcaatcaactctgcaatctcaggggaaacttggcctcccttacttgaagaaacagcttcgattatgtcactagaactgtttcgggctatgaaatcgaaaccacataattttgtagcctcaaaaatagctccatcaacatttatctttaccttgttaatcgctggtttagtctagtgctccacctcaattcttaactcattgtgaattaagagaggttcaagtctgttatgttgagcactttgccattgcagctgtcaatatttctggttccacaacaggtttttcctagcattccaaatagcccaatctaccattaaagcttcttcgatct

SEQ ID NO: 23224 - DNA, 8726 bp, Cannabis sativa
gtttattatttgattctcaaaaaataaaacaatattgtgctcatgtacacttttttgaaaaggtgtttggttcaatttccatcattattttcttgtgttgttgtatagaccgatgacatacttccaagtttggaagaacagggtgtgcggcagttatatccaaagggatcaaatattggtaagcattctaatccccaaatctttgtataattatctcgttacttttcagttttcagagctcacgaaagtttgttgctttgtttgatatgatatatctccaaaaatattgtttttcttagagggttattgatttagtctactttattttcttatttgtttatgtatgatccctttcatttgctactttttaaaatttgggaaagtttgtttgacataattgtgatcaaataaaccattgatcacctactatttattttcttctggagtttggttgagtttttcattggttagatcatatgatacttttatcaaccttacaatatgaatgagaaaacattgatattaagtgtaacctgagggataggccactgtttaccaatgttaaattgaggagtaaataattttaacttttttttttaatttaattttttattttattttggtcctttcggtttccaaacttctggtttgattgataatgatatgtggggaagaaatgagtagtacttttctatccatgtgcttttttttttttttttctgttttaactgagatatgaaaaaataggtttcaagaaatgtgagggctttgtgttgggtaattgtctgcttatctcttgtcatggttgttttggtgctttgatcttatttactacttagattatgtatttacttgctgtttgtgtatttgcttggattaggtttcgggaaaagctttgatctttctgttgttttgctaagataaacacactttgatatcttatagattttaagaaggaattgaggacgcttaacagagatttgctgctccacattttggaacttgctgatgttctagtgtcccgaccatcgcaatatgcaaggagagtcgaggatatatctcttatattcaaaaacttgcatcatctcctcaattctttacggcctcaccaggtaaaatattgcaagtatttggaacatcatttattggcttcaattacaaattcccttgggtactagaacaccaattctttatctgaattgcacatcatgagagaatctactttatagtaatggtgtcattaacttgcaggctagagcaacactcattcatattctagaacttcagatacaacgtcgtaaacaagctgtggaagatattaaacggtattgtttcacggatttacggagttactcagagtaatttctatgatgaaatttgtctcatttgttatttcatcgcaggcattgaaagggaaagcttttctcattattatttctgaacatttttttttttttgactttttctgggatttgtgtagaaggagagaagaagcacagaaacttctcaaggagtcccttggagcattcgaagcacagtgacagataaaatatgcccttatggcaaaattgtgaacttccattgtgattctgctgacataattgaatcttcttctagtatttagtctggtttgttacatattactatgttatgcattagaattagatgtctcgtctctttcctcttttcttcattttgttttgtatcctatattttagaaagttgagttccttgtatacaatatgtactctgtcttttttgaatgaagtttaaagttaaataaatactctagtttatcagctagattttataaacataaatgtaacatgctttcttaacgaatgaaaaggtttgcagttgacatcacatttacactgttgtctgcaagaacaaacttctcaagatttgcagtttaaacctcttcaggagaactaagtagtatttagattaacaagatatgtaagttggcattattgattgatacacctttatggcctagcatactattaaaataatattcatttttattttttgtggttaacatgtcgatgaaatattagattttttttttactcatgaagagtgccccacaactcaaaccagattttcttctgtcatcacctgagcttttaccattctcaacaaaaattaactttccaaagaagccttctttagcaagaactacattactccacttcaacactatcaatgtcctcatttgtgactactaggatccacaagaatctcaagtgagaagaaggacatcagataattaagtgttgttgacaaactaccaaattcatcaaacctctagtagaccagatctccttggccactacagaatcattgctcctgacaccaaattaccaaaagtttctatttccacaagactttcatttgagcactttgtaacatagacttattttcctcagacaaagttctagtctaacttaatgacaaatgctaaattcataccggcaaaaattatccagtcccttagtaagtttgggttatcaaagtggtctggcttcaagtgttaaaaatttagtttttgaagcatcctttatctagtaaatccgtctaagaagggaatccaatccaactgctcgcaaatggattgaggaagtagaatagtgaacattgtatatgaaaggactttgttagggatgagctgcaataggctattgaaacatttagcagagtaataaatacatggaaaattggaaattgtattgatgttattcaggaatttgatagtttgaattctctccaatggtttacaatcaacaaattctccacacttgacccgactaaactgctacttagagctcaactatctattatgacctcatttgttgttgaacgacactcttcttacccttgacctttctcgcataaacataagtgatgggagatctatcaatacaccttgcccaaagtctcacctagttcttaaggtaaaagtgagggtattactcctaaatggtgttaaagtcttttcaagtggcttcgatggtagattggtctattgaatgtaggtatgtcaaaaagatcaatttagttggatcgggtcaaagcttcgattcaacgaatcacttttgatccgaaacattcagatacttattggatcttagattagatccgttccccctcgcttaaattttttccggattggatttgatttgatctggtttcaatatattaaaaagaacttaattcaagactcagactcggacccctgggacccaagagctggactgggacccgaacctggacttagacccaaacccgaacccaggacctagacccgaacccgggatcagacccagactcggactgggacacgaatgcgaacccagactcgagactcggacccaaatctagacgcgagactcagacccggacctagatcgggacctatactcggacccggatgcaaaacccgaaccaagacttggacctgggacccaaactcggacccaagacccaggattcgaacctgagacctggagccaagacccgaacttagacccgaggcccaaacctagacccgggacccggacccggacccagacccagacccgactcgtagtcggtgttggggttagtttattgaaaacatattataactttacacagtctattaatacaagtcaatgccaaacataatactctattaaataatactaatccaaaattaaaatagatataaaattataagtttagatacaaagttaattttttttaaaaaaatcgggtcggattagatctgatttgaataagttgggtcgaatatgatctgatgcaagtatctaatatatccaggggcagatcattacatgatctggatcgggtcagatcatagcaggatcagatctgacctgatccatttacactcccaattgaatgagagcttgtggagccttctgagttccttgtctcacatccaacacatattctggttctaaggtccatcaaaacctggtaagtgagacctagtggtaaggcaatcacctactgttatggccccaaaactgagcgcgacaaggacacatggaagacgaggtgcaccaatgatcttggcggtaattgaagttagtgtgcagcatacccaatgcacttaatgactgggaaaggttcaaaatacttgggtgagagtttctcattgcgacttttagccaaagaacgttgacagatagggttccagcttgatgtacactaaatctccaacctcaaatagcacatctttgagcttcctcttttcttgagcttattgtaagttcattttgagtaggtccaatataccatcccgagcccaaaatttcatttctactactgagactagtaataactgaaaaaggatgtcaaaggagaatgaagtgaccatacttgcttaaatgatcaataaccattaggatagaatcaaaccagttagacataggtagccattctataaaacccatggatacatcttcccaaactcactcaggaatcagatgaggttataaaatcccgtggtgattgagttgaatacttgttcgggcagacctatagattttgttaagcggggtgaaagttaaaagaaatatttaaaatgtataaatgtaaagattcataaatataaagtgttgttttttatgttattttttcaataattacattatttttgcgtagctactacaaaaaagtaacatgaaaactatattttttttctaaaaaaaaatgaaaaacttgtaaaaaaaacataatttgtaaaaatgtataaaaaaattcgcaaaaatataatatttataattttaagtgtattgtgtaaattttttattttattctaataattttctttcaggaataggtgtgtaccctaggctctatgtaggtccgtccatgtatattgagtacatatactagatttagatgcatgtatgaattattgttttaaaactagtgctatagtgcgaattttttgcctaaaatacgagtacaacctcgtataaaattgacatgtggacctagttcccaatggaaaggatgacgtgttaatagatagctcccatagagctaacctcacttgatgagaacttacaagatgatgcgaccgagacatggtctagtagcatacttgtactatcccaataaacctcatggtaaataattagagtttatatttatattatgggttaaggtaataagtaggattatgatcctactagtctatttaagcataaattttaaatctgttaaaagtggataaataagagtaatttattaattacagagatttatataacatatgtgaaggtaatatgagctatttgtgtaataaaaatatttttaagtttggcgaccttagagacttgatcgggggccaaaaattataacagattttattaatagattcgacatgaatattatgataagttaatagtgtaagtgttagggtaattaagagtatgtggaatttaacttagtgtcctaaaagtagagattccttagtggctaaaaaatgaaaagtttttattaatattaatattattattactattattgttatattattattattaaagttttatcaaaacttatctgaagatatatatataaacatacaaaacgaaaatctgttctccgtgcgacgaaaccctcatcctcatttattcattttctttgatttccaacctgaaatctatgatttaagcccctgtagtagcgggatagtaaatccttgaagagggaaagcttgaggtaaggattagtttcgttttaagttgaaaacgattggttttatatagtgactttgcgatttagattagttatggagattctgactttatggaattgttctttggtagctgtggactagttttgatgtttacttgttgaatttgaggtgattttgagtaagaaatcaagtttggaactttttaaagcttaagtcctaacatcaacggcattttccgtttaagcgctcgattttaattttttgttacgtaaggattgttgtatatatggtatatatgtgttatgtgaagtttggaatgatttgaatatgtttcgatagtgttttggtgagtgtaaaatttgagattttcgtgccaacaaacggttgaccatttttggaaattctagggagatcagaaattgtatttttgtcataacttttcactcgggtgcccattttagacgttctatatactattttgatgcttgcaatgagctttacaatatggtgtatgctttagagccaaaatataagttttattttagtgtacttatattgcgaggtttggtagaaaatcttagattgtcttatgtgaatattaagtggtgttttgggatagacacttattgatttatcgttgttatgatatagggtccgggatcgttgatcgttctccaagcaggtcagccaacatacctgaactaaaacttgaggtaaaaaaagtatattgtactgcatagcaagttatattgcaatgtaattaatattattcaaaattgattaatattgagattaaaatacggttattattgttatgtaatgaaaagattgcctaattaggcaatgacaatgtgatgataccatgaatgtgatatatgggctcacctgattaggtgatgcgatatacctatcagcattacctgattaggtacgggtggcagtgacatatgaatgccgggttatggcatagacggaaactattgttaggtttcttcctatcggcgatgcttgattaggcatgagcgacagtgacatgtgagtgccagatttgggcacgggctcacctaattagatgatgcgatatgttagtgccaggatagggcacatgctcctctgattaggcgatgcaatacatgggcgccaggtttcggtacaggctcacttgattaggtgatgctgttatgtgatagatgagtgccagactatagcatgagcttgcctgattaggcaatgtaatataggattactagattaaatcaccgacttacctaattaggcaatgtgatgtcataaagatggttactttattaggtaacatatatataatttatattattaaatgaatatgatttctattattggtataatagtttggtagtaccaaatatctttatattgatgtttattcgtgacagatgctagtagtaatttgggttttatcttatgaataatgcatgatcgtttgatcctgattgtctgagtataaatgataatattcgaataataaattatatgattgttgttattacttttcttgctgagtctttgtgactcacgggttctatgtagtgtaggcaaaggcaaaggaaagctagatcaaccatgaggtgacaatcttcttcagcaatgtacatattgatcctaccggcctgtgtgtcaagttgctaagagttgtttcgggttatatctactgtatatttgattttatattttgaattttcattgtatatagtattttttgtaaaactttaacaacatggatccccgaaacacagttttgatgtcgttatgatgttctattttagtgttttattttaatgaagtttttaatattatatctattagtattaaattagtttatagaatcacacatgtgacgtacctatgggatagcgagtattaaaactaatatagtataatatatatgcaagtagaaaagatacatatattatagtggttcagtaggaactcgagctcaacctgtgcccccccccttttgaatagagctggaggcacctacttataggtagtaggtgattgttacaaattgtagtcattatgatagactattacaacttacaaccataattatcatattgattacatgagttataaagtaaatgtaagctcactttaatggtacttgaatatttggcaattattttagttgattgatatgttcgcgccttttcattgacattgctggtcttaatatcgcaaggtcccttccttgatatcacaatctttccttaacgaaatccttctcacggggagggaaattatcctattaacagaatgcaaggaaagtttaatatttggattaagttgaaagaggcatttgaattttgataaagataaataagcaagcagccatgcaagtaactgagtccaaatccctcaccagtatatggcactactaattttggaaaatttgtggatgtaacttactttcttgagtctttttcattgtcattttgtctcaatcttgatctcagtagttacacttacatgaggctcttagaggcagtccatccactttatatctgccatgctgctagaagtgccaaacatggctactaacatctaagatgtaaagcacaaggacataagtaggagctttctgcggatgtttgagttgtttcagtgagaggcacatatgcacagagccccaacaaaatgaatgtcaaagaggccatgcggtggctgcaatcaggggccttctcaaaggagactacaagaaaacttttcgtaacatcatcaagtatacctgtaagctctgaggacattttatagatattgaaaataaaattcaaaatcaaggaagatgctttgaggacttgcatccttactttacatgctctctattctatgtatcactgaacttggatcagttcatgaattacagaattgtaagcaagagatgatgatcaacaaaacttgggactggaggaatcatttcattattttccatgaagttgagatactaaattgcagggtttagcagtaa

SEQ ID NO: 23225 - DNA, 4368 bp, Cannabis sativa
  modified_base (2707)..(2711): a, c, t, g, unknown or other
tctaagttttaagttaaacactaaaatatctaaactttaaataaaaaatagtttaactaataaatgtaatttatgtaatatattaatgtataaatcgatttaattctgtttattcaggttaattgggcggtttagagtaatgtataaaccactcaatatattcattgggcggtttggattttcattgtattatttcaggttgtaagttttatcagtttattcggtttggtttgggtagtttatttgggttgggcagtttgtgaattttattgaacacccctaatggtaacagcagcctcaactgtgaggagatctctaactgtaagagttgcccgtctagtgggcaacgtgtcaggcacaccttctcagaaaatataagtccacgacctggggaggaactgcctccacccttgattcaattctgagatgaatcgaccgtagaactcatcgcttattcattcagaatagcgatgatatgaaattttaggttctaaaaaaccactactagcctcaaaattgctcgaggaaatatctgaagaactcttgagagaagaactggcattctggactagatgatggtctttgtagagaaaattgagcaagtctttgtcaattcagttgtcacctcctcaaaatttgcacaggttcatcaatataaaaaggcagggggaggtgaacaactggacaaaataaaagacttagttaaagcacgagtcaactgccctaaacctaagggtattagcaaaacaacgctaatttacaaagctattaattggtaaagtacaggtttcaagtgcaaaaaattaaacagacattgaagtttaaggtcgctaattggctgggatagactctacctaagacatgtcgtactaaattcctatgggaatcaagtactagataagggtgaaatgggctcgagaagccatacagagtctttacaaacactaagtattggccataaccggctaaagtcatgacgccaaatcgtctaccatgaatcggccaggttttgggtacaaaaccatgaactggacagactttgggttcagagtcataaaacgaccaggttttttaggccaaggtccgaaactaaaagcatgaaccgaccagggtcacgaacagaccctgtgggccagccagaggctcataagaatcaaaattctatttttcaaaaattcaaatgatgttcttcgtgactcaaagagttaagaacccaaatagagttcaaaatccaatctttttttatcaaaaagtcatacattatgcatccgaaagctatcaaatcgattataatgtaaaaaagactacactacaacatgagaatcaaagatttcaaaagcttggaaatgcttaaagtcattaatggcagaatcaagaaaacaatgaaaaagtgagatttgaatacttactcactgatggagactgatgtagatactcggggaatgatcggatcgttcaaaaaattttaaaacctcgaggaatggaggcgtttgaggagtcgagcttgaggaggaaatgaagagttttttctttcctttttcttacagagagcacgaaggagagagggaaagagggtagagtgaagtgaatcaaaatgaaggagaatgagccttatataggttgtgaagagttttcccccaaaacataatgagtggttattttttccacaaaaatagccatgcagaggagaagaagaccaaaagtttaaaagtgaggaatgtgcagccattacacgaattcccataataattggcaatagtcattttttgtcacaaagacaagtcttctgatgagtccaatattcaactaggcaaagctgcccgctgaaggctttcatagtcaaggcgagagttgaaaagtctctatccttatagacgtccgcatacagacttgggggcaaatgttatgctaatttttgtccacttgacgtgccatgtccacattggtaaaactgaggtcacgtggaatagagcctgtcagtaagtgaacatagtcaccatgcacggcaattatcaatggttctaagggaatcaagcaagattaaacaatgagaaattggccagccaaggaaccctagctggaccatcccctgaccgcccaatgaagtcctatgtgtcggtcaggccctaaaaatagagttggtcggccaagcatgtgcagacagcctcaaagagaggctagaagaatggtgggttcataagctaaattttagttacaaaacaaccttaactgtccatgaaaatagggattcttcctcaaactagtatctacctattctctagggatattacttatctttttgtaatttaaatataagataggaagagtgatgtttacccatttgaatgatgatctattgtaaggcctacattaggggtgttcgcggtgcgggtggtgcagtttttgactattttcttaaaccaacccgcacttgcggttttttcaattttccaaaccgtacccgcaccgcaaaactaaaaaatcgcaaaaaccgcactgcaaaaaatggtgtggtgcgatgcggtttatgcagtttttgcggtttggaatatcactaaataattaaaatattacaaatacaacaaagcttgagaaaaacttgtccaaaatacaataagttttgaaaataaatatgaaaaaaaaagtttcaagtttacataatacaataattagtaggctaggttgggccttcacatattggacctannnnnatataaaaattggtatttttacattatgcggtgcggtgccatttgaaccgcatattaacaattcaaaatcacaaatcgcactgcaccgcacggtttaggaaaaattcataccgcggccgcaccacaaagaatttcaaaccgcatttttttatggtgtggtgcagtgcggtgtgggaggtttgagcggtttgatgaacactcttaccctacattatataaagggcattaggtaagatgaaaagggacctgaactctaagtctttcaagtcctatagctcctctgtctctctcatgcctcctcactcactcactagacacttagtctatttccttcacaaagtctcacttgtttttgagtcggtaacactcaattctcactactgtaatattgaagagagtcatagctagaaattacaagattcaagcatgtaatctgcgtggtattatctcaagaatcaatacaactaaaagagaagtaggtcactactactaaacaaggaggtcaaatctctataaatctcgtgtcacttttattatttgttattattatttacatgtggtgattatcaaaaataattaaggctctgttgtcaattaaccaaatcctgggtcaacaatgcttatgataagtatagaatgaatttccaaaaaggtaatgtgtagcctttacttactaggcttgcacgaaggtcttttacatccactatcccaagcttgcaaaatgaacatcctcaacaacttgttatactctttttcgatgagtctttgaatgctcaacctcaatcttttggagaccaacatagcttgagttctggtgcaatagttagcgttcctcccagcctcatgctcccttaaccactagaatcatatcacctctacctcccattctacaatgtcaaataacacccttaattgcctaacctctacattaccacttacgaatcccactgtttttttgtttattctccgtttttataccagacttcaaactaagatctactaatctttttgccacttacccacattacacccctctacaacattccacttctaatccctccaatcttgtttcaaccactcctacaaggttcattatgacaacaacttcaccatctatttttatctcaaactcacaaattggtgtcatattaaatcctattgttactggtaaagaaaattcttcattgaattgcactatgaaacgacaaaaacactccctatccatgcaccacatcctgaaatgtggagccactaatactccatcttcatcctagtcagttaaagatggtgatgaacctatttttcaaatgctaatgcagattttgaaggtctctatgactcaaaggcagaggttgttatgcaaccgtaccaattgccatgaaaattattaattgaaatgcataggatttaagaaacttgagtgcattcaaacatctacagttgcttgttcagcaacaactaccccatgttttatttctcatggaaactaagcttcacaataattcaatttctcattttagacaatctcttaacttcactaatggacttgaggttcctagaattggccttaagggtgatctcatgcttctatggaaggagaacattgatgttaccttacttcatatggtccaacttattttgattgttttatgtctga

SEQ ID NO: 23226 - DNA, 1352 bp, Cannabis sativa
atactattttttttataaaacaatatcgtaaaataataaaatagaaaataattaaaaaaaagtaaaataattaaaatataattataaaaatttaatacagtacacaatataaaacttaagtgtggtgtaaaaatttctaatttttaattaatatgaatttaaaataatacatatataatgctaatgatagagtaggcagtagtcataatcacgtggcaaagaaaacattattggaatcccttctttattatattttcttggagacatatggaccaaagggggttacatatgtctatatatataaatatatttataatcatttctttttcataaagataaataaaaacctcttgtgttcacaacttttacaaaattccaatcattataatccaaaagtactacttaatttccctttatacatatattatttttcgtcactatagctagttatttattagctatagtatagtgaaatatttaaaaggtttggtaagtaaatatttgttttcctatataaattatgtaattaattttccagaatatatttaagttctaaaataattgataatttatttcagcttgcataataagagtgtatattttaaaatatatatatactaatttttttaaaaaaattaaggagttgttgtcattgtctattgatgataaattagtcttgttttgagaccactagctaattagttgttggtcggccaaagaaagtcattttgtgctaactaaacaaaatcaaaactgtgcacgcatatacctagattttgacagccaacaaaattatataattatatttatatttatagtctttcctttaaagttattatataattaaaactgtataatatgattaatggaatccaatagcatcaagctttttgggccacataaggttcacactaacatttatgatcatataaaaccttacccacatgatcatcatgatccaataaagagtccacatgttcatgagtgttttttttttaaccacattgaaaagattattccttagctttgaataattctttctttcttatatagccaaaaaggtaccagtgaatcgcactcaaatatagataataatgatgaattttatacaatttgatagattttatttattataatgactaaaaaatcctatatatagtttttttttttttgggaatctatataaattatagagataaaagattcttataaaataaatgtttttgttacacaatatatataattagatcgatatcactaccatatactattatgtaaattttattattatacaaaattaaaggactatatgacaatattttggaacttatttagtaagggaaatcacgtct

SEQ ID NO: 23227 - DNA, 1426 bp, Cannabis sativa
gaccaagctttgagttcaagaactcaaactagctcaactcccactacagttaccaaaaacatctcaaacaaacctaatacatgttctaaaataaaccctaaactccccaacttcaaacagaaataaattcagaactcacataatcaaaccaagctttttcttagaaattcaaacagaagagtagactagggttaccttaggtcttaaaaatcactttcctaccaaaaatcttgctgaattcttgctcaaggatgatgaatttgatttgaaattttgatttttttttttaggttgttagggtcgagagagagaagtatggagagagtgaaaattaatttttgatattatctaacctatcttttattttaattactaattcaacactaacctaattaattctagaaatccccttaacttaactaactccaacttaggaaaaaaagactaaaataccatttttcttcctctttaagcaaccttaaagcctagaggtaaaatgctaaaaatctattaccccacacaaccttgacatttcaaacgtccataaaatcttaccatgctaaatataagatacttaaacgtatctctgtgacattaatgaccaaattattgaggttcattgttactgagcccaaaataggaaaaatagcaaaattcatatataacatgcatgacacatttataattcaataaaatcttcataattgagaaattatctcattaatatttatttttgacaataagccttattttctactaatgtacatattattataataattaaattactaataataagttaattgtctgctaattcatatgtttaaatatgtggtcattacactttctctctatatatacacacacgtatatataatggaaacttttaggtggaggcatcagttttgtttctaccataggagtatttttggcttttgtactttcagaaagggaaatttcattatttgcccctaataaaatatcctatatcaaaaattggacccttttattttttgtacaaattgataccactaattcaaaacgattcctaaaatacccctaaaataaaatttcactcattctctctgactttccctctctctctctctgactttccctcttcacgaaccagaaaccaccgtcgacccatctccaccacgaaccaggaacctgtaaaccccaaacccccaaaccagcagacccgtctctgtcgacccatctccaccacgaacccaacaaacccagtaaacagcgaaccaaacccacaaacgaggcgaacccaaacccaaaccgaggtgtgtatctctcaaatttcacccaaacccacgacgaaacgtcaccacgagcaggacccatcgccaccaccaccaatttcattaaaaggtaatgttttttttttttttgagaaaaaatatatttttcatag

SEQ ID NO: 23228 - DNA, 1725 bp, Cannabis sativa
ttataaaaagaaaaaaaaaaaagacaccaattatattatgtatttgtttttttccctcttgtcgttatatatgaaaatgcgactgcgagtcagagtatataaaagtaaagattgtagtttgcttcaaatgcaattttgcttctagttaatttcatggctgaaaaatgtctgaaaaatgtctgaatatatttttgcctgtcatgatgtgaccatgaaattaatttgtttttattcagtcacatggctatatttgttgctttttgagaagaaaaatactattgatcccgaattaaagtggcttgaattatatccgtttgattctctttacaatctcttgattaatttttgtacttgaaaataaatgttaaaatatatatttttttttttcaattttcttcatggcattgtttgttaaaatattcaaattttaatacatgttttaacatttaacaaattgtacttttttaacggagccaataatttaaatatggacatgaatcttaaaacttaacttttatgtttttgtcaaacatcaaaaatcaatacactaataagtagtatcttcttaacatgttaacttatggagtttgatgggttgttgagtttgtttggtgtttttatgattagtaaatgaaattaataaacaattttaatgcaaaactattgtaaaattatttgaacaaaattaaaatttgttctattagaaaccgaacctaatagatcaaaattaaattgcagaaattaaaatgatatatgatattttatatgtggcatcaattcttgtatattgttaccagttcacggggccacgctcaaagataagatttattagtcaaatttcaataagtacaaagtaatttgacttagacaaaatatagactgcctctaatgattttgctgcaggcttgatgtactactactatttgctgaatgaatctccttatgacactaagatttgaaatcccttcaaattacttgatcaatgcttgcttcctctcgatacaagacttgtagaaatcttctcccgaaaataatagtgcttgcttccttccgattcaagattaatagaaatcttatcccaaaaatagaggtgcttgcttcctcctaacacaagacttggatgaacattctcctaaaggttgttatttgtattcttcactttagaatttacttcatataaaagtaattacaaagacgcacaaaagtcacaaaagaatagtagaataactattctttacaaaagaaacactctcttttaaaacataagaaattagaaataaaagagttcaaccttctactactgctttaggtgatatttatagagaaaaatgacacttgaaattgagatctaaaggcatgaacacaaagagaagtcattaaaaagtttcttcacaaaaactcattaaatgataaaatattgtctgaacagaaataaaaagtgtggagacgaaatcctgatctatggtagaattatatatgaaaataggtctcgaccagggaaactttgctgcaaatctttatgttgtattgcagccagggaagtttaggtggtagtagtgatccttctccttctccttctccttcactttaggaaccaataccctttccctatactcatctttattatttttattggaaatgtttgtgcattaatagaaaatcaactaataaaattacaactctacagacaaattatacaaaggagaataatatatatatatatat

SEQ ID NO: 23229 - DNA, 3072 bp, Cannabis sativa
ttattataatagaatcttaacaagtcgcagcactttaaaaattataatttaccaaacactcagttcaacttttttccacaattctgctacagttgattttcctcacagtacagctacagctgcttttttctacaacacagctgtaccaaactgacccttaatagtactcaaatatggcatttacagtcagcttagcggaccatgttatcattcatactcaccatagatagtcaagtagaagaattaaggaaaggaaggtacctcttcaatttaataaagctttgcccattttccatttattttacaatttatttataacgtttaaattcaattccattcttcttttcagacacttcaaagatagtcaaaatattcatattcaatctgcagaaaggctttaactggcaccgcattttgtcagcataacatcgcccataaaggtacctatcaccaaccgttgtgtcaaaaaagaatttttgtcagaaagtaggtgttcaaacaaatttgcaaaccgcttattaatactacaatctttattaatttacactataatatatatttattttgttaaaatttaattatttgaacacaaaactaacaacaataataaaaatcggtttgtatgagttaactcgaccaaatcaataaaactataattggtttggtgggttaattttttttttttattttttaattggatggatcataattaaatatttgcaatccgatattttaatttattgaaccttcatgacttgaataaatttcgtgtcatgtcgaacccacaaaatctcatatcgtgttagtggattgtaagctaaattattatttttagtgtcatcatgtcgtgtgttcttaaatttattttaaatgactaacatgaatatgacttgcaacacgaaagactgataaaacacaaacatgaacacgacccatataatttttatatcgtgtagtacccgtaaatctcaagtcatcttcgtgtcaaactcgcgtgtcgtgacctaaatcgccacctcttcatcacctcaaatcttctcttaaagaaatattagttgggctcggtgtttcatgtactctaaggtcatctccaatgttaaacaattctaaaatttatcatcgtgatttcacaaattaaaaaaaataaaaaaaaccaacaatagctagccctttaatagctaagtagtaatcgaatgtaaccttaactgatgatatttttagttccttatttaaaaaattgttgtgtttttcaaaattaataaaagaaatatataattttaataaaggaaaaaaattgagccctaagcacaagcctagcgcgcctatgcctatgattgggtctgttgatgggcactcttaagtctataccatggagagtattgcaaaaagtgtctaatacaataatgaggtactattttccataataagtatactaaagactcaatattaaattacatcaataataatattatacgataagggtgttaggtacaatgagttctcacgaactgaaatttgttgtttaaaattgtgtcctaacttaagtgatgtttagttaaaagtaataaaatagttcataactctagaaaaagaaagagacgattcctccccaatacaacgaagatccttgatctcaccactgtggcttggacagccaaatcattaacaaactttaaattatcccttttgcaaaaacaacacttaaatccttgaaacagagcaagataattcaaaatatcaaagaatcggagccagcctccaatttgggagtttcttcttgtccagagcattgagggccgcaagacaatgggagacgatattccacatttttatttagttatatattaaacaattgaatttccattatatattttgatagaataattattttatctaaaaaaaatagtaatttcaatataaaataaaaaaatattattaatttttttatacattttatttaatttcattattattcctatttctatattcattccttttattattcttatatttttattctttataaccttaaattttattttggttaaaatcaaaactcagttacaaatgtcaaactataactgaaatatataataatatacaccaagttttttttgtgggagaatatacaccaagtttaggacacaatttgattgattaatttgagccactcgtctcatgcatcattgtccacgtggcaggtaactcgtcacgtcaaaacatctctacctcccattccaacggcttaaaaccaatgatcagtcatcctatatttattcacagactttctttttcttctagtgtacaccgtaccgtcctctaatccaaacttaaaatgatagctaaatctcctgccaccggcattttgtttttcaccatttatttgggcctatctttaaatctccgaccaattttaagttccgtctttgtattaacattttcagtacaacaagtaagtatgtacaatatgtaatttaaacgtttaatttgatactctcattaaagttgcagtaatttgaccataaagcatgacaaaacatcaaatacgtgaagtagtaggtaattactaattaatataatatatatatatataaacgacaatatttggctgaggttcataaactgatttggtttggctcgtgcctgaggtcggcggcgaaaaatgaataggcccccaaacgggtacaacaacgacagcaaagccagaattatagctttgtttgattttattgaaatagatcgagtagtactgcaggaccacgagaacagagaatttgagcaatacgtacagagcttaattttattattacagtactgttagctttaattagtatagatatatattttctaaatcaaatatgctgtgtataatatttgactttctcacttcaaggtccaacttataatagttcatgttaagttgttattacaattgaactaattaagactttaatgattcagcaaagaagatatttttttttgaataaaaatttcagtattcattaaactgagaaatcagccaaagcaatggcaactaactcaggagatagaaaaccctcctggatagtacga

SEQ ID NO: 23230 - DNA, 3540 bp, Cannabis sativa
agccctaaaactagaaacaaagagtgaaaactaactgaaaatatgacctgaaacttagactaattttagcctaacaactttgcaacaagagactttggatcaaagtatagacgagcaacttgtttcaccaatataacttggttgaatagaaaaagatctttaaaatccaacctattatcttctttgtgccaacaatgtttctcctaagtacatcaaaaaagtttctttttatcaactccacctccccaccaaaactgagaatattgcatatgaatctcattaatcaacgcaacaggaattctgaacagattcataaaataagtgaggattgtttggataatagacttaataagagcctccttaccaccaaaagaaaaagataaagatttttagttgaaaagtttatcccacacatagtctcaaatatattagaagaaacatttcttactttggtcctcataacaaggaagcgcaaagtacttctcatggcaagcaaccacattaacaccaagaatagaagctatagattgagcagcactagcatgcacccgaggactaaagcagataacaaagttggtgaagttaacttgttgatccgaagcactattataccattccaagagttgtttaagtctaatgcaagcaaactctgtagctctgaagaaaaacaggctattattagtaaaagagaggtgggagataagcggtccagaagtgccacatgaaatgccagacggtaagccattcaaacaatcccggggcacaagcacaaatatctcttcagtatagatgataaacaaaaagggcgagagcagatcaccctgtcggagtcccttgccaagaacaatgtgacccaagacttcactattgagattggaagaataatttaccaaagaaatataggcgaacaccaatgaaatctatctctcatgaaaacccaacttacgcataagaaaataaagaaaaaatcactaaacacgatcataagccttagacatatcaagtttaagagaaaaacccccgttttgcttttgacacggtgcttgagatggttaaagcactcaaaaccaatcatgtcattatcagtaatcaacctgccagagagaaaagaactttgctcatcaaagataacttgctccagaatctcatgaagtctattagtcatatcctttgcaatgattttatagagaactttacaaaggctaataggcccaaaattagaaacacgctatagttcatcaaactttggaataagagtgataagagttgaattaataccttcattgctaccattctcattcaaaaagctaagacaataattacaaacttcattattcatagtatcccaataattttgatagaaaccaacagacataccatatcttttaggactttagaaggatgcatttggaagagggcacctttcccattatcacgagtgtgcggctgggtcaattagttattcattgtagtagaaattttaggagacacatcattgaggactggccccatagaatctacaaaagtgaaatccgaactaaaaagctcatagaagtagtcatgaaacacaaaagctaaattaacttggccctctcttagataaatattatcatcaagcaaagagtgggtaagatttcttttcttcctagcagaagcactcttatggaaataactagtattatgatcaccaatcttgagccaaatttgtctttgatctagaagcccaatattttttctccttacaatgaagaacatcaagatccttttcaagagaaacatattcgccccaaattagaagaagaaacaataggattaagattttgcaatttttttttaaaaaaattttcttatgcctcctataaacattagaattccaattactaatgacaacagaaacattcttaattttattaataggactctcaccaaaagagcctaaaggagcattccaagaagaagaaataatagcccaaaatcatattcatcagcccaagcttgttcaaagtgaatcgagatttcatccttggtccagaaataacattgttaagatcggaagtaaattggacatgtagaggcctatgattagaaccccaaaaactaagatgcaaaactttgtaacttgatgttgataccaaaatggtacgttttgcatttatcaactcgcaagagcacaaatctttattgtatgtagaaattatgaagaacaaggtcaaatccataagaattgtatgagatcgaagaaattacttatttaatcaaaattattaaaactataacctagttttgaaaatgatgagatttttggtaacaaaataaaataaagtgtttaacggtaaaaatgacagtaacaaatatttgtaatgatatttagggagaattattaaggttttagaatctacttaagtgtatataaaagatttatgtttatattgattctcataattaaattagcaatcaaagtaattattttctaacaaaagataaaaaatttttgctttaaaattttaacttttaagcattaaatgtgaaacaagttaatgcaaatacatgaaatcaagtaatattatttttaataaaatttagaaccaagcattaataatttatgactataaaagtatataatattaaaaatgaaataaatacaatgagcgatattaaaaatctaagcatatattatacgtggcgaacatggaagaagttaagtagatgagggacctttgaaatgactctctggaaggcattggttggttgtgtagactagatggggttgtcaagcatcaggcatatccatgacggagtataccaactaatagtttgagcaactaaagagccatctcgcagaaagcgttcgaccaacgagttcataggagaaaatgtccaaattcattctaataaattattttcttacaaataggtcaattaacacttctataattgagagattgcaataatcaagagaaatgagaggattttatgggattgactcattatttattctataattaaatataaatatttgacatcccgtttcttataaattataaatagtgcatcatattcactatttaggagtggtttttatattctcaagagaactattacattgccaatatacttgtaacttttagagatagcaagaaactcacttgacaaggttcatttgttatctaaacactttactaattccgcctaaaaatgaggtcaacactatatttgtaaaagagaaatgctaaaaggcaccagtattgccaaataccctcctacgtgtcaatatcgctattggtctaatttagtatcgggttccatataatttaatataatagattttagagagtatcgctaatcaatcgtaagacgacacgtcttaaggcgacacgtcttaaggcgacacgtcttatgggtgatagacagtagacaccactaatagcaatgcatacaaattgttctcattttcaaaaaaaaaaaaaaaatgttttgacttggaccaatagatagacataacatagtaaccctttgacaaaataccaaaaaaaaaaaaaa

SEQ ID NO: 23231 - DNA, 5834 bp, Cannabis sativa
cacacgtggcgtccctatagattagggcgttacactatttctccttgttgaagaaggcatttttgctattatccgttcctaaactcaagctcatctgttctagggtatttccatatgtcattctgccccttctatctctcatcttttgtttcttgatgatagcttgctcttcactcatgttaaccctcaaaattatgaggcaatcaaagatatttttagcatctataataaagctacgggtcaatctgccaacttgtttaagtcttttgttctcttttctcctaatacttcatctcaggataagacttcctttcatcaatactacacatggatgataaaccttttatagacaaatacttaggtgtccctcaatttttttctcgttcttagaaatctttttttcttctactcctccaaaaagctagtagtaagttatctgtttggaaccaaaaacgttttttaaaagctgataaagaaaatttgctcaagggagttagtgaagccatttcttcgtatgctatgtcttgctacaggattccttactctatctgtaaacattttggaaaacttatgacaaatttttggtgggaatcctcgggtaatagtcagaataaaattcactagaaaaatggtcttgtgtttgtaaatccaaattttttgggagtctaggtttttgagatattgttcatcacaaccaagctatgttggctaaacaagcttagtgaatttacactaaccctgattcccttgtggtttccctcttaaaagtaaatattttaaaaataatgactttctccaagctacaatagggcattatccttcgtttatttggagaagtatcctttggggaagagaccttcttataaaaggtttagtttggaaggtgggagtttggtaaatctttccagatcgctatccctaattgggttccaggcttcaactttatctcttttaaaaatgactcaattcctcttaaggctacagtttcttactttattagggaggatggtctttgggatatggataagctcaccaatcactttgaagaagaccttgtcaactctacctcaaagagccgattgaccccacaaacaagaggggcggatttggcccgccggtattgttttcgccggtaatagctgcaattgttgtagtggtagtctgtttcactagtagaagcactaatatcttagctcataacccagtcaaagctgcattaggaactaatgaagagtgcgtttggaacaattatgtttcaaaatttctttaaattattgtattttgtactttcatgttttatccttagttacagatcttgtttgtaaaaaatcttcttcttgaagcttcatccaggttttctctagtacagtaagtgagcgttctgctcctcttctcttctcttccccctaatttctctacccttcttctgtttctgtttcttttgcattaattactccatgtcaaccttaatcattgcaaatagcccccggatctttcgtgctcagctaatatttaatgcactctctctttcccagctacatttaattttgacggcaccctcttttgggcattcaatgtttgctcagactctcactcttttctatttcttcctaaagtcccccaaatcatcccaaaccgtcttttctatcgcctccaacattaactcctgggtaatcatatctcctcctcctctgcaaagagcctttccaggaatcaaagagttgtttcagaacttccctcatccctcgaggcgaccttctctctccaggtattttctacacccttcttctctatcctctgtctatttaatctccatgtgtttggttcgatcggcatcctctcctcttttgtccatccttttcactctaacccacaccgctcactcaatggcttcatcttccaccaaccctgacattctcactgctctctctgaagaagaaagcctcatccacgattttgaccacatttcgctctcttcttcctccgaccccaactcattttgccttatttttaaactcctatctcctaaaactgcgaagccagcctggattgagaaagctatgtctgaggcatggactctccgtttccctgctcaaatcactgaataccattctggcctctttttggcaacttttcaatgtgatggggatcgtcgccgtgtcttggaggaacaaccttggcattttgataagttccttatcgttttcactcaccctgacgtctcccccacccccaccccagatagtatccggtatacccccttctggattcaagcccaccatattccttttggccgtagaagtccccaactggctcaattcatagcggatgcattgggtgatcttattgaaatataccctctttcgctgctcgagaactctggtccttttctcaggattcgtgtcttactcgatatcactaaacctttgtgtaggggaatgacaatccgttttcggtctatccatgaacaaaaattgataagttttaagtacgagagtctcccaaactttagatatttctgtggcctcatggatcatacttataatcgatgtcccaggtatcttcttcgttgtgacaacttcccctcccctcccattttataatatcgtgacactcttcgagcttcggcccaatctcacttcagatagagcccctttgaaatatccaatgctactccttttgaggaattctttcctcgacactcttcgcctgatcacagcctgcaacatgctgtgaatcaatttcttcgcgtggattctccaccccgtactactatcatcaccacctccaatactaccatcccgatttcccttccttcccagactttgccctccactattccacccccgatcatgactacctccaccatcacccacactgccaaaggaaaaggaattgctctgcctacttccagtcctcctcgcactaggccaactggtctggtcattaatgactcttccactcagtcttctcccacttcctctgtcggaaccaggaagcacttcactcgacagtccactcaggttggggactctgttagaagcatgctcaagcgagctcatgcagcccccagcgaagacgcagttgtcccctctctctctgatgatgaaccaacggcgggtgtcgcgtcgcgaccccgtcgagaaaaatgagtttctgcagctggaacgctcgaggtttggggagttctcgagcgttctgtcacatctcccttctgcttaaacagcatcaaccaactctgttatttgttatggagaccaaattgcctgccggtcgtggactatctttgaagtacaagcttcattttgataatgttttagaagttcctaggcaaggtttagggggaggtcttttgcttttttagaacaactgtattaatgttactgttgtctcttactcttttaaccatgtggactgttatataaataattctaatgatattaactggcattttactgggtattatggttctccttatcttgattctaaaatttttacttggactcttctcaatcggttatatgacattgtaccccttttaccttggttagtaattggcgattttaatgattatttatctttaaatgatcgtaactccacttccacccctccctcccatgccatgcaccacttccacaactttctgcatactcgtaatatgacccctctcccccattctgggaataagttcacttggcgccatggccacattcttaagcgccttgactggtgcacaatttcctctacttggaaaagcctctttccccatgcctctctctctcatttggggttctatggctctgatcacagagccctgaaactccaattagaggacactttttccaaacaccaaaaacaaccccattttcatcttgagaattttctaatcactatccttccttctcaacattggtccgtgactcctggtgccttccttcctattccccccttcctcctttgcaacactttcttaaaaaacaatctgcttgcctctccaacattaaggaatggcaagcttctcaaccatctcttaaactccaaattgcaagaacgcaggttgagcttgatcatttgttgaatgatgatcaccctgctcctcactctactcaacaaatttcccacctccaatctgagctcaacagacttctccttaaagaagaaatcttttggaaacaacgatccagagtagattggcttcgtgctggtgataaaaattctaggtttttccatcaaaaagcctctattcgtaaacgaaataattatattcgaggtttaactctccctgatggttctatcacccatgacactcagaccatattcactcaattccattcttactatactgaccttttttgctctcaaggagtttccccatctgctattgcctccattctccagggtgttaccactaccctctcttcttcccaatctgcttttcttgctgaggagtttacagcagatgagataaaaacagccatgttcagtctctctggagacaaatctcctggtcctgatggtttaaattcctacttttatcagaaaaaattgggatattcttggatctgaccttccaaatccttaacaatcagggggacatcccaccaatcaataacactattttggtcctcattcccaaaaagaagaactctaaatctgtgcgtgatttcgaccaattagtctttgcaatactttgtataaatgcctatcaaaagtcttggctaattggctcaaaactgttcttcactctgttatgagccctaacaaaagtgctttcctcactggccgtcaaattactgataatattgttattgccaacgaaatcattcatgccattcattctagaaagtcaggcaaattaggttgggctgctatcaaactagatatggaaaaagcttttgatagagtggaatggtctttcatctctcactttcttcatcatattggggctcctccgagttttacctaccttatctccacatgtctttccacagttacctaccaattatctctcaatggcaaattatcaaatgtgttttcctccacccgaggcattcgtcaaggcgatcccctatcaccgtatctttccctcattgtagctgaaggtttgtctgcagccatccgtctccatgaggatgttgccctgttctctggcattaaaatttgtcgaggggctccctcgttttcccatctcctttttgcggatgacagtatgttatttgtgcctgtttcctctcaatcctcagaagctataaataatattttgcttctgtacttccaagcttcaggccagtctgtcaacagggacaaatcttccattctcttctccccaaatacctcccctgattcccaatccatgtttcggacctctttactcctcaatggtgaaggtttcattagtaaatatcttggagttcctcactgtcttggtagggttaaaaattctatcttccattacctcattcagaaagtttcatctaaacttaatgtctggaatgacaaactcttctcacgggttggcaaagaaactctcatcaaatctgtcattcaggcaatcccctcctttgtaatgtcttgttttaaactccctaaatccacctgtgcttccattcaaagtttgacttctaaattctggtggggctctacttctgataagaggaaaattcactggagaaattggtctgccctttctgcctctaaattctttggaggtttgggatttcgatccctaacttctcataaccaagctcttctggctaagcaggcttggcggatctggtctactcctgattccttgcttcattctcttcttaaagctcgttactttaagcatactg

SEQ ID NO: 23232 - DNA, 2250 bp, Cannabis sativa
agtgtttattgcttggcaagagacacttagttgtagatgaagttgacaccagttttgtaaacaacccgagaagagtgagatttcactacaataatctgagagtgagattggtacttcagcaatccaaagagattgataatcctttgggaaactactggtgtgaagttggcaccggtggaaaaaataattcggttggtgagattggcacttcaacaatcttgtgaggttgatagtccttggaagaaaattattgtgagaagtttgagaaaaaccttggttaaaaattctccggttgtaagggttagtcaagcccgttaacttggctcgatagttgaactcaaaactagattattagctttgaagaccaacaacgtaggtggcttagttctaccgaacattgtaaaaattgataatgcaatttctatccctaaactctttacattttaaatttattatttgtttatacttctgtttatctatgtgattgcattaaatttaaatatttgtataaattacctttgaggttttaaatttttttaaaaaatttaaatttccaattcactcgcctcttggaaacctatcttggactaacaatatacattactataaaaaggcttatgcccgtaagtttttcaattggattttttttagaaccatcattaataaagttacgcggttgtataaaatcgtctcctataatggagtattctcgacaattttaaatagtcgtggagaatccccgagaatttataagagttacgagccaaaaaacaaaaataatttttaaagggcatcccgacagttttaaaccgtcaaccataatatctcctatggatttaaacggccagtgatactaatatatattcttctcttttatatccagcccctcacacttagaataaaaagccaaaaaatatagatctctcttcttattttgaaggtggtggttggcagggacggaacatggatgggggttcgccaccaccgctcagttctctctcttctttggtgtttgacggggagggaatttgaagcacatggcccaaatatggggtctcgtcgaagctccttaggccaaaaggccttcgtggatgtctctggggctcgatctcaaaagccaaacaccgttcattctttctcctcctcagattaattttttgtttgatttgatgttctttgatgcatcttaaatcacaaaaattaagcaataaaatttacatttccaaacaacgttaaaattcgaaggttgtaccattagaatgagtatcttgaaaagaacaccaattgtgtgcaaacaaggatgatatgaactcgaactactctttgagtgggtaacttttgcatgtgataaataagggcgacaaaataagtcacacatgataacacaacttgaaactcacacgaaataaatgagtttatgacatttcaagtaaacagttaagtgatcatttttggattaacaaacctaacctaaaataacccatttaacagtatgtacacttacatttattacatataaatataagataatgataactagttaccatcatattactaatagagtaaataataaaaaaattgataacgaaaactagttacaaccacactaatttttaaaatagctagttaccattgtcgagtttagttattttttaaaattgacggtaaatagttatcatcatatggctaataattaaactaaagaaagaatatgatagtggtacttggttactaccacattaattttttcaagtaactaaatatatactagtaacctgttaccataaagaaaaagacaaactaaatactgagtgaaaaaatcaaatcaaatattagcttaaaaaacagaaataccacattttggtggcattattttttctctatatttataaaaactctgtttaaatttaccatattttttttaaaaaaaaaaaaaatctgccaaaacacccattgttttcactatgagccacaccagaatatgggcccaagttaagcccaaagggctaacataatattttgttcaaaagttatttatatcacatttataaacaaatttataattttggattataagctttgcactttttaactgcagatattatcttcaaatgaaatcatgaatttttgaaagagaacataaatgtgacgataaatatttccaatacaataatttaaaactaattagttattagtgctgaattaatgaagttaaaatgtgtggtgatcggttaatatgatatcactaat

SEQ ID NO: 23233 - DNA, 3019 bp, Cannabis sativa
ttgattttctcttcacaaaatcttagtttgtttaattatttattggatttttaatcattttggtttgatgttttaaaatatgtgtttataaataaaataaaatttgaaaatatttttcttagaaataatttaggtttttaaagtaaatttaatactttttttttattattaatttaatacttttatcaagctcttcttttttaattttttaatataagattgtaatttttaaatttaatttttttaataaaaggggcaaattttagtattggtcaaaattcaaggataaaaatattaatttttaagggtaaaagaaataaaatcttatgtaactgttttattttagagaaaatttctaacaaactgtatgttttaggagataggaccaggataaatagtgtcgaagatttaggatgtaaaaatgataattattctaaaataaataagtagaatttttgcctccaaatgttataggctttcatttgtccctgaattatttttggcaaaaaaaaatccctacgaactttgaaagtaattgtaaatttataaataatattgtaataataaaatctgtgtgtatccgtaatttaatagttaatatttgaattttaagatctttatattttgttaccgagagaatttttttacaaataaataaattacacaaagaattatattttttttttcacatttacatttttttttggcttttccatctttacacttaaaatcagttttattttgcatttttacgattattgcaactaccactgcaacctaaattgcaacaaaaaaatcgtacagaaactcctattaaggctgcaaccattttagaaactcaaatttgaaaaaaaaaaaagttaaaaaaaaaatatggggtaattctttttttttttttttcattttaaagttattttatattttttaattataattaaaggtgtcctttaaaaataatatgaaaacaaacaagaaatattaacaaatataagtattttaagaatccttacaaaataaataaaaaagtagtttaattacttgccttcatgaaaattgcatcagctgtggggacagaacggaacatgtcacctccaacatgggaaacaccggagtacggcggagcagtggcgatgacatgggggagatcgaaattaattcccttgatgtgcggatatgatctaacgatctcagatatggaaccaccagtcccaccaccgacatcaaccattgatttgatatcactgaaaccaccatcactataatgagacaaaatggccttcattaccaccttggcagtacactccatggcatcgttaaacagcttattaatttccggattctccgccccaaactcccatatgctttggccgttatgggccttcttgaaagccacgccaccttccttaacacaacggctgaagcaatgccatggagccatcagtctaggatcgttctccatcagaatcattggagctagagttagttgatcgtgatcgttcgttttggtcagcagccatctggaagagtgtgtgggcccgtagagggcttcttcttcttctccgtccgattttggtttttggtgttgggtgaatatccgacggcggacgagtaggcgcatgatgcgggccaagcaagagaggtctggcgaggtagcgccaggaatagcggaagctatttgggacaaggtgattggagaggtgtgagagtggattatgtcggctaattgaagctccaccgcgcatttcaacgccatcgaatctgcgaagctcaacatgtacttccatatctcaacttgacctctcaacactgcgtcctccccatctgcttccatattatttattacttttctttttattttgttgggggagaaaatcaatttggaagatggatagtggatactgggtggaggggttatatgtagatgttctgagaatgtgtccctgtagaaaggtgaaggtccttgtataaaaaacaaataagaggagttctaattacaacttcttagtcaactttgtgtccgaaattatatgtaggaatatttttatttaatttttttttccatagcagtttttgttataggtacagtatcattcttgtaaattttttaaaaattctgaatagtttacaatattgaaaaacagaattcctgatattctagtttaccatgcgcgtttaaaaaactttataaatattttaggtacggtaaactattcaaaaaatttacatggatgatgttgtaagtataatgaatatcgccatgaaaaaaattgaaaaaaaaaatattccagcaagtattttcaagcacagaggttgtaataggagattaataatattattaatattagaaaaatgttaaaaggtacaataataatatgtatcttgtctaatgagtaattatatgcacataaaactcatacataaatttatgtatcaagtcattttttatgagtgtgagactcatcatacatcaaaacaattgaagatattaatactattttgcaataaaaattgtcaattgattttttattttattaaatgataattttttttttttttttgtaaaatagtataaataagattttgaatttaatttttgacaattcttttttaataaaattaacttgaggacaatttctaccacaaatagacttaaattaagtaactagttttgtgataacatttttattgagttataattaagttttatttaaaaaaaataattcaaaatactatttagtattattttaaaaatataagacttaatttattattttttattcataatttttgcaaaagtcacataaaaaaatagtatttatccaataatttatgttgtaaacaataatgtcgcttgataattcttcaaattgtttgacaattcgctaaactgttgattctttcgtgtatagagagtagtacagtagtttgtaatttttctttaaagacaatgtggcttgtataattggaaagatttctctatgggctcgtttggaacgccgtattaggtcgtattatattg

SEQ ID NO: 23234 - DNA, 1294 bp, Cannabis sativa
atatttattttattaagcccatacatatgagcccaacccaagcctataaatcttagggcaaaatccataactcttcacaaaccctctcttcttagcaataaacctaaattttaatttttactttttatgtcatatttatcataaccttaataatttttcccatatttttgaaaatagccctaaattttaataacaatattttttattgtagttacataatagaaagtaaaaataaatcctaccacaatgtgcaatttatagtaatttttatccattaaaaaaggaagagaataattaaattattctctttattagttaataaaaataagctgaaaaaattagaagagaaaaaaatatggagttcttttatagatattttagattttattgaaaaatgatgagagttaactttaattgtaagcaaatattcgtatttatgttcttttttaaaaataataataaaaattaaacattgtaagtttaaactcattaatttcttttcaaaatattcatctctatatgaagatgaacattgataataaaaaattagaataaaattgtgtactaataaagagtgtatccaagtcaataaaaacaaaaggttaacaatataataatgattcaaaacaataaaaaaaacagtactgagaatatgaattgcccgctatgtggattaagggaggaatctattgaacacctgtttcttacttgtgatttggcgtttcatgtttggagatcttcgccttggggtatttacccagtgtgtgataacggtattcgcatgtgggactgggttaagtttatgtggagtctcaaggatagaggtatacgagctgaagaggtctttctttatgcttcaattgtagtcgacaccatctggaggacaagaaacgaagtggttcataatgaccgtctgcctgatgtgaagaaatgcattgactctgtttgttattcctttgtagatattcatgctactatcttgcctgatcatgctcaggcggggagtcttgggctcctcctcctcaggactggattaaacttaattgtgatgctagagtgggcctggagagtatgtgtattgcagttgtcgcaaggaatcacctgggtgaggtgatccgaattcactcggctcagttggacttctcggatgccctatgtggagaggttgcggcttgttgtttagccgtcttggtagcgttagaaatgggatctaaatttgtaatagtggagagtgactcgagactagtaatcaatgcactcaatgggaaggagtctcattgggctcttgagaact

SEQ ID NO: 23235 - DNA, 2109 bp, Cannabis sativa
gctgtcgtcagcgaagagcatgtgggatacaactggggctcctctggcaactttacaaccgtgtaaccaacctctgacttcaaagtgttttatgatagcggaaaggccttcagcacacacaaggaacagatatggggagagaggatcgccttgccttatccctctagttggacaaaatacattggtctcatgattcccacatataactttgtatttgacggaggatagacaatgatgaatgagtgacacccatttttcatgaaagccgagtttgaggagcattgcattaaggtaagtccattcaatacgatcgaaagctttgctaagatcaagcttgagagccatcaccccttctttaccttgctgcctccttttaagatagtgaagcacttcaaaagaaatcattatgttgtcggtaatgagtctcccaggtatgaatgcactttgattctcagatataattcctcccatgatgtgtttcagaaaaaaaatgaaagaatatacaaagacaataagctaacttctaatgaattgagaggtgtgtgcttagcttaaatagatcccattataaatttgatcaattttaataatgctgtaattagtaactgagagattacgatataaactaatgacgataatttctatggcgataagacacaaatgtgccacgtggcaacatcagaacggtagcaaaaaagagaaaattccaaaataacataaatcatttgttcaactgggtttagtataaacgacaaaaccacatctgccgtttcgtcaaattagtaactactaacgactttgacagaacttccaattataccccttcaagtttaataaatcccaatcaaaacgaccaagttttacaagggcattcccgtcatttcacaacattcctaagttttgcctccaaatattcccatgtctaaatcagtgtactttttcagttgggagtttatgattactaaaaaaaattaagtatttaaaccatgaaagaagccaaggtgtttgtgaaaatgtgtaagagaaaattgtgttggaaacttttcattcagtacatgaaattagtatatgagattgagatatagcaaaagtaataatgggtgtggaaaatcagaagaaagaagaagaccaaaccaagtccaagggctggctatggtggctaatcgtgcttgtactagcatctatggtgtttgctgctgctgtactcactcttttgaagaatttcaaacactccaacccgagtggccccggtgtacctgatcacccgggtcctatcgttgctgagtatgcaaatgctcttggaatggcaatgcaattcttcgatatccaaaaatgtaaacgcgagactttttgtgtacaaagaatttaatcaaaatcatgtcacattacttattctttcaacgggatcttaggaagcctgttcatacatgacattgtcctttaattttggttttaacatttgattaaatgtttttttgtttctttttgtagctggtaagcttgtggatgacagggtttggtggagaggtgattcagggctacaagatgggattgggagtgatgggatgaatttggatttatctaaggggatgtatgatgctggtgatcttgttaagtttggatttcctatggcttttacagcaacaattttgtcttgggcaattcttgaatatggtgatcaaatgaactctgtcaaccaattgggttatgcacaagactctcttaagtggatcactgattatcttatcaatgctcatccttctcccaatgtgctcttcattcaggtttgttatattagaagattttaaaattcggttggaaggaatgaaaatatagaaataggaataggactgtaataagatttaaaacacattgaaaaaattgatttcttatattgaatcagaattcagaatgatctttccttacacttcaaaatcaaatagtcattctgccaaaatggtggaaaaattattcgactagaatgacattccaatatttatagtgcaacaaaacaaaagaacggaatgaaacttgattcattttccattctgtttgattaccttcaaccaaacgcaacttaagtttataaaagcaatgatagtttcatct

SEQ ID NO: 23236 - DNA, 3929 bp, Cannabis sativa
gggcataaaacccaacaccacctatgtcttaacaagacatggtggcgtcttttgtccaaacaacttttatctttttcccaatttatttaattaataaatttaaaaataaattatttattacaaaataaataattaatattttgaaaaattaaaattgatttttttcgaacttccacatacaaattctattcctatccttgacagtgtttcaaggtgacaatccggggaccaacctataattctatgctccaattaactagattatttattgaatctcatcaaccaaataatcgtatttattaattctgtattactccactataaatatacaattgaactataagtaattatagaattatatttactgagtttactgcagtgtctattgatataatcaattccattgattagtcctctttgtgtcagttcataattagttttggtcaaattatcattttacctatctaattacttttttattctttagtacaattaattcactactgaaagtaaaatttagatccaattttaatttgtgcacaactctttagttcaagaattaacacttaaaggaaactaacattcactcagttagaaaatcatgattctataattgtagatcatcccagccatccacaatattagattcccaaaatagaaattgtaagaatcatcttgtctgagaaactttaacaagtgaatcaaagaaactaatagcgtgaacaagagttcatgattactcaagattcaagacgatctgctactgatcatttttatgatatgtattagatctttatagtaaacgacacgtttgataaagacattctaattacatatcggtctatttcagatataatctctatcatctacaatacatttacttagatgtcataatacatcaacaattcgaatcgagattgcttgaactgaataatggacatcagtgaactgcactagcattcgttgattaaagattctataacttaaatatgttgttgatcgttttattcatcgctaagtgatcttaatttcctgtacaatacaaatcacaaccttatgtatgaatacattttttttttttatatttatatacaaattattcaatattaaatatcagtaatttaacattcaagcataataatgtcaacttatatttataaatagaaatgtctttataaacttttcaagacataaaccctaacacaacataccctcccgaccataaactagaccaagcccagacaaaggaccgacgagatcctggacggggaaaagaactcaaaagaaaaatatagactcccttctgcaatgctaaaaaaaaataacactaatttcaaatataaatacaacatacataatcaattcttacttttatttttattaattatttttagtttatcatatatataaatatataaaaatatcattattatacttttgtaaaagaaaaatcattttaattttgcttaaataattttgtccgtataaaagatatacatttaattagtaggacaatacataacatatttttaaatttacaaagaaaaaaaatctaaaaactacatatttttttaaattcttttttatttatttatttttatattatatatataaatactttgaaaaaagataaacgggtagagatccaaattattttctatagtggaccgtgacatcctcataaaaacggtcattcagtctatccctacttattctatgaacctttttaagcttctaaaagcttttgttaaaaatattcaccatatgtgtgctcatttttggtggggtggaaataatgttaaaaaaagatacactggtgtacttaagaaaaactttgcttgcataagaaagatggtggtataggcttccaggaccttcatctgtttaattaagctcttttggctaaacaagattctcgcatttacaatgttcctaattctttggctggtcgtgggttaaaaggtttgtatttcagaaagaggtatttttccgaaattacaaagtctaactgaggttcctttgtttgggaaaatatcctttggggtaaggaactttgtgactctaggtcgattcggcgggttgggaatggtaatggtattgttatttacactaatagttagatcccatcagtgttgccaagcctcttattaactcctcatcggctcgggtcagataaggtttctatgcttcgtgatgactcgggaaggtggaatgaagagctaatttatctagccttttggctaatgaagttgaggctattctatctatttcttggtccactgatgatatttcttacaaactaatttgaaattttaagaactcaggtttgtttttggtcaagagtggttattggctagcacttcgtaacttggctttgactcgtgcctccccatctagtggaatgtctagttggtggaaaaagatttagtctcttaatcttcctcccaagttaagactttttgcttggaaagcattctataattgaattcctactaaagttaatctggcgggacatggtcctttatttgatggattatgtccaatatgtggggtggccgaagaaactactcttcatgctctttgggtgtgtaattctttgttgcattgtaaaaaaatctgtgaatttatgttgggtaatctggaggtacattgtggtgacttttatcatagatatgttgatcccttatcaaaagagatgattgaattggttatggtgattttgcggagaatttgattctaacgtaacaagaaagtccataataatattgagtttctttggtctcgtgaatttcttgaaagttttaacaacaagtagcatgtggtggttagttctccctcacaaccaagggtagttgttcctcatggctgcttggaagggaggccaagtttagtttagatggtcctcgaatgggctcctccgttcttggctgtttcaaagttaatacaaatgttgcaattaatttgtcgggcaagtgtagtggtttgggtatgatgattggagatgatttgggagttgctaaagctttggcaagtggaatttgaatggttgttttactcctgaaggggctgaagctttggcaatctgcaacactttgatttaatgcctttcttttgggtattacagcatcattgttaagtctgattgtttgaatgttgtgcttaaaattaaaaataatatttcttccataacatctttgggtattgttttagatgatatcattgttcttcgtaataggttctaagtttttagttttgtccattataagaggttatgtaatggtgttgctcataccttagtcaaactttatttgacgacaagtagtagtattatttggtgatcaaagaatcctagctgtattcagaatttatttatagtgaatgtaatggtagagtgcttattgcttttgatatttgatgattgagaccttaattctcttatgattttttaaatatattttatcaattttttttttcttttatatattctttttcttattaagaaacgggtagcggtaacaactacacaatgatttttaaaataactacttagtagcaccaaattaatcattataaaaattaataagtcggtaattggttgctatcatatcactagtaagataaaaaattagtagtggtaacaaattacttgttgggaataaaaacttcaagcgaaacggaaaaataaagaaacgaaacaaagaaatttactcagtttggtaaaattaccaaacccacaaaaaaaagatatatttcccttataactcaaaattacacactcactatctcaatcacttcatccaaatcccattacacccttcgcttctttctcactctcaccacactacaaactcacactcagttgtcttttcacaactcactcttcttcttacacacctactctctcacatacaaaacacatatttataaag

SEQ ID NO: 23237 - DNA, 2653 bp, Cannabis sativa
aaatctgattatattgtaatgagttttatttagggcataaaacccaacaaaactacccacaaggtcagagattctctctctagtttctctctagatattggagcttctaacacttagtctttttatgtaattaccatctcgtgagagaaagaaacttgaagtagataaaactccattaccgtcgtgatacagggagtaaattactataaatttatcgtgtctctcttataattacttataactacttatctattctagtcaatataacaagcatctgtggcttagaagtctagtccataattctgagtcaatattttagtatttttattaaaagccacagctcaagaaagttactagcaagatggtggcaatacgttttctacaaatgttgatagacaaattccaacaattggacattcaactagggcacgctagttgatggagttggaaatgggactactcatgcgccccatgtaccaggaacgagcctcagaaatggctcctcaactctccctgaaaatcgtttggacaatcaggctacagactatgtagtaagaaagattagagcggatagtcttttgaatggggtttaccataaggagagatcctttgttgtgctttccaattacttattttaatgaacatgtttatgttctttcaaaaaaaaaagagttcaatttagaataaatattatgagcaaagtgaccttaacaattaataacttctgatctcaaaatactttatttttagcatgttaaatgtgataaatcgtggctgtaataacactcaaaagaacatttcttttacctcaagaaatttttgacttccgaatccacttaaggacatatgaagctctcttttccaattagaaagaagaatccatattacagttagttattaaaattataaatatgaattaatttgttgaagtaattaatgattcatgttaataagtttgtcttggactatagatttaatttagattggcatttaacagtactaaattggcacgtaattaataagaacctcataaggtaataaagataaaaaatttaataaattagtttgatatgtatattatacgagtcataagtttataggtgctagtaaaaatttggaatttgatcgttgtagtttaacatgatttagatttgagaacttgttgatgttatcaattaaaaagtagtttaataaccaacttttattttaagatagtttatataattataatttttaatttattatagtacttttaagaccatctctaatgaaagatgtaaaaattgtatatatttagcacaaaatataattttctagtaactgtacatcaaattttagctttgtgtttcaatgcacaattgtaaaattttaatgtaaaatttaatatctaattaatattttattaaaaaaataaaatttaataactttataattaattttattattattttaatgtgtaagacaataaaaaaataatataaatgtttcataatttaatgtgataattaaatgtactaataaaaaatgacataaatataaataaaaaatagtgcaattattatggtgtaaattttacatcgtagcaaatattgtaccaaatttaacacaaaatttgctatgtgctaaatttacatcatttacactttttgttaaatgaactatattttaactttccactacttatttacatttccattggagatgctctaataattttacgcatatactcatcattttataacaaaattaaataataattattaaatatcgttattggacatcaatggtgcccaacaccttatgatcggttagtaatatttcttaaaaactattttttttaaattatatgagtctcaatacttaattataacaataaaatcataacatgaaaaaaaataataaatactaataatatcttttaacaattcacataattattatataaaaacaaccaagctttgttccaaatcccattatggggataaggtttgcccggccgtcaagccaatttaatttgtgtatttaatattttattgtgtcattaaaatggatatatagtaatcataatcatcaaggacaatctataaacaacaatggtttatatatactattgataattctatagtaaacttttgagaggacttttatatattttacatttttaatttaaattcaaataattattatctgtaagtttttttaaaaatttttgaataatttataatgttaaaatttttaaaagaaaaattattacatattttttatatgtatggtaagtaagtgtttgaagtttatttcagcaccataaattattcaaaagattttgaaaatttaaataaaataaatataatacacaattataaaagaaaaaattaaactaaaatagtctcctatgctaaaacaaattaaagatgaactatagatttttttttatactatttatttaagatttgtctaatttttttaacaattttattttatttattctttcaaaaaaaaaaaaaaaaaaaaagagcattccaactaaagtacaatttagtgacattttataagtcacttacattcgaaatttaacatgattgctatttaacataattaagcaacatatctatatgcttcatgtcaaatctcatttatatatataaatatatat

SEQ ID NO: 23238 - DNA, 5327 bp, Cannabis sativa
tattgccttgtattcaaactttactttgcatataaatacaattcacatactgagctgagagattcaactcaagctcatttcaattcattttctatttctcaacttggtatcatagctctggttccattttttttcctttctttattcttcgaagattcttgaagctctcatccatggcgtcttcttctgctaccactgatctgaaggctcgactttcactaccactgatattcctaaagttgcagcagaacaagtgattcctcatcaacttgttcccctcaatctacgcctcgatcgaaacaactatgtctactggcgctctcaagttctatctaccgttcgtgcgcatcgccttgaaggattccttactggttctcgccctcgcccccttgccactataccagatctagcagatgccacaagatcggtaccaaatccagcctttgatgactggatatacttagaccaattcctcatgagttggctgtttaattctatctccgaagccatgttaggacatgtagctcgatgtgtatccgctgctgaattgtggaatgtgctaattcagcttctgtctaatacatctcgagcaaggattcttcaacttcgaggcatgcttcaaacaataaagaaaggatctacaccagtcgatgaatatattctgaaaatgaaatgcttggctgatgctcttcttgcagcaggacatcaaatcacagatgatgaactcatcctctacattcttggaggactaggtaatgaatatgattctgttattgttacacttacttcaaaagaattcattactctacacaaactcaagaattgcgacttgagcaacaacactcccctactaccttggatcttcacaatccaacaaccaattatgcctccaagaaaggctctacagcatcctccagtacaaaaaattccactcgtggtagaggtgcttctcgaggcagaggtggtaggacaaacaacaccaataatcgtggtagaaatagaccgatttgtcaagtctgtggcagggctggtcacactgcactaaattgttatcacagatttgatctaagctaccaagcagaaggacaatctactccctctgaaacatctatggaggaacctctggccttgcttgcttctgcaactacagttgccgatcctcaatggtatctagatagtggagcctcgcatcatgttatttctgatggttcaaaactcaatgatgccgtggattacaaaggaaaggaaaattggtagtaggtaatggagcctctctcccaattcttgctgtaggttcttgttcaatctttgcctttaaaccattacatttacataaagtcttgcatgtccgatccatacacaaaaatctgatcagtgtatctcagtttactcttgataatgacattgataatttgttttaatcctctcaatgttttatcttggataaggtcacgaggaaggttcttcttcaaggaacacttaaacagggcctatatcagatcattgaatctgcctcctccctcagctcatttagcacttaataaagcagatgtaaaatttcaattcctttgattcttattctgttcctagctgtaatatcaggactaaatcttgtaaggaatccactcgaattgatgcactttggcacaatcgacttggacatccatctcatgtcattctcaataaagttttacattctatgagtagtaaatgttcaaaatctgatctgcccttttgtgatgcttgtcaatatggtaaaagccatttaatgcatttctcaagtgtccctttaaaaacaaatcaatgtctccaacttatacactctgatgtttggggaccctcaccccatccaacacctgaaggttacaagtattatatcttgtttgttgatgatttcactaaatacagttggatttatcccatgaaaaacaaaactgaagttgtccctattttttaacctttcaaacttttgtagaaaaccaattcagccttaaaataaaagggatgcaaactgattggggaggagaatatcaaaaattgcagccaattttacaaaaattaggtatccttatcagacatccatgtcctcataatcatccacaacaaggaacagtagaaagaaaacataaaatgtcacagaactgggactatctatgcttgctcaagccaaaatgccattaaaattttggtgggatgcatttgtctcgactgtttttcttataaataggctacctacaatagccaatcattacaaatctccttatgaaactatctataatcttgtaccagattaccaatttcttaaaacctttggatgtccatgctttccttttcttagaccttataatacccacaaatttgaattcaagacttccaagtgtgtctttcttggatatagtccatttcataaaggatatagtccatttcataaaagatatagatgccttcattcatcttgtaggatttaaagtgcaaggagtgtgaactttagtgagtctgaattcccttattccactttattttccaacaaatctcaatccacctcctttgtcattcacaagaatttattagcatcaacatttaatatacctatcctacatagtgactcccaaatcagtccaccaattcaatttggtactctaccaacacaaacagatgacatcacccctcattctctcgctccccaaagtctcacaaaaattccatcaacaaatgacaccaaaaatcctactgacagcaaccaaatttcctctgttgcagacaatattgataattctgcagataaatcaaatgaaccatcaaatgccacagtaattccagccataaatataccaccttctccacctcagttgcgtcaaagacaccatatgcaaacaagatccaaatctggtatctttaaaccgaaagcctatatggtcacagcctcacaacaacaaatttatgagacaccatgaactgttaaacaagccctcagcttaccacaatggagaaaagccatggaccatgggaacacaactcttaaaaggaaaaacacatggattttagtgccttattcagatgacatgaatcttttaagcaacaagtggatctttagaaccaaatacaacaaagatggtagcttagacaaattcaaggctcgacttgtggtgagaagttttcaacaaactcctggccttgattttaaaaatactttcagccccgttattaaagcttcaactataagaattgtgttttgtcttgctgtcacctttgaatgggatattcagcacattgatatcaacaatgctttttttaaatggagatttccaagaaaaggtatatatgaagcaaccaacaagttttgaagatccaacaaagccaaatcatgtttgtctacttcaaaaatctttatacggcttaagacaagctccaagatctttgtttgacaagctcaaggtagcattagttcaatggggttttaaagaatctgtgtcagatacttccttattctatatgaatatcaaaggtacactacttccaatcttggtttatgttgatgatgtcttaattactggaggaaatgcagctgctgtagccaagttaatttctgatttgcacacacagtttgctctaaaatcccttggtttagtaagttactccctaggatttgaagtctacagaaactcctctggattgtatcttactcaatccaaatatgcatgtgatctccttgataaaactcaatttgaagatgcaaaagcttgctccacccacatgattttatgccaatagactgtctcttaatgatagcagctcctttgaaaatccagccatgtacaaaagcatcattggggctctccaatacctaacattgactagaccttatcttgcctataatgtcaacaaattaagtcaatttttaaaagcacctacagacaatcattggaatgcgtgtaaaagggtgcttatatacatcaaaggcacaccgcatctcagattacacttcaggccctcaaccttgctgcaccttgaggcttactctaatgtagattgggcctcaagcttggatgagaaaaaatctacttctggtttttgcctattcttaagaggaagtctagtcaattggagctctaaaaagcagcaagcaatcgctcgatcaagtacggaatccaaatatcgagccttaacatcagcagcaactgaacttgtgtagaccacctctgtactcacagaacttggaatcagtttgcataaacaacctcccacattatggtgtgataaccaaagtgcccaagctcttgctctcaatctttttttccacacaagaacaaaacacattgagctagatatccattacattcgaagtcaaattgcagagaaaaagcttcaagtctgttacattccaactgaagatcaaactgccgatctattcaccaaaccattgtcttctcctaggtttcagtttctgtgtaacaagctgtatcttgaacataccaaatacaacttgagggggggtgttgaaggaaacagttagatatatatagttagttgtggtagttatgccagttgtgcgtttaggttagagtttgttactctttacagctggcatacaattagtgtaacagatctttatcgccttgtattcaatctttactttgcatgtaaatacaattcacatactgagctgagagattcaactcaagctcatttcaattcattttctatttctcaactatagaggtggtcatgaagtctccatacaacgtgatgcttgaaagactagccttgtatgacctttgagctatcttgtcaatataacacttactagtcaaattcccagtggaaactagtatcggttgtctccttggcaagccacgaactgcccgcgagtgttacaatgcttagttaactctcgccaagaagatctcctctattcttttggcaccaaggaagatgggcaaggcctcttcagtaaaaaccaagaaatctggagctgaaaccacagagaagatggatacaacacctaaagccacttgaaggtgcacccaagacggggatcacatcgacccgtgttttagggaaatcgactcgggagtttgtctgatcaagaaactcgaggaaatttccctcaacacgatagtccaaactaggttgtcaagattggaacaaacctgatggaggctttgagcaagatgctcatggcttgcctcaagcgaaatcaagaaattttcacatagtcacacgaggacatgattaggatcgatctcaaggtcatctgtcatgccctcatgttacgaaaattctgtttattacgcaagtgtacgtatcaagtagtatctcacgcaagt

SEQ ID NO: 23239 - DNA, 1480 bp, Cannabis sativa
taggagtttcctacataatccaaatctacattttaggtatcttctctctatttataattaatattgaaatgtttgaatatacaaatccacatttttataatatcaatccaaattgaattgcaaatttaacgtgaatattttattggtttttgctaattcaacttttttaaaatagaatcaaaattatttgattcattaactattacagtaaagtaatttagtgtcaatgtaaactgactaaacctattgcatcagctcaagaaactaacgcctattccaccaacatataaagtaaggtcttatgcgtctatttagaaccgacactattgagtgtaggcatcagttctaaatcgatgtttaaaagttggtttctttgttatcacttacaaaccgacgcttatgggtatgcgtaggcttgtaaccgacactcatagtattttcaaggttcattagtattagtttgtcatgagacagaataaagaaaaaactacaattgttctattaatttctccacttgcattatcaagtttcagaataaattcaataacacaaaatacaataagtttttataataccttttataataataatatttataataaaactaataacaaaatgtgtactcactatactagaatagaactaaataaactaatgatataacaaaagtattctcatactaaaaacaaaaatcaatcctccataaatacagtatgtcatccctcataaattatgcccattcatcctgaactatattaattgattttgtcgtaggaagtcattttagaagtactataaaataaagagaaacaaatattattgagttataaagaaagagtatactatcccaaattttatacaatgtggcacgtgttgcacatgttagggctttgatggagtatacctatctatagtgtcgttcagatcaagttagagccaaatcagctaagtttgaatcttcagcaatcaccattcgagaagatcccaaacttcgtattacttcgagtagatcaagaaagcaggtgtaaagatcctcaaagatatttcccttaaatatctccacaattatagcctatttagaatttctatctttgtgggattgattttatatgattgagaaaatcatgggatttgatatttatgttttcataattcttctcctattaactcaggataattgtaatgtctttttactataaatagtagaaccatatcactgtttagggatcctattttttctgcattctaaagagtagttgcaaaaatacttgtaagtttttctcgagattattaagaaactcacctggttagacatgtgatcttgataattctctataagtaatacatcaaaaagatgagtaggctattacaatcatcagggtgtgttcttattgctttatttgcagagtatgtttataactcggctggctgaatggtcttctgcgagatagaaacgtacgaactgctaatttatgtattg

SEQ ID NO: 23240 - DNA, 3833 bp, Cannabis sativa
  modified_base (1944)..(1948): a, c, t, g, unknown or other
aaaatgtgtaattttaaaaagggataaattttttttgggcccctgagctaggtgggccctaggcacaggcctagcccgcctatgctcagggtcggcccttagagggactaatcctgccaacttgaccaccataaaggcaaacattgagagttgtagttgagatgcattaatcaatccaattataaaattcatccgggaccccaaaacatcttaaaacatgatcaacgaactgccagctaagcttgtcataggctttcataagatcaattttgatagcgaagaatccctctctgccttttttcatattaaaactttggatgatttccggaactataacattgttgtctttaatatcccttccaagaacgaaggcagcttgagtagggaaaataattttgaggagaggcttaattttatttgtaatgatcttaaaaattactttgtaagatgcaaatagaaataggcctaaagtggtgagttctttttgggttctaaatttttaggatgaggactaatttatgcataatcccagtatcatagaaatcttcaatcgttgtacaaaagtcctttcccacggtttgccaatagtgcttgaagaaaaagacagacataccgtccggaccaggcgttttattgttgcctatattaaacagagttttacgaatttcttcaaaatttgggagtctgacaagctcctccaaatccacaagataaagacgatcaataatcaggtgagcacacttcagccttttcccattgttgcaattgtggaagattgcattgaagaactccaagaattgtttaccaatcaggttcctagcgtggagccaagttccatttttgtcttggatactttcgatattattccgtctccctctaaaagaagtagagagaaagaaaaattttgagcatttatctcggggggttataatacccattcatgtaggagtgtggtatccacatattgtttataggaaaattctacaatgcacttccttaaaagggaagcactaatgcagccctatctgatttggtatccaaaataattttttagtcaaattttttcgcgtggtcatgtacgttatagttatttatgatatcttgcaaaattttaaaaaattttaaaaaatttaatatgccaaaaataagattcaaatagcgtattgcactcgtgactattttatattttacgtgtgtaaaatagactatttgaacactgttttttatattgtaaattattctgaatttttcaaaattttataaagtattttaaataacatatataaatataaaaaaataattagactaattttttttatatgataaaataaataaaagatgtatcaatacattctttttgagagggtgtactctatttatatgaaaataaaatttaatacctttgatacaatatttatgatatgggagtgttgtaaatatgggctacacacttgggtggctcttaaaattaaatggcctgataatatatttcttttttttttctttttgtttttttacataaaatattttaataaactaaaattgtcttttatttctttttttattattatttttttcttgcctccccttccctaccatcaggacacattttaataatatttttgtgtgttttatctacttggagttagggttgggtagatgggctagtttaactatgggcctattttacaaattctactactatttcttttgtgggattattttataaatacacaaatacaataaaaaaaaaaatacaaaaatacggtttcatggaattttaaatatttttacgatttttttaattttctttacagaaaatacggtctttttatgttgcactcttgttaatttattgttgattttttgttatatgtatgttactttttgttgttgttttgatgttatttagttaatatttttatgttacttttatgtaatttnnnnnttgttttcgtgttgtttttatgggaaattataaaaatataaaaaaaaaatttaaatataaaaatgtaatttttttttttacaaattgtgccttatgtagatctttttttttttctttttgaatttttacaccacataataaataattaaattttaataattttttatacgattgtatagtaaaatatttgttaaaaaatatctcattaattaaaaaagaaaatgcaaaaaagtaaaacacgagcccctacaaaaaacaaacttaccaaccgcaaaaaagaaacttatgaaccgtggtctatattttgagaaaaaaaaagttagaaaaaaaaattgaaaaggataaaattgtaaaaatttaagaatttttctaagaatttgttttgctaaaggtgtgtttagtaatattttttaattaattttttatttttaaaattaaaaaagtaaaaaaaaatttctaaaatcatgttctataaatttatttttacttttttaattttttaattaaaaatctaaattttaaaaataaaaaaattacttttaaatctgatctgacttaaaaaaaattaataaataaaactaaaaataaaatttacagaatacactttattttttatttttaaaattaaaaaataaaaataattataaagcacattttgatttttcaaaaataaaatttaaaaacaaaaaatttattattttatttttatttttgtgattaaaaaatttaaaaacaaaaatgattactaaaaactacctaatttgttaagagggtcagcaggctttgctggtgagtttaaatttttagtaagtcatttatagaaaaatggtgtactataattaagaatgtattatatatccttctcttccttttaactatgtgacaatattttaactcaatagttaatattttaactatgtgacaatatttggataaatgctatccaaatgccaagttattaaatctaaaaaataaaactgccctttactaactctacactatatttgcacaatgtggtcgatttatttggtctgacagcaattttctcaaattagatggcatatctctttaattttcatgtttctcaaaagagtgttgctgtgtttagaatcatggggtttcatctcaaaactaattggtaatgagtagagtagcccatgttcaattatttattatttattccatgtgagacaatgtccacaatattcaccctcaaaatgatagttattttttgctcattaatcttgaactgtatcagaatgaatatgatcactatctgtataggtgcggatcggataggatcacttgtccgcaagagatatgactctgataccataatgagaattacgaagttacatcttaaaaccaattgacaataagtagagtagcccatgctcaattctttatttcatgtggaacaatgtccacaatatccttaaagtttgacaccagcagttgcagaacaagttccatggaaagcacctccttaagttcaacttaaattgaacgtgaatgttgctatacactctgctacaaaccagattggattaggagacattattcgtgattccaatggttatgtgttagctgctacctgcaagaaaactgctggtaaccttcggccccaagagatggaagtaaaggcattattttatggcttacaataggctagacaaatgaatatgcctttacatgttgtggaaactgactgcttatctcttgtgcactcacttcatggtttaacatcgagatcttcttctgttggaactttgtatgaacttatgtaaaaatagaaaagtgaagtgtgtgagtaggagtcccacatgggatagtaggggtgttcatccgatccaatccgcacttatttggtcaaacaacatccaat

SEQ ID NO: 23241 - DNA, 6217 bp, Cannabis sativa
  modified_base (244)..(248): a, c, t, g, unknown or other
cattacatttattattattttattctaaaacttaatattcttaatatcagaaactaaatgctactttttcaaaaaaaaaaaaaacttgttctcattaacaattttcacctgatattggcacttcaattcgaaaatcatgttccatatactacactggttcactcagctatggtaatttagtattgtatctctcttatttttttaaaaaaacaagtaatgtttagttttttatattaagaatatnnnnntttaaaataaaataaataaatgtattgcatttggatcctccacgtgtccatatttgtgagttaataacggaagtggtagtaacggtgtaagaaaattgtaacattaggtatttttgccactaaaaataaacattaggtatttaagtgtataaaatcaaaaacattaggtatttatgcggcaatttaccctattatattatgtagaaaattaaattatgcccttcttattttacgaaaaaaaaatcacccctcaacttcaaccttgggtccaccactgcacatatataatatataaataacaaaaagcaaaaaaagtaaaagagttcttgaaattatttcaattaaataagtacatatatataaatatatatttaatgtattatgattttgaaataatttaagatttttttttttttttgataattaagtcttttatttaaaggaaaacaagaaactagtgaccacaagagggggccacttcccttaacaaccggagttactattattagacactgtagcccagcgagctagtttatcagcaagtacattctcagtacgaggaacataagacacaacacatccttaaaaactttaacaaacaaatattttcctcgagtagaaatttgtgttgataacgagttataaaataatatagaatatataaaaaaataagagaaaagaaaatacaaagagaataagagaataaaaaagaatgagaatttttactactttattttaacgaagtgaaccctatttatacaataatataaaacttgggaaatcaagtaattaagactacacaactaaatgattctccatgagcatccatgtatatatataaataattatttacagcataaaattaaatatctcatttcaatataaaattaaattaaataacttcaaagttaaaatattatccagcttatgcaattatttaactagttgcacaccacattaacaaagatacattattagacaaaaaatatgtgatagcctacgacaactctcacctatacacatctagaaatatttctagattagcttcaacttggcaatgttcagaatatacagtaatattaactaaggaaagaaaaaacaaagaacactcaataggagagccattaattgaccatgagattcttttaccttcctgacattagatttacaagaccttgattttcatagaaagagccaacatcccaatcttcagtgtttgatgaaagtgtcattaaagcaacaacaatggatctcatacttgggcgcagttgtgggttttcatgagtgcacgctttagcaagctgtgccatctgcagccaaatcattaattaaaacaccataagctttttaacccacttgataatatgtttcagatgcctttcctattagaagaaaagaatattacctttcgaaccgagtcggccgggtaattctctccgagcctaggatcaattagcttgcggagttctttaaaatcgggctgattaagaacatcctcaaactgcagacaatggaaacaacacaataatttatatgctcattatggaagacataaattattcattgaagtattttcccacggatgaatattatttattgtattgtttagacagagaagaccaaagacatgtagttaaaagagacaaaaaggggagttagggaaagaaagaaaaaataccaaaccaactagacccttcgattcagaacctaaaccgtctggcttcacaattgcttccttcgcagaaattagttcataaataacaaccccaaaagcatatacatctaccttgggagatacatcgccatattgagcatatctgcactcatttataataccaattaatctctgtccataacatttaattttattccttgttgatacagaaataaaatatttgaagttatttttccattttgtcctagcatgggtgtacaaattcaaatgataaaccggttaagtctattcatccagatatttactgagcaagatgacttgagtgcatctaggaaaactaatgatagcttatttgagctaataataaggccttcaagcagctttgttgcttcaaaagctgtagaatcccatttcttatggctgagttttttttttcttttttttgataaatcttatggctgagttagcatttagaaactatatacatatatgtatataaaaaaaaggcttactctggtggcatatatccaaaagttcccacaagacgtgttggaagagatgaactgccaacttcagtaagcttagttagtccaaaatctgcaacctgcaataatatttatatatatatacatattaatacaactatgcaaacagctttatattggccatattgacaaatgaataacagaagcaacctttgcatggtagtttttgtctattaatatattggctgattttatatcacggtgaatataaacagggacagtatgctcatgaatgtattcaagacctcttgctgaatcaagggctatctgcactcgagtagaccaaggcataggctctctctctgcatatagttagaacatatagtaatcatcgccacaaatgagacatcaacttaaatcttcatcattcatttctttctgtctcacctgaaccacgcaaatgttgacttaagtttccattctcaatgaattcatagaccaggaaaagagagccctccacacaatatccaatcaggcgcacctgcattgtttaccagtttacattatgtgtatgtacaagagaaacaacagttttttttaaaagaaaaaagagctaataacagttgactccttagactcactaagtatgagaaaatgaggccatcgatgcaactaaaggttttttttttccaagaaaaaaagaatcaactaaagttttggtacacgctaatacgcctcataacttcataagaccattacttaccaagtttaagtgatggacacgagttaaaaccttcagttcagccaaaaattcctttgatgcttgcatatccatcttttttatcgcagctttctggaagaaagaggtgcatgataggactgctaaagcgatacaactgaaaaaatgaaaaaaataaatatttatggaactaacctcgcctctcagttcagcatagtaaacagccccaaaaccaccttctccaatcttattggccaaactgaagttatcactagccttagcaagttcttcatatgaaaactccactgatttaccaacagttataccagcaaggccaccagcattaggagaagtaactgcagctttatctgtgctttcagggcctaagatccaaggaaggatagattagtgagatactgaatatttaaccttaaatttcaatggaaaaagctctacccacttgattttgtagatctaaactgtataagaacatgaactcataaaacaaaatgaattagttaaaggtctttagatgaagttatcactagccttaacatggtctttttatttatttatttttttgtgataagtataaaggtctttagatgaaaactaaattctatgaacatattcgcgatcaattggctaaatatttgtacgaaatcaaagaataatccggcttcacatgaaaagatttcgctcaaccagaaacattcagtgaaaaatattatcaatagaaaaaagaatatcacactggcaaaagaatattcctatacttggagaacataatgatttaaaaaatttatcccaaaatgacaacactcaaattggaatctttccttctataaatctcaaaagacaaacaggtataaggaaaacaatttatcataccatacaaatgatgagaagactgatcttcaaaatctgaagcaattaattttccatccactttctttcggtaaaatttgtaatatatgcctgtggcaaccaataacaccccagcgacaactgccacaactatgatagcaataactccacccttcagtcctgcttagaaaaagcaaaatataagatcaaagttccatgaagttttgtcttaatctctgaaagttggcaacttaattaacttctcaagcacctgagctgcaaaataaagaaaacaaagaaaaaggtaacaaaattcacaaatgttaataatttggagagagatatcatctctttgaaatggtatgataaaagaggcagtaggagctacctagaagtcagaggccgaaagctgccatctagatctgcaaatttgaagcaataagagcaacggtgagctaagaaatcagcaaaagccacaatctaaagagtagattaaaaatacaacagtgattcatcgaatgacgacttcaacttcaacagtctaacacagctctccactaacaatttgagccgatacatacaccaaacattatacagaaactatctggctacgataaaaagagttattcctaaaatgttattgtttcattcagacagagtatctacttttccacaaataattctacacaaacctgaaattcaaacatgaagtgctactatttaaacacttctattttaataataaacataagccacaaattcaaacgtggagtgctactaagaactaaatcaagttatgctacttaacctgacaattctcaacaaatttgctaaattaaacagcactttagcatgtttgcatcaatactatttgaactagatgaataagaattgaagaaacatatagaacaagaactatggcttacacatttcaaaacaacgaatgccactgtttaatccttagtcccttaaattgtttcaatatgttttgcgtcaaaactcatcaaactagaagcaaaccgttcataaacgtaagaatagacgcatccacaattcaaaacacaaaatgcaaaatcaagtcactaaatttcatttatcccacttttatacttcaacagtgattattagcactttcagatcaaaattaatgaaatcaaataaggaaaatttctcacaaagaagaattcacacaccttttcccggtatgaaaatgatgccattaccctggctaaaattttgaacacccggattatacctcgttatcaaatcagctgaaatattattgctagtcgcaatagagtttaaagtgtcctccggtcgaagagggtatgtgataaacagcccataatctttagaaattcggctatctccgcacgaacaattcaccgacacattcaatgtggcggtatccggtatcatgttggggtcatagctattagagtcgttcaacgattggaccgtcgtcaagtcggagtagttcgcaacaaccttctcgtatgtgtctccggtcataaccttgtacccgaactcatgggcaagatactcgtcagctacacagcgatcgcacgcaaaagggattttgattctgatggtagatcggatgctgtccttgttgggtacttggtcagtgttatatctaacgatggtttcaggagtcgtatcgaaaaggtcagctatcaaggtgagattcgaattctcccaaacgtagaaggaagcaaaagctaagtcacaactctggggacacttggatttgactctgaaagaaagcgatattaagagaaggagccataagaacccagctccggttttcattagaaaaagaagaagaagcagaaaatcaaaggtaattactttcggaaaatcaattgattacagcaaaacccagaatgataaactgagtttcggaattgagcagagacggttcaaattgggtcgttgaccgttgactgaaagaacccttaagcacggtgttatgtatttgtttattatttaaaaataacggaaaatgattgtcgtacattatatcgtgtctatgagagataatattggcgcgagcattatttaagtcagacgtggacggcgacggtttggaaattggaattacgaaccatttttctttaaactcataaactaactaaccactcgttaacgacagcttttttacaaagggaaatttgaattttcatgcttaataaactcataa

SEQ ID NO: 23242 - DNA, 1426 bp, Cannabis sativa
tgataatcatgatgagtttctggttatgtgtttttagaaaaaagtttattttattattgatcaaattatagtttggactttgaactggaactatgattttgatcaatgtcataatctgtaatggacttttttgatgtccttcttctctatatctttgttcatttatgcagttttgttaaatttccagaagtgaattgataatgttttttttaattttgttatgactttaggacaaaaggtgtcatttgagtatcatggcaataattatattttcactgttcaaatcaacatagaatttataaggtcactattcttattttctgcgtattgagattgttggcattgttatggttctaacttgataaaatcagctgcattgggtttagttttgtagatagttcagctgttgtgtttttcttatattttctcaagtgtgaacctgctctttctgttatgcacttaaggttaatggggttgaagatttgcaattatgattcattttagtgtctcttgtctttatttataagctcttaaacagggttctgatcaattttactagataatcaataaagagtcattattttgaagttgtgcacataatgtgggttcctcaaattatgcaatcaactgttatttgtataccattctcttatgtcaaacaaagggtacttggaaaaatgttggatggaagagaaccaaaggtttgaatggctcactcttttcttttcctaaaaattgataaaaacacaccttgctctttgtccttagactttatagtttgctctttgtctaatgagtttcatacttttggtttttgtttcctttctcctttgacatttagccttacaatctgtctttatcttaattgtcaaagtgttttctttttacctcattacatacatactagtgacataaatttgacccccggagacgggtactcactccaaataggatggggattacccgacttaatgggtaatggggcgggggtggggtgcaatgtgagtcaagtaatcacttgattcatcaatttaatgacattacctatctgtatgttttattgaacaaacattactacagaatatcattctttatatatcaaaataacatttgaaatctccaaagaacaaaaaaaaatagtgttttgtgaaggagtgcaaaatctcaactctattctaacacacatgttatttatttttccatatgcaatcaaaattttatagtgcaggttcataatttttacaatctcatagtcctccaataagagactttgagattttctatcctaacattaatattgtatttaattacattaaaagatgattgttaaggaattttgagactcttgtctcataatttataaaccagttttatacattttctctcttctctctgcaatctctaagttttggaaccaaaatggtga

SEQ ID NO: 23243 - DNA, 4878 bp, Cannabis sativa
ctgctcctccttaattaagcttaatcctttattaattctttctaatattatacttaaacctcaatagagaatactctaaacttaagtccatattttatttggagaattaaaccataaatatgtgtaagcttgatagaacatctcaaatataaattcccactaaactagcacaatcttaaataataccacatccatatatgagcaacaagatcctgaaaagccttaagtggtatatccttaatgatttggatttgaaagcatagagtttgtccggatatgttctatagacaccttattactctaaactttattttaataacaattagttcaaagtcaatgtgcttttaaccttgtagagcttatgttgttactaaaatgcaacctgatcgatgtatagtcacaacatatatttttattagttttcaataccattcataattttacagtcatatgtgacaaaaatttcacaactaaaagctttataagatcaaaattaaaaatcttaatgatctctaaaaaattttattttctaattagtgaacatgtagtcttttgttctccataaattccttataatcgatttggcggcataccaaaagttccatatatggttacttaaatatctatttaacattcttaatatatatgttaagtacaattacatacatgcttgagcatatattagattctaaatataaatgaaaaatcttctatatttcttaaattctaaggttactttcagggcaatgactttgtgaacttattttctttagctacaagcctttcacctggtatagttactttcatgccaaaagttttgaatactttattgatatatctcttttgttataattcaagaatatctcaagaacaatctcaacatatcttgaattcctaatacaaaatgggttcatcattagtggtaagtaattttttaccaatatagcaccaggatcatattcttactctcactgaacacgtgatatatacacaatcatcgaaagattttatctcaaaatcaaatgacaatacttaatgaaaattctgtaatcattggcgagaagctacttgagtgtatacatagattttcctaatttgcgagccatatactttggatctttgctggatacaaaattttctaattgcgccacataacttttgtcatcaacattaccatgataaatgatactttaatagtctatttgatataactcaagaccataatgagtaaacagtgtcatgcttgtcatgaaatagtctttcaagcaaaccaaaagaaagtctactacttaaaatgaatatatgctttatcagtaattctttacatacaagacatattgtgcatctctcaatactgtaatttatatccctcttgattataaatatttatttataaccaattagttttacaccttatagcaataagaaaaataccaacacttaattgtctcttatcaatttatactccttatttatgataccattctagttttaagagtttgaaacttcatgacatgataaaatttaatttggatcatcttctatcattccattattttcttatgtcatttctctcatagatttctttaatggcactggtctttaaggttgttaagtttgattatctcaaacatttactatatcttgaatatgaagttgtttgatattgtcttataaaggttctggattcacttattgatcaatgaaaattatgaaaacctaaatattgtcaaaagtgataattggaatggagttaacatcaattcctcctcaagaataatatctataatgaccttatttctccctaaactcaaacttgctcaacaactcaactaaccaaaaaaactagccccaagaagcttcaattgacttaaaattcacccaaaaactaaactaaaagcaactaaggtttggatagaacctaatttcaaaatttgcatggttgaacctaaacaaaattctcaaaaaactcaagaaaaggaagctagggctttaccttaagttttgcttcaccaaaccccttctaatccctactgaatcctctaaaactaagtgatgagatgactggttttcccctagtttcacttgagtttgaagatagagagagaggactcctttttatgatttatcttaagttttatttaataaaagaattttatttcacttagccttagcttaattcagctagaaagactaagaatggtctaccaactcactgaaggacaaactagcacttaggtataattacacttttactctttacttcacccttaagtaacctcaagacttaggggtaaaatagtctaaaaccacaactctctctactccaatattaaaactatcacatatgatcgattcattaaagtaaaggttctaaaccaactcatgtgactctaatagccaaatcgccacatttctatcgttaccgagtaaaaatcacaaaaatataaattttcacatatgtcatatttagtacacttagagtttaataaaatctcaaaattgagaaattataaccctcactactacaaatatggtgtttttcgtcagtttgtaactgacatatattcttttagcgtcggttgttgaaactgatgtatatactgtagacgcaaaaactacattattttgtgtcagttttcaacagtcaataccaaaaattagcgatggttaaaaaaagtcacttatagtgtagagaattttttttacaacattcccgtcggttttgtaccgacacaacaaaaaaaccaaaaataaaatagatcacacccaaatctaaaacaaatacccaaattttaatgttcattttaattttacaaatctaaaatagaattatacaaatctgagatctacacaaataaacatagaaagaaaatctaaaacatatctaaatacaaaacacaatagctaccgttattaaaccaaaactcagaaatagacaatggtcgtctttatcgtcttcatccccaactcaaaaatctgtacaaaaaaatatttcacccacgagatcgaaagaaagagatagtagagaaaacttacatggtggcaccggcatggtatcgagacaaaagagaagggaagaggccattcatggcccgttcggcttgtcggcgtgcgggtgacagtgttagtgtcgagacgagatgaagaagggtcgcacggctggacgatcggagggaggcagtgcatggttggggttgtcgattgtcaaagagagagagagagaaatggggtgcggttgattgggttttaggtttagatttatatttagtttatatatgtaggttttatgtgtcaattgggcttttattgaattgggcttttttttttccttttatttaatgtgtcggtttttaattgacgctaggttgcgtctattataaaccaacgcaaatgttgaacatgtcatttttaaactatagcaaaatgttgttggttccaaactgacaaaaaatcttattgtgattttcttgcatcaatttttggcgtcaactgacgtgttgacctacgcaaaaacacacttttatagtagtgcctaaggcctatttttgaaaataggacccatataataatatattcacttataatcatgtgtagtcagaaaatacaaataattaatgctaattgccttactaatttcaattttgactatgcgaccattccaccccagcccagagccagacccagaccctgatcgcggccacagattttctatgtaaaaaagaatatgttggatagaaaattaaaatttgttttgaaaatagaaaataacagtttaatattttttaaatttttgtttttaaactcagtttttagaaaattatttttaaattttttagccaaacaccttttattagttttaaaagttgtattctgtttttaaaaattaaaaataaatctatatataaaggagaagtatgaggcggtgacgcgacactctcaaatcactataaatagccttttctattctctccttaattcttttattttttaattttttattaagtttataaatattaattaattaattgaataaattattcctataaattctgaaaaatccaaatatatttatcaattttaaaaattaaataataaattcaccgtaaatttttataccaccacccaaatcaaataataataaaatcaaatttattttattaattgatatatatatattcttaaatatgatctattataacatacttttttttacttttttttttttttaaaaaaatgttacctataaaattactttttttaagtcacaccttttttattagctcttttttttttttttttttttttcaaatattacataatttcaaaaataataattcacacattttttttttctatcacttactaaactctctctctctatatatatttatcttaaattatttctttcaatttcataactttactactaagaacttttttttcttttagttctctcttcttccgtttttttttttaattttagttctctcttttcttctaatgattgagtattattttctcaaacttaaatactcacacaaatatttggaatataatacttagagtttgtagaatgtgggactctctcaataggaagaagaatggagaactcaaaagtctcaatataatttttattgatgagaaggtaatttttgtttttattcatattttttttctattatttttttattaatttattaattattaaatacttaatgtatttactatttatcctacatgaaaatctatgcaacaataaaaaaaaatagtttctaagtttataagaagttattgagtgaaaattatttgtactaaatatttattattaacttttattcgtatttaaaaaatttattcaatcaatcatgtttatat

SEQ ID NO: 23244 - DNA, 5618 bp, Cannabis sativa
acaatcccaataccccttttttttctaattacatgagaaatttttttttttcaacaatattgcaacaacttattttttattttttttcgaaattgacacttattgtcaaatttttctttctctttattttttcacgctgcttccaatcaacctttttcacattctctcaattttcatactttttcccacacatataacaaatttctcatccaaattcccccaaactaaagatctatttatggtataattagggtcaaattttagaaattcaggatttatcttatctaggctcaatatgtgtagaaacaaagaataggttaaggctcaaaagggtaactaggataaaattacagggatggcttgaaaggctcaattgatcaaaagaatacttaaatcactttcctagtcatgcataatttattattttgcctcaaatagcaagcaagcaagttctagaatttttcaaacaactttccacatatcaaatttagcatacataaactaattcaattactagaaaattacctaatatgattcatactcttttaaatcacaaaattgaaattagttaagaatgtaatatcaccaagcacatgaattttttgaaaaaataaatgaactttttaaatcatgttatctacctactttcaaattgactcataaaaaataaattgacttaaaacaataaaaaaagaaaaaataaaaattaaaagacttaaaaaatgttaaaactagcaaaataaaaaatcaagttcacccccaaactaaagggacacattgtcttcaatgtgacattaaagaaagagaaaagggaacttatctgagtgtcacatcagtatggcagtggtggtggatagtatgggtactagggcggtggctgcgagaagtgatctagagcatcggggtccatcctctacatagagaaagcaaaatccaactcctggacttgctttgagcaaattcatgccgctgctgcagataggacttatagtaagcagcttgggcctggttggactgaatgaaatactgatttttcctaataatgtaatccaatctatcataggtgtcctgagtccgggagtccagtggcgattcaatctggagaagaggcgaaatcgtctcacttgcacctgcttctgcatgcccctcttcctcatcatcatcatcaccacccttctggcattttcttgcttcttctggaggtgtcaatgatactggatgaaaatcatagtaatgccgtcttaggatgggttacatgggtgccttaacaatgtctctttctatcattggcacaccctgcctcgagcataatgttgtaataagggtactatgagttgtaccgacagtggtcttcatttcagagacacagtttatatttctcaaaattacccatccaatgtcgaatgtcatcttgatcatgatagctaaactatgacacaattctcatagtctagtgataaggcatgtgatgtcagcataattctggagttgacaaaataggcccaaactttggcctctggatagagttgccaccggtataaaaacttttggttctggttttccgcaacatgcaatctggtcccctcttgccctagaactattacaatggcttcatcagtgagggtttctcttctcagtgctaatcttcttttgtcttgctcttctcccagtgtgccaaggttaaagaagttattaatagcctccatagtgactgtcccacatactcctctaacatgcacttcattattgtctcctttgtaggggtaattggaaaaaaattcacaaaaatattatgattagcttctcccacgtgctctgcagcacacaacctctgctatcgtcttctcacaatttctcctctaatggtttcataaccatgctcccttctaaaaggttcttcttgaaattcaaagcccctctcccgaagtacaatcctcttcttaaatttttcatatctttttgccgcatgttaattcacaaatctattcatatgtcgaagttagtcttcttggggattaggatcttgtgatgacaatccttgcatattatgatgggctcgagacccggttctcctagatgccataccacttaactagccaaaataataattctttagtgtaaaaaaatttggggagcacctcccctgtatttttcacttcctccaaactaatttgaagcagtaattcacccctaataatttctaccagtagcaataaccaatatccaactctccacaaacaatattatgccaatatcaccaattcacaagtaattactcttcaatcaccaaactttagtggaaagaaaacacttacttgtagaatagaagctttgtagtgcttgaagtagtcctcttccaccaagaaatcccaaaaaaaaaagtgatgaacacaatgatttttaggttttaggtttttgaatttttttttctaaaattttgggttggactgaagtaatgtgggtggttattgatgaaattggtgaatgggttgtgtttgtaggggtcgcgagaaggaaccacccacatagacattagtttttgatgaaatttttagttatgaaatttcagaaactaatttcatgcctagacataactaaaaaaatttaaatggactagtttcatgatttctacggttctacatatcttttttttttctaaattttaaaactaaattaaagtttactaaaaactaatgactaaaaatagaaaattgtaattgtttttaaaattagcggtaaaatattaaaattttgggatgcctcccaagggcgctgtcgtttacgtcatttagccggactcagtttctctaatcaaagaggcgccaattggatgacgttcttggcttcatcaacgtggcctctcaagtaaagctttagcctttgaccattgaccttgaaagtctctggtttctctcatttgagttccactagtccatatgggaatacttgaaccactgtaaacggtccagaccactgtgattacgatttccaaggaaaaagcttcaaccttgaactgaagagtagaacttattgtcgggttaaaactcttttctgaccaagtttctgtcatgccacttttttgtcctttctttgtagatcttggcgttttcataggcctcgttgggaaattattccatctcatttagttgcaataacctcttttctcctactgctaccaagtccatattcaaagttttcatggcccaaaatgtcttgtgctctaattccactagaagatgacaagtatttccatacaccaacctatatggtaacataccaataggtgttttaaatgttgtcctgtaggcccatagtgcatcatccagcttctttgcccaatcttttcatgagcgttgaacagttttctttataattaatatttaatctcccggttggatacttctgcttggccattactttgaggatgataagatagtgcagtcttgtgacaaaccccccccataccttgcaagtagagctagcttcaaattgtttgttgcaaaaatatcttccttcatcactaatgattgctctaggagttccataccaaatgaaaatatttttctgaagaaaatttagcactgttttgccgtcatttaagtgtgttcctgctgctactaccaattttgacacataatccacagctagcaatatgtaggttttattgtatgatgatgaaaagggtcccatgaagtcaataccccacacatcgaacagctcaacttccaatatgccagtcaaaggcatctcattccttcttgagatatttccagttctttgacaacggtcacatgcttggacaaattgatgagcatctttaaatagagtaggctagaaaaatctactttgtagtacttttgccgcagtttgatttccactaaagtgtcctccacattgtaagctatggcagtgatttaatatagagaacatctcctctttttgtacacatcttctgataatctgatcagcacaatacttatagaggataggctcttcccaatagtagtgtttgacttctaaatagaatttcttcaattatttccttatcaaatctggtggtgtaatgttggcggctaagaagttcacataatctgcaaaccaaggtatggtagaatctaagaaaaatatatgctcatcaggaaaatcttcatcaatctgaacctctcttgtattctaattttcttcaagctccaaccttgacagattatctactaccaaattctctatgcccttcttttcttttatttctaaatcaaattcttgtaaaagaagaacctgtcgaattagtcttggttttgcatcctttttagtcatcaagtacttgattactgaatggtcggtgtacactatcattttatttccaatcaagtaaggtcagaatttgtcacatgcaaacgctatggccaacatatccttttctatagtagcataatttagttggacatcattcaaggttttgcttgcatagtagatagtctgaaataccttgtgtcaacccttctttgttgtccccaataatactgcaccaatagcataatcactcgaatcacacatgatttcgaaaggtagctcccagtctggtgtagtcataatcggtgctaaaattagcttctccttgagagtttggaaggcttcaagacaatcctccccaaattcaaaaggcgctccattagcaagaagattagataagggtttggcaatcttagagaagtctttgataaatcttctataaaacccggcatgccctaagaagcttcgaactcccttaactgatattggaggagggggtaagttctcaataattgttgataccttggctttgtcgacctcaataccactttttgaaatcttgtgacccaatactatcccctcttttaccatgaagtgacatttttcccaattgagcaccaaattagagtcttcacatgtcattagttctagttccaagttgcttagacattgatcaaaagatgagccgaataccaaaaagtggtccatcaacacctcgatgcacttctcaattagatatgaaaatatcgtcatcatacacctctagaatgttgttagagcattacacagtccaaatggcattttctgaaaaacaaaagtaccatagggacatgtgaatgtcgtcttctcttggtcttctggtggcaatggctatttgatgataacctaagtacccatcaagaaagcaataatactcttggcctgccaacctgtcaagcatctgatcaataaatgggagaggaaagtaatcttttctagtggctttgttaagtttttggtagtttatacaaattctccactctgtgacagttctagttggaattagttcattctgctcattcttcactatcgccattcctcctttctttggaaccacttggacatgactcacccatttactgtctgaaataggataatccaccccagcatctaaccactttaaaacttcttttctgacaacttccttcataggtgaattcaatatttgttgcgcatcaatggtgggctttgttccttcctccattaagattctatacattacagttgaggggttgattcccttgatagctgccaatgtccaccaatggctctcttgtgtttccttagaa

SEQ ID NO: 23245 - DNA, 3035 bp, Cannabis sativa
tctctctctctctctctcaccttacaattattattatagcatcaattattactaaaaatgctcacaagtagtactactactagtaccccagaccttactcataactcactcaaaagtatcacttatcccaaagatcaatacaaactactcttctctaattataataagcatctaatgatgaagagggacttatccatatccactactactaaatcatcatcatcatcatcatcaatggatcaagatcaaaactaccatggtggatcttcagcttcaatcccattcatgtgggaatctcaaccaggaacaccaaaagttaagctcagagaaaaccctttacctcctcttactcctccaccttcctattgttacactactacaaaaaaatcttcatcatcaaatgttaaaactagaaaaaagacctcatcatcaaaaccaaatcttatacgcactattttcccaaaacatgatacctctactactaaaaatactactagaccacgtaataatactaataataatattttcccttcttctcctaataattattctctttcatcaccatcttcttcctcatcactctcctcttctccaaggtcattctcctactactcttcttcatcggtaccgtcttctccggcttgtactaaacaccgcggtggtggacggcggtggagaatgatgtcatctagtccgaggcggctttcggtagattctagggttaataattgccatgatcatgaagagaattatgaggagtatggtggccatgatcatgatgatgagtcttcacctgttcccattctctgctttaatggccgtagtagtggggccaataatgtacggtccagatcaagttgttactcatccttcataaaggtactgcttaatcacaaataataattggttaataatgataatcatcactacagtttgattaaaaaaaatagctagcttgattctctatattaattttggggaatattgagctagtactcttattattaattagttgtaacatttttcgttttattgtaaccaattggaaaaaaatatatgatcaatgatatgatgatctcaattagagcttaattatataatgatactataatacaagtttggggattattagtgattatgttatgtatacgtatgatcatgctgtaattttgaaatttttgttgtcaatttttttaattcatgatgatatttgtacgtgaccattttcggtgaaatttttgatcgttacgtcagaagattattgaaataatcaaattttatctttgtgatcaagaaatgttgcacggttctatattgagagtgaaataaataaacaataatttattagtttgatacattcaaatttatgattactttatttgtattatatatatatgtgagtgtgtgtgtggtagtcggtttattatttgtcttcttcttttttagttataagataatattataaattgttggaattgaatatgccattattcatgcctcattatcaattcatattatattataagtcaaactagtgcaaaagcttactattattacttcaaataatcgaaaaggtatttcaaattttggactcattcaaatctattaattaattaataatgtgtctcttttgcttgtttttacgtataaatacgcgtgatctaaagtatactacaacactacttttcgtttcaaaaaaagaatatatatagaacactttgtgattttttaaataagagaaaaaaaaaaataaagaggcaaatatgaaaactttgcaatttgtctagggaatgcagtcatcattatctcaacatcatttgaatcccaacaaattttaatttatagcttgtaattttctaatgattaagtaatcgttcaagtcaagtccataaccagaaaacagatctagatcgattgagaattgcataaatatatgtataagatttctcatattatatatttaatatgcatggaaatgataaattagcgattattattattagtagtcgtagtagttaattcgttattataaatttaaattgttagagtgaatttgtctttgattttgatctcaaattaatatattaaacaaacatacattttctgacttgctttaattgagacatgtgaattcgaaaaagtggataaaataagggccaaacagagagttggaaagcttcttatgccctttgaaagtttggtaactaatatattttaaaagagagagagaacattaaaccttccacagaatcatcacacatggcggtttttgtacattcaaatttattcttttgtcttttttgaattttttgagtgtaacttagtgtattacaaatcaatgccctctccttttatcatatccctagccttggcttacattcaaatttttgttgttaatattatatgtttctttatcaatataatttattaaaaaaaattaatatttttctacaacaaatcttacatatagcaagagatgttatcagcaatcagcatacaaaagggtgaaaacgcatgatataataaaaacatcattagctagacaatatacccaaataatggactgcaattcaaacttacattccattatgtcttaccgacataaactatatatatccatcattattttatagttatatttttaatgtaattataatagttattttactattaataacatggttactaattaataaatattactatttaaaaaaattaattaattacatttaataatttttttaataattaatatttataaataattttatttttatatttaagtttctattataatttttttttatatattaaaccatttgattataatatttgtaatacaatttctttttttttttttgttcttttttacatttttttttaataaaaaatagacttctaccctttttaaaataaattagtaaacaacccgcgcttcgcatggaaaatgtcacttagataaaacaaagaatcgtataggcttttttttttttttttttgaaaataatattaattcatataatattaaaactaaa

SEQ ID NO: 23246 - DNA, 1997 bp, Cannabis sativa
ttcttttctcccttatttaatcaacttctcccttttctaattttaattttaataattcaagtaaacaaatataagagaatgattaccttactattgattctcattacttattagtaaacatagagttaaggcttgttactgtgatttagtattaatagtacacaaagtttattaattacgattgaagtattattttgtgatagctattttgtttgattattaatatgataaagatttatatagttgatatttttggttttttattactattattactattagtaatagtattatataaaactaataactgacggtataaaataaatggattaattaattaattaatgtttataaatctaattaaaaattaaaatatgagacaattaaaggggcaatagatataagcatttaggtggaatttggttgggagaaatgaaaatataggaatatgaatgagaatgggaattggaatatgaatggaataaaatttaaaatgcataaaaaaaattattaaatttttttaaatcttgcattagaatgatctttcttttaattttaaaatagatagtcattccaccacaatgatagaatattctatctgaatggtattctaatggttttaaatgcaaccaaataaaggaatggaatgaaaattgttttttttcccttctattctatttcattacttccaaccaaacgctatcttaaaaatactacccctcatatctcttcgtttataaatctaattaaaaattaaaatatgacttcgtatcttttctttatatataaattattattaaataaaatacaaccgaacttgaatcacagcttatttcctacttatatgtatatatatttagaaaaatcaaatttatgttaaaaagaaaaagtataatatactaagctataactctaactttttggatttggataaatgttatgttagtgtcatttgaaaagaaaagtagaataaatgtttacaagctgctatttatatgtgtgtcatcaacctatataattaaaaatatataaaataaaataaaaataagttacatattgaaataaacacaaataatttttaaactaataataatagcaaatatactaaagagttaaaatacccaacgattgagatttaacacaaaattgtttcataaaaaaataacacaaaattataatacgtagaaattataaagtatataaaaatttaaaaagagaatgaattatttaatttaataaagacaaaaaaaaaacagtaaaataataatatatttataaaaaaaaaaatataaaaaaaattattaaatattatatacaaaattgttccttaaaaagtggaacaagtcagtctgtaattcgtatcattattccccttgaaatatgggaagagatcaaagaatacagaatctcatattttcatattattttaattggatgtttttgttttattttgtttaaatatatttcctctcccacgtctatagtattaatatccatataaataaaagaataccaatatgttagcctataacaagttcagttcgttagggaattgtatttagactatgttttttcttccttcttcattttaaaattggtgagaccgccgtatatcttatgaataatattattcttatttgaacaagacaaacattatttttgaatcaaacgtaaatggctaacagcaaactctaaacaaataatatgtcacatagttcaatgcaaacaaaaaatattgcacaacacagccatttatgcacttacgtcatagttaacttaggtgcccgggttcatcccactttccacttccccatttttctgttttattaaaaaacaatctaaaaaacatgtacacattcactcagagtctcagactgccgtgcacacattaaaactcttttttttttttcatatttaatttgttttccatttatttaattaccaagaattatgtatcatcattctacgtgtttctccagttcatatgctcagtttag

SEQ ID NO: 23247 - DNA, 2133 bp, Cannabis sativa
tagacataaaaaatgtttatgaatatacatcgataagtgttaaaatgagtcccgtgttcatgttttaagagatatatttataggcatagacatgttgcacgtaacttgtggtttatatattattcatctttgttttatttttaaaatagttctatctttgttattatttattattattattattttataaaataacaagatcatgtggtacaaattttgtcttacttctattataaaaaaaaaaaaatatatcttagtaacacaatatatatattttgtgattaaatttgacttttaattataataaaaaattacttatgattaaaatatattattaattaaagtataatttatcactaatttaattattgtaaataaaatatatgtcactaatttttggaagtgacaagtgtacatagaaataataatttataattagaatcttttaccttattttgtcttagatcattgttatgcacctcagattttatctttcttattgtaacatatataaccatatcttctttcgacatgggggccagactaagaatagttaatattttcatagtggtgataaactataaatatgtaatatttacaggtttgaaaagtatatacatatatataatatgcagtaccattatgaatactgatcatctcaataatggccaagaagatcaatcggcacacggttcattgtattattgcatggaattgctctttctttgatttgtcagtattagttgacgtatcttatatattatttatagaaaagtacaatacccagatttgcaaatttattgatatgatcagtcaatatatctatatacatttatatcatttcatttgaatttagaaaatttaattctgcatataatcgaattgtaatttggataaatagaaaaaattaaattgatatatatatttatttttttctttaacgaaaaaattaaatttatgagagaaataataattaatataagtggactggagttgcttgaatatttggcggtcaatataatttccaagcagctggcagatatgtactttttgagataaacttcttctggctcaattaattatatggtgagtttattttcttggcccagcaaaaagattatcatttcattgtttgacgacaaaatccaatttatagtcagtacatgatcatttggttatataatatacctaatcatatgttgcagtagtgactatttattcttccttttttttttttaattgttaaaacatggaggcttgaggtgtttgcagtcatggctttctagtttataatatacgtacatatatataacaaaagttttgtattgtttacttaattaagaatatgaattcgaactctctctctctctctctcctaatcttgatattgatattatgtaccataattttcttctaaaaatagctagtaattaataagagaattttataatatattaggagagataggacatgaggtggagcataaatgaggtggattatgtggaggatatctgaatggtgacgtaggcgcacacgaggtcttaggtggctcaccaaataaaggctaaatatttatttattggcgcagccaagagagagagagactatgtcggatatacatatcaaggaaggttaccatagatacatatacgatgactttggacttttctatttttgcagtgtatgcattctgtgcatggtgtataaagattaagattgaggtgatgtaatagatggaagctaaaatacattccactttaatcaaatcaaactacttaaaataaaactaaagattaggtcatatatatatataatatgaagaaaaagaactaaaaatagaaacaatattaatagaaattactataacttcaacaaagtataacacttgtctaaaaatttattccacttatctccacatactaagatagctctcgtaaaaataattttgaaaattattaagcttttagggtttttaacaaaatgtctttttgggagtggtttagccacattctgttacaacactcatccacggctcaggaagagctgctcatggttctttgggcgatttggtatgcccgaaatgaggtggtttggcgggacaaatcaatatcagcggcagaggttattctattg

SEQ ID NO: 23248 - DNA, 2148 bp, Cannabis sativa
taactttaacacgataatgcgagcgagtaacgtgacaaacaatttacgctgtattttgttccctacctcgcttgttggagcagcgagtttccccatttttcatgaagacagattcaatgcaaaagtcagatctttgatcagatgcttggaaggtgcccagattgatagattgtcaacctaggggctgggtgctcggggcctcgggtgctcaaaaatcaacttgctccgaatctaattatgatgcctcaaatatgtctgtggtctatcaagtcgatgtcttaatgcatgttttggccactttgtaataagacagtctcagaaactgaaaccctagtcaaggatgttaacttgggcaccgggtggaaaccctacggtgcccagattggttccgggttgcaggttcgtgtaatttcagttcccaaaccttgtattaggttgcttcatgtcttcatggtatagaatactgaaagataacgagttggattcaagttattgaagtccgaatttccattccgttgctctcagagtcaacttgggtgtagagctagggtcccctcccagttggattgctatgactcgggtctactcaactacgtgatgtcatccttcatgtcacgtgtcaaacattgatgtccacatcactataaattttttttgaattaacaatagctataatcacgtacattcatctagatgaatcatctttatccatacacgttattataaataaattaggaaacaaactgcgcttcgcgtgcagttatattttgtttagtgataactaagttataaatttatatcaaactttaaatttaatagtttttatataatattttttattttactcagaaatataaatcaataattttaaaaaagtcataatacaattcttcaaatatgactatatttagaaattaaattttagtgagaaaaaaaatgtagagaaactataagaaaaaaaaagtgtagacaacaaaaataaataaatcaaattttcaagtttgatatgaagatttttgtggattggatgtttttctgtattccataccaaatatgagatttattattattttttatttttaacttttttttcctatattttctctacccttttcttttcttaccaaaattcaacttgctgataaatttatatatagtttactcttcatacgtacgattttaaaactgttatcattaccgtatgtcactcataattagttaaagttgttattatcactatatctcatttatactcatcattatattcaaagtcactttcatcacatatctcacttatagtcgttgtatatatttaatataataaaacaaattatcaatacaataatataataactaaaaaaacctaaattccaataatatacattaaaaagaaaatgagaaaaaatctttcatactaacaaaaaaatataaaataccacatgctaacaaaatttgtggtatatatactattcttttgtagaaaatagcaaatcttctttatttttccaaagtaaagataacaaaaactttgaatcttgaacaaaaaaaaaaaaaaaaaaaagaaatatgttacccaaatctattttggaaaaaaaaaaagatgaattatgttgattgcgattgaacaataacatcttagtgacatcaataacaggaacttactagactacatatatacatagatatttcattttatattttgaacttagaaaggacaattacctataagatatatatatatatacaaaaatattttatttattttttaaactttttaattagaatatataataaaaaaaattctaaaatagttaaacatattttttaaatcgtacaaatttaaagtggttagaacaaattataaatattatttttctcattaaaaaaattgtagatattttttctaaaatttttataaatagtacatgaaagtaattcaactaattttttagagatatattttaatttttaagattattctcaaaattgagcaaaagtaataataaaatataatgtatgtactcaatatatagttataaataagttacacatgaattaatgaaaatctataaccttaataaaaaggaaaatagtttcggcctcccttaattaaattaataagtaacacatgaattaatgaaaatctat

SEQ ID NO: 23249 - DNA, 2655 bp, Cannabis sativa
tatacctattctttgcatctaggaccgtcttatggaaataaaaaagtagtttttgtttttgcccttcttttttaaagagtacaacactaactgctacctcgatgacttccaagtacaggtaaagctcctcattcagtttgggagtagatagaactggtggtgcactcaaataattcttgattcgttctagagcttcaactttctctactccccatagcttattcgagcccttcttaatgcaattaagaaaagacttacatttgttagaaatttttgaaatgaaccttttaagagctacgatcttcccatttactctttatacttctcgcatatttgcaggtttagttatctttgaaagagatttgagctgagttggattatcttcaattcctctttatctaatgatgtaccccaagaatttttgtcaagttacgtcaaaatcacatttggtagaattaaatttcatttgatagagtccaacacattagagcattcttcgggatgctaaagatgatctcctcttctttgagattttaccaccatattgtcaatgtaaacttccataattcttttgagttgcttggcgaacaccttattcatcattctttgatatgtctctcctgcattctttaatgcaaaggacatgaccttataacagtataaccctttctttgttatgaaagttgtatgaattctatcctctttcatcagtgtaatctagttatatcttgaatatatgttcatgaagctcattcactcacattcagtagtggcatcaattatctgatcaatctttgataatggggaactttctttcaaataagctttgttcaaatttgtaaaatatttccacactcgcttcttcccattatttttttagtactaccactggattggatatgcaatagggataaacacattcttcaacaaaatcagccttcaacagtctttctacttcttctttaatcacttgattaatttttgtagctaacctcttagttttttgtttgactgcaggaagccccttggcaactatattcagctgatgtctcattacttttgagctaatttctagtacgtcttgtggctcccaagcaaaggtctttcttcttcatctaagaacaatcatcatttcttccttctcctacttatccatttgggctcttaccaacagtgtctttttgagttcaaaagggttaagtggaacttcctcttgctcatccgccgttatatcccttacactattatcttcttctccctccaagtatttcagatatgctggcaaagagctctctatttgctatctctcttctttcgtagtgatctcctcaatcactgcattgaccttcctcattagagtacaacatttcttagtttgcttttgacatcctttaatattgattatatgtgttctgttgggggatggacatctaaagatctaatggagagtggatgatgctccttgcattcgatgtagccatcctcttcctattattgtgttgtatcctgacacaactttgattacaataaaatcaagtttcattgttctttagacaactatgacatggaactcaattactcccattggataaacctagttattgtcaaaggaacacattggcaaggttgaagctctaattctattttcatcaagtcccatgttgatcaatattttttatggtacttaataaggtatgcagcgaaagagtttcatattatctgactgattatcattgtaccataacccctaggattaggatctccatatgtatgtacattaaatcaaaataatgaaagtaataagttaagagtatacctcttgaatcctattagggtatcctcgaaacttctcgtatgttgtagcctttaatccagctgatgaggaatatgcaatttagactcacaccagtgtcttccaaatcaatccaccacacacaaggaataatgtgggctatcaggataaagtgtatagctttgttcttgttgagttctcaacacatgagcaagagcaactgagagaaaagacaatttttttttctctctatagattttgaaaattactctgtaaagtgatgttttgatttctcaaattaggctcctatttatagtaagtaaatccctttagtaaatcaaaatttaattgtttaaataaatatctataaccaaattcggagactgatatttatgagagaatctcttaactacctgagagaatatctcaacaaccttaaagtatctataaccacttttcaaattagatatttacctaaatgaattaattaacaaaaaaaaaaaaaacaaatccaatagggatagggacaatgctaggcgcctacctatgtctttaggacaagattattgtcttttcaattgacaaatcttgtctcgacaaattttatcttaacaattttttctttttccctatttcattaatttgaaaaattatttatttattacaaaaataaataattactattttttcaattcaaaatagattttttcaaatatttttatacaactatttatccctatccttgatagtgtttcaaggtggcaattcgaggatcatagacccataattctatgctccaataaattagattatttattgagtctcaccaaccaaataattatttgtttattaattccatgatt

SEQ ID NO: 23250 - DNA, 2043 bp, Cannabis sativa
  modified_base (2014)..(2018): a, c, t, g, unknown or other
cttaaccaacaactacaatattataataatatatccaaaggaatagtcttaatttgaccttcttacaacacaactatgatacacaattttttttttgaacaaaacaaatattatataattaagtattgaagaagtatatatatacatatactgatatataacaatattattgaaacattcttatatattgaattattattagctgcatgtataccaccattgaaattttctcttcatgtattctttttttaactacttcatgattactacatatattgaatagtcaaccaattcataatttttttttttctagtagttgttatttgatccgatattgcatggagaggcatcatgaatatatataataataatataataattaaatgatgacaaaaattagtagctggccccaaacttttttgacaaggattgataatccaatgaaactattcaactccataaatgtttcatataactaatcaactttatcttttcatttctttattaatctaaaatatgaataagaacacatgcatgtaacttatgttgaagaagtagtcatcaatcaaaatcagactcttcagtgcattttaccttttggcgcggtcttaatagaaattattagtaatattaggtgagctgccaggccgaactaactattgctcatattattataagcccggcccatttaactaaatctatctataaataatccttgcatgcaccactcattcgatcaagctctaattattattacttgatcaaaatattcagagagagatttagcagcttataagaattagataaacattattaattatgggtttatcttcttcttttaagattatagtgaccttagctatagtttttgtggtattcacaagaacttcttttgctgatgatgatgatgatctttcaagtgggttctattctaagagttgtcctaaagtctttagtactgtaaaatctgctgtccactctgctatttctaatgaacgacgtattggtgcttctctactgcgccttcattttcatgattgcttcgttaatgtgagttttcatttgttttttttttctctttaaatttatgttttttcttttgaattgttttgtttgtgctatatattgagctagtggttccaaattcgaataactttatggtaaaaaatttgcatgaaatgagtggcccacttcacatggataggtatacatcatatataaaggtgaaagttctcttttgctttatatttgttggtttaaattaaaactaaatacatgactttctgattttatttatttatttaatttagctatggttacatgatattatttgttctttcatgagccatatcttaatcaaggaactaattactaataaaacattaattgctaatatatgtattctattaagaactaagtatatatcaccgacaagtttcatgtcatgtcattttatataacagtaaattgattggtttagcttaattattagtttgtgtataaaaataattggtctattttcccttttaaaaaataggacttggtctaatttcctctggccgatatatatagctatatatattaatataaattgtacatgtacttatttttcaactaacaacctttgaggccagcattatattttttaaccaaagaaaaatactatagtctcaccaataataatatcatcatataactaatacttcggtaccaatataagatatggtaataaaataaaatagtaatttaatttgttttgcaatgaaattggatcaatataatgttgaaaaaaaaatatgaccttctcacttaaaaatatataagagaaatactaaagggtaccagtggtgcctagcactccgtgtcaatatcaagtatcgggtcccataatatagcaggttttaaaaaatatgattccccctcaagatgatggctattttttgctcatcaatcttatgatcacttgcccccgcaagagatatggctctgataccatgttgagaatcatggggtnnnnnctcaaaaccaattggcaatgagtgg

SEQ ID NO: 23251 - DNA, 1985 bp, Cannabis sativa
gtttgtgatttagatttgtgggtttgtttaaatttagtttggtaatgggtagtagtagtagtggtatttgaattcattggttctgactttacacacttattttatcttttttagtcaatattgacaagattaacttcagatttgaacattttttagttgaaacctcaatgcttagacaccattttttaacatcatccaagtctgaagccagcatgaagctactaaagaaatggcaatataacagctaaagttcaatttatatatataatttttatttttctttggtagtggtgttggtggttacagtggtgatgggtagtggtgatttcagtggtaggtggtagcagtgggtgatattataagaagataaaaataaaaaaaattaatatttctttaaagtttataacaaatttttatttttattatatattttttaaaatttttaaatattaaataattttaaattttaaaatttttttaagttaaattaatttttcaaatttttaataaagatcctaaataattaaatggttggactaatataaatttgtcacgtgcaaatgagtgtatatgtggaaaattcaacatggcagttaacaattaaaattggatagaaataatgaattgctaacagaacacatgtttggaaggttttacagtaaaaaaatcagttttgaaggataactaactgcaagtgtagtgaaactttaggggatttgaccgcaatttactcaataaaaaaatattgtttaataagtaattttaaaaaatataatattttaataattacacacaatcttcaaagggtcagaaataagaatataactgaaacccctcaattacttcttattacataattattgtgtacataaaatatgcattcatcacgagcaagtattttatgtaatagtaatatttttctaaattactatttgataataattttaagtgacagaaaataattgaaaattttacataattgaccaaaatttttttaatacagattttttatttacgctttgagcttttttatttacaaaaatacctcttcaataaaacaataaattatttttttagttgttttatagttgtattatagttatcatgaagttattttttgttgttttatagtttatttataattgatttatagtgatcgtgagattggatttctcgttgtttttttttttttactttttggtgaacaaagtgtatttctgtattttaaaacattacaagtatatttttataaataaaaatgttaggtcataaaattataaataaacataaaaaaaaaatataattttaaaaattcctcaaaataatttttaatttattatataatagtaaacaagaaagagggagggtacccaaaaaaatccaattttttattttaaaacattctctacatagcaccaaacggaaaaaggccaccaaaaagtttttttcttatctttattattcatttcatattttgaccatacaaatattttatataacgataaattatatttaaattaatatatattacaatttttataaatagttaaataatttctcatttattatataatagtaaatgagaaagggggactatactaaaaaatatttcaaaaataattttacagattctatatagaacaataaaaaatcttaccctaaattgtcaaaaaaaaaattattattattcatttcatgtttgaccaatgtgacaagtgttttatgtaacggtattatatttatgtaataaccttttagtaacgggtaagaaatgactcatttattgtataatagtaaaagaggaaaggagaccatgccaaaaacttccaattttttttttttttcagattctatatagaaccaaaaaaatcctaccctaaagttttaataaggaagtgttattatatattttatatttgaccaatatgataaaagttttataacgttaaatttttttcttcaaaatgaagaaattgattaggata

SEQ ID NO: 23252 - DNA, 1852 bp, Cannabis sativa
  modified_base (1339)..(1345): a, c, t, g, unknown or other
tgataacttttgtaaaatacagggtccaaaatggtatttaccctatttaataccataaaaaattttaaatgtaaaaaaataccataaaagaatgaaaacctaaaaatactatatttttgcaactttttaataaaattccaaatttgatgtaattttcacttttcttaaattaagccgtacaagttacaacatgattagatcctactgtgacgtaattaagttttaaaataataataataataatatctaacaacatagcttataagataagtatttaacaacgtatgaatgatttataatggaaaacactactgtcttaactaactacttgatattataaactaatgaagagaaatataaggcatgcttcatgctcagaatttaaggttaactactctgattctaaagctcttatatacaaatagcatgaggacaaatcttatattttattagccaattgtgtaagaatgtgtaaatgtaatatattgaaactaaatcaaacacaagaaataccaatttcacaagcaacttaagacactttttttttggttgacaaaagcaactgaagacactttaatattgcttgataagagtctatttcacatatttatatacataattgaaaactccatcaacgtgattgctctatatatacatatgtcaatcaaacaggctatagattggatccattattatggtgttttttttttctttttaacaacattgatatgaaaagagaaatatatgtgctgatggatgtggtcaaataacttaaccattaaattattatgtgagactagactcatgaagagcttttatagtgattggagtttaataatttgatccaccgatagaaaatatctaatttatacaccaaaatttaactaaattatagtgaattaaagttataaagtcatgctagtctttttcttgctctttttaattaatataaaattattacattattaatggtatatataaaataagtgggatatggtgaatgtccatgagtaattcatggactagatttaaagagatgtatatatcaatattacaaatttttggcttcgagtggcaatcaaagctaagacaaaatctttggcatgcatatttatattagcataattgttaaaaggtattaggggtggttagtactttttttttttacatattttattgttattggtgtaattaagtattagtttttatataatttaagaaaataatatttgatgaatattgtgaactaatcataaggcgccgcctataaaagtattacgtaacacctaataacaatgctcttatattgctaagcaacacaataataataataataatnnnnnnnataataataataattaaattattaaatgtaaatttggaatgactttaattcacctaattaatgctaccaaacaaaacaaaaatgttattaatttataaatcatttcataatattaattactctaattaaaccattcattttataagtgcttcctccaacaaatcaatactccatttctagtaaagctatagaaaatgctacatattattttagtgcaataaaatatgtagtgtaccttaaatatgagttgtggtgtgtcgtaaaaaaaaaaatatgagatgtattgtgctgcttttgaattcatgttatactttattcaggatctatttccttatatatgcttaaattcatgttctactctcatacattttttttcttacaattgatgatacaattattaaatattgagacatcaactatgaactagacttggtttccgaaaaaaaaaaaaaactataaacgagactttgataataaatgccctgaatttgtgaatatgaatataat

SEQ ID NO: 23253 - DNA, 2718 bp, Cannabis sativa
ttattaacctgagaaaaggcgtaaggaagttctgaatacatgccagcagctctttcacggtagaaaactgttctttcaatggcaacaacagattgtacagcagaagcattggtggctccaaggaaaagtacagcagcatacatggctcccaaaaggttcattagatcttgttgttttgtcctgtttttatatattacaaaaaaaattattgacatagaacccattataacatggcaaggaaaacaaaactgaaaccaactaactaaaacttacatttgttgtcccttgtcccagaaaataagaccaaacaaaataccaatgactatggtcatgaagaaccgaatagcattatattgagggtttctccaataagaccaatgttgtttccaaaaacaagctttgcattgaacaaagaagggttgtgagtatttagtaggaaagtagagatctttagtgcctggtagtggagtactaagctctttgataagattctgattcctcctaaagaaaacatcaacaatcacttcaatgttggataagagaaaatgatgttcttggcattattcttgtaattaaagagagttggacttactggttaagctcagagttggcgaaaatttcggcaaagtcaacatgaagttgtgtctcaacaagaggggaagtgatttcaagcatccatgttgcagggttgtaaccatccttaatcttagggacccctggaatagcctgtaatgtgttatagatataattagtcaaatgctattacttttctatgtatatatggatactagtactcacttcatagtactctatcaacttgtgagaatggcgaccaagaggtccagcataaatgacttgtcctccacgtttcattagtagcaactacaagggaaaacattacttttcatgtgtaagacaaacaaatattgacaaattgacataaagattgaaggaatatgcacctcatcaaaagcttcaaagatatcgatacttggctggtgaattgtgcatacaacagttcttcctgtgtcgacggtgtttctcacagttctcatcacaatggcggctgatctagcatcaagaccagaagttggttcatccatgaagatgatagatggatttgcaaccaattccacagctattgttagccttttcctttgttctgtggagagaccatcaattccaggaaggcctacaagagcttctctaattggatttagctcaaccaaatccataacttcctccacaaacatctacacaaaaaatttcaatcaatatatcatcaaagtaagaatcatgttctttttttctttctttcaaacagtaacattccattgacgcaaatatctcgaagatagactcttcagtatcgatgatagttcagcatacctttcgtgtttttgtgctcacatctttagctagacgaagccaagctgagtagagaagagattcatagacagttacatgaggtgaatgaatgtcattctgctcacagtatccactaactcgagcaaatgtttcctgcttctttggaaaacccgaaatactaatgcttccttcagtggagcctcctgttttccgtcctgccaagacatccataagagttgtcttcccagcaccactgacaccaactaatgctgtcaatattccaggcctgaaagcaccactgacatctctcaacagctgaaggcgatcttcttcaactccttgaattttcatttcctggtatggcaggccacatatacatctcaatctttgtttcacataagtaaaacaatagttctcaaaaccagagaaagaaatgctaataatgtatcaacttacagcaggcatatctacatagtagttcacatggttgaatgcgagtgataacggtttgaagggtaagaccattcctctctttggtgtattctcataatcgccaacaatctctgaagaacccctcagtttcatatcaatgcctgtaattgtttcgaaaaaggtttactttagctaaggaaagcataataaaaatcaagttattcctctactttgtcaccatatcacacatgttaaagtatatttataatctcaaaccttctttactaaaggattgagtttttctccttttcaccccttcttcatctgcaatgacagctttcgaatctcccaaagctgcattttttgtttccacaaaagaaaagatgatgatttatcaaccccagttacattttaacatttaaccacacataagactcatcatgctaaatttataaagagataacttacggttcaagtacgtcaatgctgcaatgaacaaaatgttgaaaaggagagaaaatccaaagagtgctccaacacaaatccaataccaatattcttctgtatagaaacctctagactggaggaggactttcccaactgtagcttcttttactctgggatctgtatttggctacaagattaataataacattataatctcattgatagcatttatagtccaaagaaccttactaggctgatcaaaacttgtaccactaagattttttaccttgctccatctttcatcaagaaactcattaatgactattgcattctgtccatacatcataggagaaatgtagtatccccatatcatccatggctgaatgtcatctataaaatagtaaacaaacagagaaaaaataaaaaccacttggtacaaaaaagagtgcaagaatttcagctagatcaata

SEQ ID NO: 23254 - DNA, 1280 bp, Cannabis sativa
ttgatagtaccatatggagtaacaaatatgtgtaactagactttagctctggaaatttgtgatataagatttttccccagcattctgaaaagtagtgatactattctttattactcttttctttccctcttcttcactctatctttaccattcactttcttttagttatagattcttttaacttgcctacctagtgatgcttttacatcctgttagttatagcttaataagcatctgtttctttgcccccttaaagtgtatttcttctctaccatttaaaacttgcttcctagtcggctaaccaaacaaacagttaattttgtccaatggcctttttatctttgtgtacgattgtgttatagtactttgaattccttaaccagtacttacatgcagcacaagaggaagacgagaaaagggggatctcattcaacaacgctatctttgttgaggaaagagcttcgggaaggaaatttacaatctctttttgggggctcatcttgtttagtgtcatcatccaatgctgcacctgatccattgttatcgtcatttatcttgcccatggctgatgatttcggcagtgttcaacctccctttttgactgaaacaagctcagcaaagaaagcttctactgagaatgtatcagaaaggtatgttaattaagtcattgtctttaagtttatttattatcattgaaaattcaagttgttgatgatgggtctcagtaagtcagttcctttctttcatattgcattgcagaaaatcaagccagtataagaaaaaacactgcccttctctaattattattgtgatcttttaactcctgttttaattgttgtaactgggtctaattcatttgtttttttttttttcgggtgacagaaaggtgcagccggtggctcctcctctctcggttaaggataaggaagagaaggcaaaaagatgtcagtttgttcaagggatgttgttgtccaccattcttgacgatggcttatgaatttcagcactggaatgaaaaccctcacagccaacttacactgcaaacctatgatatgcttgtagtgtgtatgtcacgttatatatattacatatatatattattattatatattaaaggggaaaaagaaaaagaaaaaaaaaaaacaagggagtggaataagttgtagggatgagtgtaatttatgtgccttctgaactttagtttaacaaactccaggtattatgtattatttccagcttattgttaagtaaaagaagaaaaataatttccttccagagat

SEQ ID NO: 23255 - DNA, 2862 bp, Cannabis sativa
  modified_base (906)..(911): a, c, t, g, unknown or other
  modified_base (1974)..(1974): a, c, t, g, unknown or other
aggatgttaatgaaacatacatggttacatggtagtaaatctagatcctagtaaaatatttccaacacaagattctccaagaacccaacaaccaagagcttaaatgattcaccgaaattctcagcccataataacaacaaattctcagctctaaactcaattaaaagcacaatagaatccctaaaataatttcaagaatactacacaagcatcctacatcaatttctaactcaatcaagcataagatatcaagattacaccaatatcaacagacatgcattctaagaacatctaaagcaaaaaatcataacattcatcttcaattttagcaacctaaaaccaagaatcaaaggtgtaggaactacctgaagctcctagcaatgatcaagccacaactcctcaaaatcaagcttaatccaactcaattctcaagcaaatttacaaatttagagataggtttagagagagagggagggtcagttttgggtgttggacaaccaaaaattactttctatttttacaaataattctcttttgatacaaataatccaaatgagcgaaattaccatagggcccctatggccatataacacacacaaaagcatccaagggcaattttttcattcacatcacaaatatacccaaataaatttcagattaatcacttaaaatataatgccaataaattatcccaaaattgtattttggccccgaacccggttcggccctaaatacccggttgtgactatagtgcgccaacttgtcagaatacacatgaaaaaggacaaaatagacatactaaaatgcccttctcgggtgactatactgcgccaacttgtataatagtataatccataagaacgtaattaaattaaattcatagttttacccttctcgggtcaaaannnnnnaaatgcccctggctcaccaacacagtcttaacatgtcataaataatattaattaacatataatagattatacaataatataattccataataatacacaattaacttgttagggtttgctaatcaattttcttaatcatagggtactagaattaccccctccttatagaaatttcatcccaaaatttacctgaacaactcaggatatttctgctgcatatccgtctcgagttcccaagttgcctcttccactttagtgtttctccataatacctttatcagtgccattgtcttattcctcaagactttctcccctctgtcaagtacttgcaccagttgttcctcgtatgataaatttggctaaagttccaatgcttcataactcagaatatgggacgaatatgagatatacttcggaagcatcaaaacatggaacacatcatgtacagctcccagcgctgggggcatagccaacatgtacgctacttgccctatcctctcaaggacttcaaaggtccaatgtacctcgggcaaagctttccttacttaccaaagcatttgacgcctttcatatgcgatactcagaaaataccatgtcgtcaatctaaaaatcaatatcccatcgctttggatcatcataactcttctgtctgctctgagccgcgagcattcgcgctctgattttatcaactgcctcacttattctctgaatagcctcgggaccaaggaactttctttcacctacttcatctcaatgaataggtgatctgcacttccttccatacaaaagatcataaggagccatcccgattgttgcttgatagctattgttgtacgagaactcaaccaggggaaggtactttacccatgatccttcaaaatcaagcacacatgcccgaaccatgtcttctaagatctgaatagtcctctaagactgtccatccgtatgaggatgaaatgctatgctaaacttcaactgggtacctatagctcgatgtagagcctcccaaaattttgatgtgaatttcgaacatctatttgaaataatggactttgggacaccntgaagacgaacaatttctctaacagataactcagcatactgatcagtggagaagttcgtcccaacaggtaaaaagtgcgctagctttgtaaacctgtccattatgacccacacagagtcatactctcttgtggctctaggtaagccaaccacgaagtcaatagcaatatcttcccatttccactctggaatattcaatgactgcaacaaccctacaagcctctgacgttcaactttcactttctggcaagtaaggcacttagcaacatactcagcaatatcactcttatttcctaaccaccagaacatggccttgaggtcttgatacatctttgttgactgtggatgaattgagtaaggagatgtatgagcctcattcataatctctctttttatgtcatcatccataggcacacaaacacgattcataaataataggattctcgtatcatccactgcaaagtcaccagtcttcccagccgaaaccctatctcaggatttcactaactctggatcttgaaattgtgcttctctaattcgctctaaaagagtagattatagggtaatattagccaactgccctacaaccaactcgattttagctcgggtcatctcatttgctaactattgggagatttgtttcaatgtatttatctgagtctggccttttctactcaaggcattggcaacaatgttggccttcctagggtgataaaggatctcacaatcacaatccttcaccaactctagtcagcgtcttcttctcatattcaggtctctttgggtgaagcagtattttagacttttatgattagtgtacttctcacatttctcgccatataggtaatgcagccaaatctttagcgcaaataccactgctgcgagttct

SEQ ID NO: 23256 - DNA, 2155 bp, Cannabis sativa
cattattacaattttattaagttttgtgtgtttgtttggatctcaaatttatgtttatgttttaagcttgtgtttatggattttaagtttaacgttgaaggacttttaattttagaatttatcttgaactatcaattatggaataaatttaattttatgttgttttaatttaatgtttgcaaatattaattttgattatatataattatttatttttgaattttttttaataaatgggtccccgttatggtgtccattactgacggggattccccgcccctttccccgatgggaaatatagggggaagggacggggacgcggaaaaatataataggcgggtacggggcagggaatgtatttcccacattgtcccatccccatgtgcatccctataggctcaaatgaaaatggttcaaaaattcattggcgtgcttggcacctgctatgtaaaatgaaaacagattggggtatgggcttctgatcttttgagcattttaatcaagctttactagctaagaaagcttgacgcttcttggaaaattatgattccctcctaagaaaactgttgtagagtcattattttcccaataatgattttcttgagacacatcatggttgttttccctctttgacatggaaaggcatcatttagggtagggaatcgcttttttgaaaggtttaagatggaagattggtgaatggagattggttcgttgtgcacttgatccttgctttcctgaacatgattctttctttctgattcagcattcaggacccatgaatggggttgtggaaaacttgataatggatgatcgccaatggaatgaacccctgctgcaacaatggttttcccagcttgatatggaccgaatcttgaccttacctttgagttttttctgcaatgatgatatccttatttggcaccatcacacctcaggtgtttacacattcaatcgagatactatttggccacttctattgaagaagctcatgacagttcaagctccacctccccctcttcttggtggagatatttttggtctatacagatgccacaaaaggtaaacaaaatttcttggcgagtttttcatgatgctttactagtggctacatcttaagtcaagcaaaaaatcatcaccaattctacttgctcagtctgtaaacaagcttggaagtccattggacatgcactctttggatgcaagtatgccctatcaataatactaacacttctacgcaataactctaccaagggcgatcctattacatgaatagcatctgatacacccgttataatttttactgcctaataacctatttggtcccaaagtaaggaataaccaattacactaaaagatgcagtcaatacacccaaaaccacacctataactcgagtcaattcacgaggtcttttaaaaccacctgtgagatacacacaaaatacgtggaaaatcatcattagtaccatcatacttgccgaccatcaatgaactgatcaaattaaccagccaaagttaacttcagtcattatacattgaacataagtaaaagcctccccaacagtcaggcaataataaaaagtaatagcaaaccacgtagctacttgttttaaaaaaacaagtaagcgtaattcttcctagacagcaaaatatgttgacatgacggggaacatatttactagttctataatctgcaattgcttgaatctcaagatgttctttgaattaatcatatattttattgagataggtaagccaaaaaaactccccctttaagaatcgtaaatcatcactaattctacttgctcggtatgtaaacaagcttgggagtccattggacatgcactatttggatgtaagtatgccctatcaatatggcataatacacaactgagttttgattggagtaagtcatccactatgcataagggtgattatttggtgcatctctcaacaatttataccaaagaagagattaaacaaatcatttgtatgttgtggccaagccagctctagttcttgcttcgtttgcagttacatatttgtagaatttcagagctgtaaaaattaaatatcacatgacgtttgtgcaaccccaaatctctccccactgactactgttcaagcaccgtggaagccgccagctgaaggtgat

SEQ ID NO: 23257 - DNA, 3240 bp, Cannabis sativa
tatatatctatataaatatatatacttatatggaccacattaaaggattctcttctgattatgcaacccaacttatcatgaatttatatatgatcaataccaaattattttgattcccaaagcatgatctctatctctttcttaatttttacttaagtcttggacacatgcaccacattagtattagtattatttacatgtagtgatattcaatactgtcatgagttagtattttaggtaaaaagaaaaatgttaaaagatatcaatagtgtttagcatttaagtaatattattagataaaacgatatatctagaggtgttaagtactaccaatacataataataatgatattttatgagtgattatttgacatatattatccattaattcttttttctttttttttttacgattgatgcacactatactcgtttctaatttactaattaggtactacttgagtaaattaatatatattaattaactagctagttacataaataattttattttaatagttttactatgctaacaccccgttttaaatttttattggatattttctcacgaacttataaagtttatatataggtacattactttggttgtttcttgaaatgaggactgaccttaatacaaaccaacataaatattttcagcgtattttgtcatcactcgcatgcttctttagaaatcttctcatgaggttacctatcccaatattactcaaggtcaaacacgcttaactttggagttcacaagtgataggccaccaaaaatgatacacattgttgttatcagtagtacccattaatctatttaagtcattttcaactgtatagtctcatatatagtcttacaacaatcatcatacttgaatttttcaagcgatataggattgcataactcctaatctttctccttagactacgggattatgattgtcacatatatatactcacttacactttttatatgtcctttccacaaaattcacaacctaacacaacactactagggtatattttcttaagtttagtgtttgttttatattgccaaaaaaagaaataatagtggcgtcttcacaccctcgattcaacattattttaaaatttaatttattgagaactactataaaaataatttctatttttaagtgacatataaagaatctgtctcggttggtgtaaccaacgttataatcatagatgcaaatgctgatatttgttaattcacttattaatgctaaaatttttttacttcggtttaaatagtaatgtactgacgcaaattggttttttgctttggttatgaattgaagtaaaaaaataaaaataaaaaataatccgaaccaccgcaaccataccatcgcaaccctgaaaaaaccaacattaggttaagaaaagagagatcaaaagagggagaaagagagagataaattgaaagaggggaagagagatagattagcgtaacatcgtaagggctccatgatggcgatgatagagctccaacgccacctgcaaaaaaaaatgagaaagagagttagagtatgagatctatgggttcgtgcttttgggctgggtcgagaagaaaggaataagacgaaggtgaagatggccgaagttagacgacgccgcgggagagttggcggtttagtcataacttagagagagggggcgactgagaagggttaggttagaagttggttttatatcattagggttaggtttttttaaatgggcgttgaagcccataattggttctctctctttttttaatagcttgttgcgtcgatgcaaatagtttatgtatatattttttaatttcatcttttgcattagtttttgttttagtgtcgaatatacaattgatatggtgaccaaccgaaacaaaaaaaatgaattaacttttgcgttgatcaacaaatttgaataaatgcattggccaatgcaaaaactcacttattatgtcatgaactcataaaataaatatgaattcatccatcttatgattgagcacatgtttgtcctaataaattaaagctctcaatgacaatctagcaagggatgaactcaatcatccttatactagtaatactcttttggaaaatatctagagaattgatattaacaccaaaattgagtctatagcagcaataaaatatttaaatcttcgtgactaaaaattaaaatcaaaatcaaacaaacatataaaaaaaataaaaattagaagtatagatcatttcctttgtcttgtcatcatggtgtggcatagtgacaatagtggtagttctttttgaaattatacacattttcattttgttcaaaacatatagtacttttgtataaaatatattatcattataataaatatctggccagaatatgggaatggaagtgggaaacgtatgatttattatttcatctctttcccttttttcaataataataaatttcctaccaaaaaagaaaaattcccattattagcaaacctaagagtgccatttgtcatcatcctaatggtccacgtggcacacttagctgccgaaagtgggtgcaaaagataggattagatatgctagtatgtataagagtccccccaccaagtcttcttggcttgcctataataattagggtttttaattttatatatcccaaataaaaaataaaaaataaaaaggagagatgccctagcataattggtggtgctatatatttatttattattttaaattgttatgtagattgagagcattgatacgtcactacctttatagggtgacatttcataattagttagtaatatttcttaaaaattatttttttgagttatataaaatcgaatacttagttatactaataataatagggcaccgagatggtgagcatctagtagtaccttttagtaatcctttttaattagagtattattgttaggcattaatattgtttagcaccttctagacgtgtcaccttataattagttagcaattttccttaaatattaattattgcattgaattatattgtattcgatacttaattacactaaataacgatattcacataaaaaatactaaacactactagtgttttttaacatttctcattcaattaatatgaaaattaattcaaaactttattattatctattgaaaagttttattagtagttggaatttcttgttgagcatgctatcctttaattatactcttacaatctcacacatttaatatgtta

SEQ ID NO: 23258 - DNA, 2238 bp, Cannabis sativa
tggaggagaaaaaagaataccatcccttcgattgcgttccaacctcctctcgtttgccaccctttcacattcaaattgatcctcacgttccctttgctctctaacctgaatgcgacgatattgtcacctacgtttttctcttaattggatggtttgacattcaacattgacaagaacacgaagggagatgttatttccttcgttagcatataaaacttgcagcgaatctttattcgtaagcgagctgctcactggcctagctcgataatgacacattattctacaaacttgctcatcatggcttggtctattatgcatagtgaaagtacgatgacagtttggagattgagctcctaagtcagaatcaaattcatccacactggaggaaaatgggagtggataactagaattattagacatatataacttagaagagaagaatactctaggattaaagaagaaatatgaacaacttaagaaatagaagtttacttttatagaccagaaaagttgttggaaaggtggagtaataaatgcttaacaataattagcattaaatgcctaactttatcaatagtatgtcgacagttttttgatcatttttatagcgtattagcaatgactgtttttttttcatttatttaatgtttatatcgatggtgtgttaatagtttgtcgatattttatcgatgattgtgtagaatatgccaattaaattctggtttataatttgttgattgtttcttgatggtgtgtattaaatatatttgttggttttgagtgttttttttttaatatttttttggtttttttcctaacctatttttttttgtacgaaattgtaggatggactgtatttcttgttatatcgtacaatgatgtttggggtgttgagggttttaattggatttataaaggtgaaggcagtttgaagttgatggttaaaactgacataaccatacaacaattgcgctaaattttatatgaagagttggaggttgacctgttgacttacgatttgaaattagagatttgttccttatacatgaaggggcaaatggtttcgctagaggttattaagaaagaatgccaactaagagcattcttaaagatgagggaaacagtgtcgaacacataatttatgccattaattgtgaccaaggtaagaaaggatgagaatttggagcctaccccctactaatcctctctcttgaagtgtggtagggtctttctgtaacgccctaattaatggaagaccatgtgtcatgattacatagtgctaatcccgttaaccaaggtctaataagccaagtaaatttaaataatttaatatttaaataacataacaacttgtaataataataacaatctttattttaaaacaaaataatataattacatatatgggatcccattgttgaccttgcttctagccaacgacaatgagtcaagaaataaagagattaagtaatgtaattaaaagaaagcaagaaaacaataaggtaaaatgaacaccaggttttaaggaggttcaaccctgtaagtacggtaatagcctattccgattgtattgtattgacttgagagaaaaaaaagtgttcctcctcttgaaagctcttacaattgatagtgacgctaggtcactatttatagagacttaatgcatgagagatggtttctcttttgcttataatgcacaaaataggaaattacaatgattctataattataatgtatgaaatagttaactaggataggttgccatttttctctgactcaatcccatgattcaaggaattgtcttcgcttctgacacaacgagattagtctctgaagtcgccatctctcgtacgtcgcttggcacaaacatgttcgtatctgatcagacatcttctccacaatcctgcttggatacctgactattacagatgctggttagtcatttatagtttgctagggatattttcctccacccaggtatcaaaaatatgggacatgtgtcatccaattctattgccacgtcaaggtgcaaaaaacaggataacatttgccccccaagtctgcgcgggacctttctggtcgcacgtggacttcactcagcttggaatcttgtccagatgggtgacgcgtgtaaaaaattggcattaaaaattgataaaataaatggtaaaatagatttaagtggccgaccatggatgtggccccccactttgtaattttgccatttttctcagctat

SEQ ID NO: 23259 - DNA, 6223 bp, Cannabis sativa
ggacaaaaatccttattagttgagtttttatctagtttggcatacaagagagcttttttaattttttttttaagatcgtgtacgttatagttattaaggaccaactgtaaattttcgaaaaattctgagtagtttacaataccgaaaaaaaattatatattatattacaagtgtacgcatggtaagtaattgtttaaatcttatttttctactctaaactattcagaattttttgaaaatttacaaataatttaaataactatatatatgcaatcatgaaaaaaaataggactaaaatactcttttggacaccaaaatagataaagagtccacaaaaaaaaaagtaaaaaaaaaagttgaaaaatagtacaaaaaatagtacaataaaaaaatttgaaataaaataaataaataaaaataaaaaagtaaaatcatagaagaatatacattgagtaaatgattagcatttccttattgcatatcataagattgactgtatcaatccaaatgaacaatcacgatcgaccacagtcacatttccctctatattattatatatttagctaattaagatttttgccttccgaaatttgatatgtactaaattatattttctaaacttttaatgtcgttaaatgaaattagacaaaaatccttaaatctaataatctcaatagttcagggggaatttttaacagccagaaaagctcaaggagcatgatttagtacatattaaaatttaagaggtaaaaatcataattagcctatatgtttttatatatatagggtgtctacacatttagtaccatgcgttttatctaaatacaagtttggtacccaatatttttaatattaatgcttatttggtatggctgaaacatataaatatatatatatatcgagtgtgtatgtcttgtcttgtgacatggttgtgtacgctctcttagggtgtttttgttcattggtttctgtttgaaaagttctgttttgtcgtgtctatgcgagtattgtgagtttcaactatggcttccagtagtcgtcaaggtatagtggatgaggaggatggatctaacatatggttagattaagaatcagatgcagtgttggcatacgacacaaatgatcaaactgagaaagattatgatgattggtggtgtcttgttggaaggtttttgacagaaagatctatagactttgatactatgcaacaccttatggcctcgccatggcaacctggaaatgggatgtttgtgaaggaattaaagacaacccgatttttattcctgtttcaccatgaaattgacattcaaagtgtcattgaacgtagtccttggacgttcaataaattccttctagttttttcaagaccgaaacctaatgagaatcccagattggttgagttgaatgaggtggatttgtgggttcaattgcatgacttacagttagggtttagaactgctacagtggctaaagatgtggggaataacattcgtaaatttgttgaggcttatgagaagaattttatgggactttggagggactttctttgggtcagagtcactatcaatgtttctaagcctctcaaaagacgtatgaggcttcagaataatgttggaattgagttttggacaaacttcaaatatgagcatcttcctacatttttttatatgtgggattatgggacactctgacaaattctatccttggagattcgatgttacagatggtatgatggttaaatcatatggcgactggatgagagtttaactaaggcgcaccaatcatatgattgggaagaaatggataaaatagttcagggtggcaacagatgagtgtcagatgcaagaagatcaactgtacttaggccatgataccagaagggctccgacgggacagttaatgccaccagctatttcgaatcaaacaattgtgatgaaggagaaaataggggtcaaggatcacgtaataaagaggtagttattggacagaatagtgaatcaaagattggagagataggagggtggactgatgttgattgtgggcaaaataacgccattaatgtagatgaagatggtttgatggttgttgactcaaaaagacgtagaacagagatgggccttggtgtgggttcaaaagatattttgggaaagaggagttcggcccaagtttaaatggattcaaaaaatgtggattcggtgggttctggtttccaggcccaacaaccattatgagccttttatcatggaattgccatgggcttgggaacccatggactttacagttccttaaggatattgtgatccaaaagaagcccaactttgtgtttctctgtgagacactctgtagacgtgatcaagttgagaaggtgagagtatctttgggttttgatggtatggttgttgtgtatgtgaagggtaaaagtgggggtatagctcttctgtggagacatgaagaagaagtttctcttattcgatttgttgataattatatagatgtggaagttactgttgtgggacaattgaaatggaggttcacaggcctttatggtaaaccaaaccgaagcaaaaggaaggcaacatgggatttgcttcgaacactagctgatgcttccaatcttccctggtgcgttatgggggatttgaacaatgtggtgtctcatgacgacaaacaaggtggcaatcgatatcctgatttcttgattcaggggtttcaacaagctcttgctgggagtgggcttcaggatatggacttatgtggttacccatttacatgggaaagggtaggggaacaaacagttggattgaagtgcgccatgatagggggtcagttaaccaatcttggttagacatgtttaatgcagctaaactttataaccttgaagtttcgacgtcagaccattgttcgattttcatggacttgacttctgaattggctaatcctacaatttgaagatttaggttcgagaaagcctggctccgtgaacccatgtgcattcaacttgctaaggagagttgggatggttgtagtgggagtgatgtccaagaaaggtggcagcttgtagtagacagttgaagtgttggggtaaggagtatacatgtaattttaagaagagaattgggagatggaaaaaaaagatgaatagatggaagttcgggcgtgatgaaacatctattacgaatttcaaataggcaaaacacaacctggtcgaaacgtatgctcagcgagagatattttggcgtcaaaggtccaagcaattgtggcttcaagatggtgataataacaacaagttttttcatgcctcagcatctgctcgtcatcgaaataactccattaagaggctaaaaaattcttcagttcattgggtcgattggaagtctggattaatagatgttatgataaattactttatcaatctttttgcttctgctcataccgattggcgtgaggttatagctgctgttcagtcgcgtgttacgactactcaaaatgaagacttgttgcagcctgttacttttgaggaggttcgcaaagctctcttccaaagcatccggacaagtctccgagacctgacggaatgactccgggttcctttcagagatgttggtctgtggttggtaatgatgttttcaactttgttatttttttttttgaatttggctattttcttactcgtataaatgcaaccaaccttgttttgattccaaaaagaagcaaccacaagatatgggagatttttgaccgatagccctctgtaatgtcctatacaaaataatatccaaggtcattgctaatagactcaaaaatatccttcccaccattatctctgagacgtaaagtgccttcttgcaaggcagattaatttctgacaatatcatgatctcttatgagattatgcattatttgaagaggaaaagaagaggaagagatgggttcatggctctcaaattagatatgagaaagcttacgatagattggagtgggggtatatcagagctatgttagaaaggatgggatttgatggaagatggattaatttagtcatgttttgtgttagctctgtttcattttctattgttcatggaggacatgaaataggccctattgaagcttcacgtgggatcagacaaggagatccattatccccatatctcttcattctctatgtggagggtttctcgagtcttttgcgtagctatgaacaaagtgaattacttacggggtgtaagattgctcgccaagctccaattatttcccatatgttgattgcagacgataattatatttattataaagcaacgaaaaaggaagcctataacatcaaagagttgctacacacatttgaacagacatctgggcaaaagataaacttcttaaaatcatcgattttttacagctgcaatactaatactggttttcgtgatactatttgtgattttttgggtatctttgagtccgacgaaaatgggtcttacttgggtctaccatactcaattgtaagaaacaaaaatgctatccttggttttcttaaagacaagctgagaaaaagaatcaatggttgggaagggcggttgctatccagggtggggaaagaggtgctcttaaaatctgttgctcaagcacctatgagtgtattcttattgccagtcgatacttgtaaagagcttgaaagacttatggctaagttttggtggagtacgggttctactcaaactagaagtacaagttggatgagttggagtcgcatgtgtcgtcacaaacatgctgggggcttggggtttcgtgactttcgagattttaacatggctcttcttgggaagcagggttggaggttgttgactcatgattcatctctggtcgggcgtgtttttaaagcaatatactacactacaacaacttttctgaagtctgaattgggtgataaggcgaagcatttttgaagctaaagacatgttgatttctggtgtatgtcgatcaattggctctggagaatcagtctctattctgaatgacctgtggctccctgatgcaagtccatttgttatgtctaatcatcctgcattaattaatcaatctgttagcagcctcatgaaaattgattcaagaacttgggatgaagatattattcgagacctttttgaggatagagatcagaccctcattttttctattcagctaagtgaaaatgccttggaggatcattggtgctagaagtttgagaacgatggaggttacatggtcaacaatgcgtacagacatcttcaggtgctcaagggagcttggcctgctgcacaaccgacaaatctttggcatactctctggagtcttaaagtgccccaaaaggtctgcaattttttgtggagggcagcgtcaggttgttttcctacttgtgtacaattgcagaagagacatgtaccagtgagtataatctgccctgtttgcaatgtggatgatgagactattttccatgctcttgttgattgtcctgtcgcgagatcgtgttggaacgatcctttgtggatgttggcaatataactaatgtcgatttttacaattggctcctagtggttgtgaaccgtgggaagaatgatgagatggaggagttggtgatggtggcgtgggcgatttggagggcccgtaatgaagttgtatggcagcaggagagttctaatgctgcaagcattgttgcatctgcaagatcaagcctagatcaatataagattgctcaagaacgaagaggttattctctatctcatctggttgatgatgggaataaatctgagcaatggtcgaaacccactggtaacaagatcaaggtaaatgttgatggagctttgtttgttcaagaaggacgttttggtttgggttgttcagccagggacagtaatggtagattggttgaagcattcactctaggaaagttgggtctggtccaacccgaaatggcagaaatcattggtataaaggagactttgagttggattgatagacatgattggcaaaatgtcgttcttgagaccgatagtttaccgtgtgtccaagctattaaaagcaacattcctatgttgtctcaatttgggttacttgtgcttgatgtccgtgaattattattatctttgaattacgttgatatgtgttttgttaaacaatctgtaaacaaagcagctcactatcttgccaggagctcttgtttctcgtcagatcgtgcacttcaattagaggattg

SEQ ID NO: 23260 - DNA, 4705 bp, Cannabis sativa
tctaaagaaagttgtaagtactaacatttgaaaagctactaactaatcccattacctctttcaaagttaagtttcagtatattaaaaacacaaaagataatgtctcacacttaattacacatataaaagaagaaaatatgtttttgctgctcagaaaaagtcttaccattcagtgcaacttctgtgtgaatgtatgaccttggagccaccattgtaatctgcagcaactggtctgccattgtagtagtgaaccatctctccagaagcctgtaattttggtttggcaaatacgatgattattaacggatttagaatataaatggatagtgtatttatgagggagttaatgttacatgacaaagaaatttagatgaagtaaatacctctgtctcttcagaagaaagacaaaaggcacattgaattttactggggatgttttggcatctctgcaataccacatcaccagtcaaagaaagtttcttcactttcgatggatcagtgaaacttccaacatccaatttttgttgaatgtcatcagctatgtcaccagtagagtcccctataaatgacactttcaactttcttttgttcctcaatccatgatcacttgacttagcttttgctatactggaaagtttattggattccgtcatagattcagagggtttgatcttattggctagaggaactaataaagcagataaattagctatggcatcctcgtttgtttggcctttcacattagatgcttcttcagaatcattttgcatactgtcaagtctttgcctttttaagctcactggatgctgtatctggttctggacatggatcttatcactgctgctaccaggactctttgagctaagatccttgcatctctttttcttccctaaggaaataggcagttcagtgctagtgtctttattctcttcatctaatgtttcagctccttcagaggcagcacaaattttcttagctcttttgaaagtactgagcgtttcttgacctttattattcaaatcaacactaattccaagagcctccttagcatttttctcaggacaagtggctccaccagtttttttggccttcctacctctctttttagaactctgacaatcattagcatagttggttcccagaagggaagtgtcacacaattcattagtgcttccattgccttctttcctagctagcacctttttacctcttgttttgtctcttggtacttctttcaggtcttctgcttgaactgccaattcatcattatcagcaacctgcattgtaaaactattgagcatctcttcgcctttttcatttaaatcaacactaaatccaagagcatcctcagcatctttctcaagagatgtggtcccaactgtttttttcgccttccgacctctcttcttagaactctgacaaccttcttgatcattaacattgttggttctatgaagggaagtatcacacaattcattagtgcattggttttcttttttcctcgctagcttttttttgcctctttttttgtcctgcagtacttctttcaggtcttctaattcaactactaattcattcgtatcagcaacctccatattggaaatattgagcatttcttgacctttctcatttgaatctacacccactccaacttccttggactttttctgaggacacatcactccaactgcttttttggccttacggcctctcttcttagaactctgacaacctgcttgatcattagcattgttggttccaggaagagaagtatcattcagttcaatagtgcatctgtcatcttcctttctagctggcaatactttgcttctttttttaccctttcgtacttctttaaggccttcaccttgaagggccaattcatcagtatcagcaacctgcatttttatttgatttagtaaagctgctgacttaacaaaactggacattaaaatagacaaatatcaagtgggacaaaaatctgtacctgcgtcttaaaaggacttgtacacaattcaggagagcaagctctttgtgtccattcaaacatttcactatcaaacatatcagcaacattataggatttaccaggctctccttcctacaaaagatcagaaattgaagagaaaataagtggcaatttttcaaggtctgcaataaatttgttatatcataaatcatattacttagtcttagttgattcttgattgtttaactcgaaaaagtacattactaaatagaaagctagcataggataaataaactaaatatgcactcacttcaggggccatttctaacgagttttcatcatcagaatctttgatatcactgaaagcaggaatagctggaagtgacatattaatgaatggatctgtacaagtttgctgacttaaattctctacattttcatcatctctcaaccaaaagaaaggtgaaagattcggttcttcagataatttatcaacatctccaggttgtgaatgtggcacctgaattcttttcttggctggaaatgaaggttttgcatgaccagaatcaaaaacattaagatcagagttacatctttctattgatccttgttctttgaaagtgtcctgcttttctatacaattttggctagaatcatgtctattccgaatgttgcaatcatccacttgcttttttccatctgtaatgtggaaataacataagggaaaagaataacccaaacccaaaaaaaagacaaaaaaaaaggcattttgaaaaagaaaaattaaaaatgacatcttgccaaacttaagaacaagaacacctttataaacaaagagagaagctcttggttataatgaaaacaagtatgatgcatttgtactctatccttgtacattaaactaacctatgaaaaatgtatcaaagcttaggatcaaaattagtctttaggtagggagctaaatggttgttatgaagattaaaaatcataagaacataattaaaatgccattgtacatctgtgctcttacattattaaccgcacaattaatgtacacccttttttacatgtcaaatgcatatatataccagctatatatacctgatgatttagatgcagatgcattctgagtgataaatatattcattcccgaagcaacctccatacttttataaacgctaaccaaattatccatgtgaggaacagggcgaatctctgcatcaaaatgtaatagacaccaaaaatgataagagaacaataaagcttagctaaccagttctaaaaaactgatataatgcttcagcataaaagcttcaaagattcaaactcaaacacatacctctacgtcgatatggaattttacagacaggacaattggaatctgatttcatcgatttcacaatacacgaactgaaaaaaaaaaaaaaaaacacacacacacacagctaacatcaacaaccaatacaatgcaaaccctaaaaccaaaccaactaaacttgttctggaagacaaacccttacttgcagaaaacatggttgcaattcagtgtagccgcggaactcagtaagctcaaactacaaagaaccaaaaaaaaacatttatatattgtgaaaatgataagaacaaaagaaaaggaaagaaagtcgaaaataccaaatgggacacttgagctctctgcccattctttcgagatggttcggatccgccattgatctatttcttgtgttcaaatcacactttgtaattgttttttctgagattgaaaccaaagcgaagagtttttcttctttttctttcttttaaatattttcttttagtttttctttttggtgtttttgagtgtatatataaagccgccaattttctaaggcgcgcctaaagtttcaccgtgttttggttttggcgggttaaataaaatttttgttttgaaaagtggggtatagctaattaaaggttctgattttgccacgtcattaaatcttagtggcgatgcttacgtggcaagatcatagctgatagcttctccagcacaatcgaaattaatctcatttttaattgtgctcatgtagtaataatatagcttctccaacacaccattgagaaatgtggaggcaataagtttggcctatgtttggttgagtggaaagaaaattaatagaattgatgaaaaatattgaagggaaagaaaatgtaatggaaatgagagaaaagtatttttcattagactgatttttgactttttattttgatatatactaaattatgtcggttgaaattttaagattgttaaaaatatctcttaaattattgagattattagatttaaggttttttttttctaatttacgtaaaaaaaatctaacattgataaaagttcagagtgcataatttgagacatgtcaaagttcgagtgttataatttggtagatattaaagtctggggagcatgatttagtacataaacaatcacttaattaataaaattgaatgtagttggacaaaagtccttaaatccaacaattttaatagttcagggagaatttttaatagccacaaaaatttaagggacatgatttgatatatatcaaagtttatagggaaaaaaattacaaactaacattttcattaacttgtttagtattgacattgaggtaaaaaaaatagaaaaaaaaaataataaaaagagaagttctattttcacctcataaaataataattacaccttattattaaaaa

SEQ ID NO: 23261 - DNA, 1907 bp, Cannabis sativa
aaaaaagaaagagaatatttgattatttgttaataaaaaagaaaggacttaaaaaaatgattcatctttatcccatcatttagtttgttaaaaaaaaaaaaagacgacgaaaatcatattgagcaaaagaaagagttgttcaagaaaaaaaaaatcaacttcatcatgtatcaatgaagagagatacagatttcatcattatcggtatatgtgttaacacaattttaagaaataatcggtaataaaacagacgcagttaatttagtaaataaattgacattttggtttgtatgcgtaattaaatataagaatatataaatagaaaatgttgtacaaaacatgaaaagtaaaatcaatttcctttcgtagtctacacttggtaataacattaaatttaattctaatttctaattctatatcaactgatctttattaaaatttgtagaattttgatatgctttacattttatataattttttttgttatatatctagatgtgtatgtttatatgtactagaaatctcactcctcaatcttgaaggagtaaaaacccacaattgagaaatttcactatacacactctattataacaaattttgataattatccgtcaagaaaaagcgagaaattaagctctgtgttcgttctaaaaaagttaactttatttctttcatcttattttttgtttgtaatgaacacatttatttttttcataattactttagggtttttctatttgaattatttgttggtatttcatataagaaatagtgtcacattacataaattttttagtttggatttcttactaagctatagctgattagaatcagtaaaaaataaatacaaaatcaaaaataaaactcaaatcactacaaaaaagcagggtatgtaacgaggacaactatatcgcgcgaggacatgttatggttattggtattttcgcactagcaaaagaaattcacaattttttttgggttaagttcctgcaacgtggacatgtccttagtattggttctactgaggacatttttatttcattttatattttagcttctttgtcttccccaaacccacctaacctgaaattcccttaaactcatttcagaccaaaaaagttgagaacgtctgcttcccttcccagtgttttcttcgttctccggtatctctctcacttccggtggcttaatgagtgtttatctgatttaattttcgggtgctataagttagtgtgttgggtttgatgatgatttactatggttttcctcaatgtgtttatattatatgtttgttggttttccttttctttcccatttcaaatttggttatgattgttatatatggattagtaattctagttatttttttttcgttagatttaattgttgaaaattctttgattttaaagtattttttttaatttatgatgggttttttttttttttatttctctatttgtgagtaaattttagaatgaactaaaagtctcaaattttataccagaccacccacccaattgacaatttgattgtatatttgagattgtatttgtttttgataatttgagaatatgaaaataatacaatatattcaaaataaggagaatgtataattttttttaaaaaaaaatagatcatcattttaattttctatcattataaagtcacttttattgttttttttattcatgttgatttattgtttttacaaagattttattttgtttttaagaatgtattcttatttgctttttcattatgaagatttgattggttgaaatcatcgggtgagaaatcttctcaaaaaaatctactaagaaaaaggctcggtctgcttcctctggtactactaatgaacctactactacatctggccctacttttgctcctacagaaatagttgaatt

SEQ ID NO: 23262 - DNA, 3152 bp, Cannabis sativa
ttattgtaaaattttggtttttttgggttataagtttgatggcatggcatgcattgcatactaagattttacttcaaactagaggatattgtcggggagttactcattatgttgtgtgccaaactctagtttgtgtatggtttttaatgattatttgattttttttttttttgatgtgtttcctaatttaacttgaccttgaagagtttattaatttggaagtttttttttattatctttcttaaatggattaatttggaagtttaagagtatgactagtaaattgatatgtattattattattattatttatacttttaatcaagtaattgtgatgtctaaattatcccaaaaagtaggagaaaaaaaaatcataagaacgaccaatacattctttctttcttttcatggactgcaagcaacatcgtgattgtccagcaaattgatcttgtcttagtacaaggaccaaatcatgaaaaatctagaaaggaaaaaaaaaattttttttttttttgataaaatcttgggtatggttaaatgatcatattaaatgtcttgttttgaaaacaatattaaataaccaatattccaaaatttacgttaaaaaagttccataaacatggggtcatgcatatataaaatgatcatccaaaaaattaaaaaaaaaaaaattaaaccccaccaaaaagagatggattagaatttggtcaaaattcaacattcactattacaaacccattatatctaagtcatagttctataaaaacacaaacactattatggacaaaaaatagatatgttggttatgcatgacaacaataattaagattattaatttgctgctcataggtactgccgggtactatagcttagctacatatattattcgatccctagtcgatgtgggacaaaaaaaaaatgtggaagaagatgaagagacaacaaggactaaaattcaatcaaatacttcaaaatatatatataatacacaagtttttattgtaaaaggtgaaaattacagtacttctatatatactactgtataataatgatatcaaaatggtgttttcaggtacttgatagggacaatatttgtctatgactgagtgagcaagggggtatggattaatatcaagtcataataaataaataaataaataatagaaggagtcgatgagagaagaaagtgaaaaaaaaaatgttggagtagacgtgccaaaaaatccaatgaatgtatatatattttaggtttttgataataatttcgtttgcagaaccaaaaaataaaataataataaaaattaaaaaaaataaaacaaaaggaatcaggcgtggcagataaataatgagaatatccttgaattaggggaggcccgtacgtgaaatcaaagccattcccattttacatcatttttattctccatgcatgcaaatccatgtagcagctgctaggtggcattatcatcattttgtgtctacattaatatatatatatatttctctttgtattttcccaaagcatgcaaatcaattaggttttatctgtatgtattgtttgtaggtgattaattttcccaattatttttccttatatttagaagggtttgattttctcacaatttaaataattaataaataataattaatttaagcaggattagaaagaataaatattacagacgcgcgcattaattgttttatatatttatcctttttggacagaagctaatattaaagaatttggaaaaatattatcgatcgttgtaatttaaggtgaggctagaaataaaattgaggagcaattatatatttttatattattatgacgttaaaattttaataaaaaatatagaattagatataataaaatgtaaaataatacacaattatgttaaagtaagtaattatgtagagtgttgagtttgtgactttcttctttcaatgtttaaaagatgtttaaacaaggcgaggtaactcgatctaatataatatgaatccagtccaatatttacaaatttctgctctgaaatcaaatcaacattacatatttatagaaattataaattaccccaatacttaagtatattcactagaaaccacataaccaaattccttaattcttcactcaagatccccaagagttagatagttgaatcccttaagtatgatctgaacataatttgtcagaaaaatgctaacaattacatacaaatatgtttttgctgactacttaatactgaatgttgtggtatagtattgtagtggtgacttcattttaatgtactggttaaaattctcacttcttagcttcacttttaatgttaaaaaacataatatattattaaaatattatcattgatagaatttaaatcttgtgcaatgtaaattacatcgaaactattttgatataattcattaaatagtaatttatattttattatatatatctgagtatatgtagtataatatgggatggaattctaataacaaaaaaatatcaataatttgctatacaaaatttaaattaagaggacttaactgactttccgagtagaagtcttcacttataattatagcacaagagcttaattcaaataatggtttagtttcctggttgtgtatcaaagaatggaaaagtattagagaattttttttatttagttttttatgacaacacaacataagaattatgtcaagtttgattagcctaaacttttgtatcaacaaaacttaggactacaattattatttgacaactacatacggtccgacatccccaataagttgggtctgctttatctgtatttgtatttataaatttgatatatttatatatacacacatttcattactgcctttttgcccaaaagaatggaaccaaatgaattgtatttgtcattgtaaggtggtggtggagaagggtgtaaagttaagcagagaaacagtaactttgaaggaaaaggaagtaattagtgcatagtgggctttccaatgaagtttcatgagagagagagagagagagagagagagaaaaatcaaaatatacatctaagtagctagctgggctccttggcttttaatttaagacatatataatgtattgtatgctgaagattataccaataattaatccgaataatcatcatcaacaa

SEQ ID NO: 23263 - DNA, 2302 bp, Cannabis sativa
  modified_base (2255)..(2256): a, c, t, g, unknown or other
aataacaagaaataacaatgaacagtaactaactaacttttaactaacctaagtgactattaactaacattaagctcagcttaatagtacttgacatgtgtagttgaatattccaaatgagattcgtaaaacagaatttattaccgatatattatttgagcgatttgatggaagctcgccactaatagctgcataactgcaaatcatacatgcatatctcaatgagtgatatatgatttgtataaaagttataaattcaagaggaaaatgtaaaatgtactgattatactaacacgagcaaagagtcttccattgtggctgatagtataccaaccattccaacagtccaattcaatggaagaacgctgaaatcataacaattcattatttgacgttttgaaaagccacataaccctcttccttgtaaaacaatattaagtagtacattaattgtacacatatatgtatatataggttaccctgaatgaggtatacgcccaaaggttggtttaaaaccaaaaataccacaaagagctgcaggcattcgcacagatcctaatcaaacaaattaaactcattatgaaacaatcaatctctaagggttaaacacaattaataatataactacgaagaatataaatacataataataaatagttaaaaccacatttggttcgtaaagaatgatgtccgttggtctcacaaaatttgacacattaatcatacttcacagaaaatttaataaaaagaagttaaatttcaaatttttctgccaagaagacaaaaaatgtaaataaagattggtttgatcatatttgtagtactatacggggatgaggaatagaattcaggggaactggggtatatggacattgtaataaattgatgtgattgaaattttgaagttatacaatgattctttgttagaatgagagttagttatcttagttggtttttgttagtgtgtgagtcagttcgttcagttagatttgttattgcttaggtgcagattagtttgcttgtaactaattctattttccagcttgtgtaaagctttgtataaatcttgctgaacattgtgactgttaattatagaatcattcattcatctttgactctctttgtctttttttctctcaatttttcctctgtctttcttctttgttttcatacttcccaaacacaatgtctaagacatttaatatggtatcaaagcatggttttccactattactagctaatgtagtcacgaattaagaagatgaatttcatccacaagcaagaaacactttgaatcaaacaagtattgttcctactttgtcaaatgtaagaaaccaagaaattggtggatcttcaccaatttacttcaatcccaatcttttaatacttttgaatgatcacaactatcttttgtagaagcaatagttcctggcagctatcggaggaaattgacttcaagcttttattcaagaatcgagttctcatatgaaatacgtgacagatgaagattgagctgctcgcaatgtcaatcctgccttttcatagtgcaaacttcaagataaactccttgtatcttggcttctatcctccatgaccgagagcttgctcaccagaatgttatggtggaactctactagttagatctgggattacactaggaatatacttcaccttatcagtatttgcgaaaattctggtgattcgaactaagcttcaaaacctgaataaggatcgctcaccctcaataattatcttgtcaaggtcaaacaaatagttgatctagttgcatttgctggaaaagttcttagtaccaggtttcatgtggcaaccacattaatggatgtctattctagatacacatggctttacctgattaaaactaaagttgagacactcaaaatgtttcaaaattgtaaagctaaagttgaacttcaattaggcaccaagcttaaagtcatccaaacagagtaaggaggtgaatacaatacctatactaagtatcttaatgactaggagtcattcataaatatctttgctcaaccactcatgaaaaaatggcaaaaacacagtcacattgtagaaaatggaataaccatcttagctcaagcatctatgccattgaaattttaggatgaagcctttaaaaatgttgtctatattcataataggcttccaacacgtgttcttcacaacaagtctcccttagaggttctattcaattccaaaccagattacatgtaaagcccgcttagttnnatttggaaattagcagttaatcttgattaattatgaaaattattta

SEQ ID NO: 23264 - DNA, 4870 bp, Cannabis sativa
gatactacatcaattcaaaagtttaaagaggccgaaactaatctgtttaaggtgctgactcaaaatgaaatcttctggtgccaacgttcgaagcaattgtggcttcaagaaggtgaccaaaatagtaagttctttcatgctaaagtgacttctcgtcgacgatctaatactattaataagctgcaaagggaagacagtagctggggctaattaggatgtaggactttcagaggtggttgttgattattttaaatatttgtttactagtttagctagtgattctactcccgtgattaatgggattacaccatctattctaccccactaggagctatcacttcaaagtgcgattctatcgttgtaaatcagggtttattttagaaaagttttgtacagctataaaaatgtgtttgtagttgtctccatggtttctatgttatataaataagaccaagagagcatccaaacaaattcaccttttctaatttcattttctatattttcatctttgtgagaaacgagtttcatttgaaaaaacctaaaaggttcaactaggttttggttttcttgtaatgatctcttgttgttcatagaatagagtgaagagcttcgttgaacaagagaagaagtctttaggagaagaattgtccaagacttactttaagaggaagtaagcacactcatatcaacagctaaagggaattcattatttggtgttttcagtgttagcctaagatatatttccaagagggggtgaattgaaaatttaaaaaccccaaagacaattcatgtaatattcaagtttaatgcaataagaaagataatcacaagtataaacaaatagaacacttgaaatgtaaaaagtttagggatagaaatttttgttaacccaaaaacttttcctggtgatatggacatcaatatttgacacgtggcaagaaatatgacatcaaagagttgagtagacctgagtcataccaattggcctgggaggggtccctagccctgcgccaaggttgacttcgagaaattcgagatggaagtttagaatctgttaacttgttctcaactcactatctttaagtattttgtaccatgaagacatggagcaatcaaatataggcctcaggagctaaaattacatgaacctgcaccccaaaagtcaacctcggcacctaggtaccggtcgtgagaaaagagcttgtgccaatagtaccaaacttcagccaccaagaggtagcaaaagggcaatctaacagagcatgggaagtggtttcaggatggtcttgacagataggacaatgatgagaaataatcacatgtttaatgacaagattaaggcaagtcgggagacaatcggtcacaacacaccataggaaatttttaaccattggagggatcttcagttgccacaaatctttctaaaaaccagagttatttactcctggccgtggggccttttgatcttgcagcagttgatatgcactttctacagagaaatggccatgtttttcaccagaccaggaccatcaatcatccacaatgttcaaacttaaaggaatgacgagaaccaaatttgcatctcgagaattgaacatgtcttggactaggtcaaagttcgacctacgtaaatcaaaatcaaatagagaacaaaccaactgattatgcagaccaggattggaagaagtcacaaaggggttttccttgtctgggagccaaggatggtgcaaaatagaagtagaagtacctacactgatagtacgtcgagccccgagttttactagagcttgaacactccgaatgttgcgccaaatagattgtggcctagctcagccgtgatgaagtctgaatggggaaaatactatgctttataaactcgaccctcaagaggattaggattacatagaaatgccatccttgcttagctagcatagcaagattaaactcatgtaagtgactaaatcccatacatcccgaatatttatgagtagccatacagtcccaaacatccaaattatgccattacctttacttgaatttgttttccaccaaaaccgtgcgataagcttctcaagttcttgacaagttccagttggtattaaaaatacactcatggcatatgttggaagtgattaaatgacagttttgaggaggatttccttacctgtccaagaaaaaaactttccatgccagttgttgattcggttaacaactttatttttgaggaaaccaagtaaagctttcatgttttgaccaataatgttaggtaagcctaagtagaggctcccttcagatgcttccaccatgccaagagtttaacatatgctattacaaagagtatactttgtgtttggactgaaaaaaatatttggctttgtggcattaatcttttggccaagtgcaagctcaaaagaatgaagcaattaaaataagcacactaggaccagcccctatggtagcttgacaaaaaaggtagctatcgtctttaaaaggcatatgagatagaaggagccccatgagcaacccaacagccttgtaaaacacgttttacttcaaacttttggatcaaagaagataacccttcaacacaaatgattaaaaggtaagttaagagcgagttgccttgacgaatacctcgggtgggaacaactgtccccataatatttcctccatggataatagaatatcgaactgaagagacacattacatcacaagatttatccatctatccgcaaaccccatacgagtcataatgacacaaaggtaatcacattcaactcgatcgtaggcttttctcatgtcaagttttaaagccatgtaaccttttctatccttcgtcttgcgcttcaaataatgcataattttgaaagccaccatgatgttatctgagataagacaacttggtataaaagcactttgagtgtctgatatcacatgttcaatcaagtttctcattcggtttgcaaggacctttgaagccaccttataagaaacattgcagagagcaataggtcgaaggtcgctcatggttgagaaacttttcttcttaggaatcaagacaatatttgtatcatttatgcctattggaaaaagtccccgtatcaaagaagtctttaacaaattgaatcatggcccacaatatccaagtgtttttgatagaaggccaaccccatgccatcaagcccagggccttattgggatgcatttggaataaggcttgcttaacttttttagtttgaattggctttaataggtcttcattctgtaagtcattaacaaaatatttcactccattaccgaccatatttgacagtgagccaccagcagaaaatagatcatcaaaatagttaacaatggattgatcaagccctgtatcccaacccttccaaactccatttgaatcttgcaaagtctgaatctagttgtttcgttttctggaattggcataggcatgaatatatttgctatttttatctccagcatgtagccaatactgtttggatctctgtttctagtaaattcttgttgggctaaaattttgaagtaagtgttctgctcaatcacaaactcttgtgtagagacaacatcagattgattttttaggcaagataaagcttttttcttgcaattaattcgttttctaaagctaccagtaagatctcgaccccaagcttcaaggtttttgccacatatttttagtttttcctaaagaggaagatggttgtttgattcccaacaatctttgacaatttgagcacatagaggctctctggacgaagcattctcatacttagagtggtgagtaaaattctcagtttgattaacattaggttcaagcagaatagggggtatgattagatggggaaaaatcataatttgacaaaatcgcatttcgaataatatttaaccattgatcaataacaacaactttatctaacctggtttcgacacacttagtcgtgtctttccctcgtgcccaagtgaaaggataccctttaagttctaactcacgcagctgccaatcaagaagaagaacttgaaaaccttctattagagtatttgggtatgagcgaccttttttttatcatcttgagaggcaatattattgaaattgccaatgatacaccagggcagatttgttgtggttgcaagcgtacgcaatagagtccatgtagtttgtttgagagattgattggcttctgcatagaagctagtaaggcaccatcaaggcttactaggaacttgaatttcaatatcgatgtgatgtgcagagtaccccaataaataagcatcctcaaattttttctagattagagctaaaccttcctttctaacatgggcctccacagagtaacaaccctcaaagcccaagcgagcctttaatcgatcaaccacatctttcttacacatcctttcacacagaaataaccaattgagtttcttttgaacacaaatatcctctaggaattaggtagcccatggattcccacgtttacgacaattctaactaatgatattcataatgattggtgggcctgaacaccaaaacccacctttattctctttttttgaagcccagtaacatcatcaactatcgaatccttagcatcttcaattagcaaaacaatggacttattatcttgttccataccatcaccattcaaaaattgaggcccattgggagagttaggcctaaaacgtttctttttagatccattacatttaatttcttatcaaaataaaaggttgacttattaccatgaataacaatagatggctcctcaacaaaagttgactatagattcttgcccctgaaatcatgtggttgatttccttcattaattgtaatatctgttggaaattatttta

SEQ ID NO: 23265 - DNA, 3068 bp, Cannabis sativa
taaatttcttgatacattctcatgactactacaagtttaatgaggggaaagtggtaatgaaaattgattttcttgcaacatgatattctctagactggttgtgcaatccaagatattgaacttagagagatattacagtttacatagctactgccagtgagaagaaatatcacactatttatttagacgaagattagattttgatttggcctttattacttttagccacctcaacacacttttatgttgtgtgcagcttgaattgctttgtggcacatgatggtcaatctatgctgaattttctcctgattttacttgtttataattttataaagaatgtttacacaatctatcagtgctctatcacattattgattactaattatacctgtatgtgtgctcttacataatttctaactgccatgctcaattctgatcttttcatgtgatcttcaacttcagattttctttattatttttatgttttctggaggacagagagcctagttcattatttaaattgttctaggagaataaggccatttggatcttaatgatgttgctatctaataattaaggctttttctctatatgaatgtgccaaagaaaactgtgctgagtattgttttagtagaatatatttgtcgtagtatggtaatcctattaagagagcctaaatagctatactaaatgatgttaaaacatggaatcttgtctgtacttgaaaatatttgtaaaactgtctttgctgctggtatgttgtattccttgtctacataattggtaggatttccggaagtagtgttagcaagaacttgtagggtaacaattactataagtaattttatttttcatgctgtgttcctaactgtcgtctgtctgaacttcttgcagagctttacacaaagaaaatgtttcagttgctgcagtctgcttattccacaataagcatccaagacactgctctttttctaggaatgaatgaggataatgctacaaattgtaagactcttttctttctaatatggaaaaaaattagaaacaatcaatgtccagaatgattccacagtgcctctatccagatgctcttttggttaaataatctctctgttttttttttttttttaattttttctaaacacatttaaataattgcaaataaagaaacttgatatgtgaatagtataccaaatctaagaaagtaaactttactatgtttggctacgcaatagagtcatcgttgattctatattaaggttgtttcaagtcccaatagcctagaattatgtatggattttttgatcctttgattgtgaatgaaccaagattcttgaagaggctctggcctttctgaaacaaatatcataatttcgtctcgggtagcctcaagttttgttattgcactagctgcagctgtgcaacacactccaaaattaattgccacatatatatatatatatatatatatatatttatagatctgcataaccttcacagctctctcaacttttagtacgtgtagttaactttactctggtattgactccagtggctgcattacttaataggatggttattttgctttggtgtcagatgagaggcctatgttttttccaatttcacaaccgaacaaaatttaagaatatgaaaaatacatatttcttagtgcctatcttaatagctaatataaaagcagcctttagaagaccaaaggaaaaaaaaggaaaagttatattaagacttatgtccattaaactgacacttaaatccatctgttcacatgttggccatttgaatttcttcttgttttgcagtaattaacattagaaacagaaaacattttgatgtatgctacttgcaaaaaatatttatccttagtattacaaagtagctgtgataattttcctatttcattccttctttcggtttctatgctgcattaatatttttcttggcgacaaataatctttttactatatgagcaactgcttgtccagatattttgatgttaagcttgaatacttttaggtttgttaatggaatagaactaggccatgatttattatctgccttcaacatccatatcattgcaatgtagcttacgaaaaattgacccgtgttgcagatgtggtacagcaaggctggattttggatgctgcttctcaaatgcttacagtgaagaaacaaccacttgtgaaagagcagaaactagaccccagtaaattgcagaacttgacagaatatgtgttctacctagagcattaaaggagattttttttttcaagagttcagctactgccgatgaatttttttgatgcaccgaaaatcattgaattttttgacaattttcttaagtagtttgaggagttctggtaaatatgtagcatttttactttgatcatgttgaaatcattgagagatttactcaattcttatctgaatttatcatttttgttggttattattattattatcatcactacatggaaaaagttaaaattttgattaaatggcaaacgtactaagccaaatgtctagtcaggctcatgcaagcgtgcttgaagttggtcacattttcaacttgcacatgccgtgaacacaccctgttttaagccacttttgtcttgcttttgttatacatatacatatacagatatattaatgtgtagtagctatcatgctttgattattagtaccccctataaaaactatcacataaatggctgaaaaattaaagagtgcacatataaattatactcaaattatactagttccatttattaaagtaacttgtgtgtaaagtttctgcacatatttactcaaaactagaacaacaaacacaatgtggtagtaggtaagtgtgtagtgcaggtttgagtggcgtacagcttatggcaatggaaggaagacttatttgaagtcagagtacatagcagcagcctatggtctcaccactgcctatttgacacctcttgtgttgaggtcttgaccagttcagattttagtcaattattggataatcccagtcaatggtcaagtcatggatcttaatttttgattaaagaaaa

SEQ ID NO: 23266 - DNA, 1104 bp, Cannabis sativa
gattaataaggattgaataccgaataactcataagtgttttaccactaataacttttataaaataaagatttaagataactagaaatgttaaaatataccataactatggtagaatattattaactaattttctaactaaatgatcgatgtaaatcgtaatatatagttacacttaccaatataagacttaattaagagagaataattaataatgatgagaaagaaagagtatactcacggagcttctttggttgaagatggtgaaaattagatttgagagtgagagcagagattgggagaggttgttgtgtattactattaccccaaaatgggtttgacaaaagagatgaagtggccactgttgtgttcaagctcgccatagctatatagtacctactatatttatatagcatatatgcaaagatatatatttatatatacacactactagagtctacaagagagaaagagagagaggaggtaggtatccgacaggccatgtaattaatggtcaggataagagacaagacaactactgttaattcattcatttttgttaagaccaaagttctgacatttatataaataaagtaattaaaaataataaaatttttaaaacttttttttctaaagctttttaccattctagataggaaaatttctcaaaaaattcatatagataagttcccaattttcaaaaatagcggtaataattctcaatgtcatattttttatttgtccgttcgtcttaattttaactgagccatttattttttttaaattgacacgtgttgaaatattattggtctaaattattattttaattttaaaaaataaataattttaaaataatttctttttttctttttcttttctttattttttccttttctttcttttcttctttcttcttcgtcttcttcttcttctcgtgccagaaacccaactccaaaccagcaccaccaccaccaccaacccccttcgaccaccatctacggtcccctgccattcaacctagctcttcgactagttcccaatcgacctagagcccttcaattcttcttcctcttcttcgtcttttttttcttcttcttcacacgaaa

SEQ ID NO: 23267 - DNA, 1656 bp, Cannabis sativa
  modified_base (1144)..(1147): a, c, t, g, unknown or other
atatatatatatatattataaaagtcaaacagactttactgaagacctgtttatctttctttctgctctcttaagagaaaatatataatgaggaattagaaagctttaataataacataaaattataaaaacctctgcatgttatatggacatgaaaacttgtttacaagagagggcaggacttataaaagaaaaattgatttaggataaacagacaataatttggagttcatcagttttctgaatgctgtaaaacatcatttactgatctttgtcgcctgtcacgaatgctagattttcgccattcattattgcatcaacttattctttctgtctgtgaaaatgttatggactagtacgatattccagaacttctatttcctactttcagtcagacagatcatacttttgtaattaattgaatttgtattcaaactattgagcatctttgttttgctttatgccttttttatgcaggctatggagtttggactaatcgatggcgtgttggaaacagaatattagtttcttactgatttgagtatttcaacaattcttttctctttggcattctagattttatttcaacgaaaatttgcagatatgtggtctttgcaactgaattttaagtggttcccgatagtttgaatgccgcttccatgaattcggcttagcaatagcattgtaatgaattattctgatatgaactttttacaattgggatttgttgatgtcatggaatctgttgcaagtattgtgttttttacttttttttttttgtggtaaagcagttggttgtgaagaagagtagtggagagcaactatattaattggagggattaagattttgaccctaattaaagcggatgtttgtttttgtattatgttttcttcagaaaatacacattgaggtgcttataactaagtagtcttctcttctatcctatttttctcttatttctttgttttgttttgggtaaatattattttagactctgtgttttgcaaaagttactaattgtattctctgttttgttaaatgacaaaatggaccatgtatttttcaaaatagtaaatataagatcttgaactgtttttttgtcaaaataaaatttaataattatccgatctaaatgtgttatgnnnnaactgtttacattttctgtatttgtttgtattttcaagttggttatattaaaaaaaaagttatcaaaaattaagaacagagtcttatttgtactattttgaaaaatacagtgtttattttgtcatttaacaaaatagatggttcaattggtaatttttgcaaaacacagggtctaaaattgtatttacttttttgctttcatgaatctaacaaagcttagatagattctctgttattggataagaaacatgttcacaatttaactctgctaatccaagtgttattggacaatttgaattgtaataatgctggacaactcacttgaagggctgtcctgagctgatgtgatatttgtgatacattgatacggatacttgcgagagtcaaggcggagctagaacgtagctacgtacctttaggacactttaccttgttgtaggctgtagctgttgggcctacaaagtgtgagattaatccacaatctacataaatcaatgatgaggatgatg

SEQ ID NO: 23268 - DNA, 3071 bp, Cannabis sativa
ggatctccttgtcttaagcccctctgaggttggaatttcttcaaaggagtgccatttaggattgcagaataagttactcctgttacacaagacattattaatccacaacttttttcatcaaatccattggcccttagaacctttctgataaaagtccactccatcctatcataggcgttatgcatatccaatttgattgccatcaaacctcccattcctctcttcctccgaattgtctgaacaagctcttgggttaggattgaggactcagcaatccaacggcccggaataaaggccgattggaagggagaaatcaaatcttccatataaggcctcattctgttgactaggattttggttatgatcttatatgggaagttgcataagctgattggcctgaactgctccatacgcctaggattgttcacctttggaattagacaaatgaatgtgtaattcaacttcggatgaacttcgcctgtggcgaaaacttcttgtaccgccttgtagacattactccctaccacatcccaatatttcctaaagaaacgtcctgggagtccatccggtccaggagattttaggggatgtatgctgaaaacggtgtctcgaatttcctcaatcgaggggattctagtcaaactttgattttcctcctcacctattttcctatcaaatagatcttctagttccattgaaatatcaggttggtcagaagtgaaaaggtttttgaaataatcagtgattatacctgaaacttcattgatgttttctttcatcactccatctttgtcttgaagagaccacacttgatttcttcttctacagattgaggctgccgcgtggaaaaatgttgtgcttctatcccccagtttcaaccagtattctcgagagttttgtctccagatggactccttcattctccatgtgtcttctagtttggcttgaagttgatattcttccaaactaagatcagctgtaatttgttgttgttgtatccattgtaatcgtctttccaaagagcaaatgagttggtctaagtcgcccactttttcttttttccatctttgaagagccttccttatgctgtcaaaatttctcatcaagcttcttgtgttctcttggttctctttctttcagactttgcaaatttcttcacgacacgaagcttcatttgaccatgcttcatagaaacgaaaaggaatgtatcctttgttcttgaacatagccgtatctagcgaaattggagcatgatctgagatagtaatgggaaagttcagaacccctgcttgagggaattctgatgtccaatcaaaggaacctatacagcgatctagtctttcccagattaagccaccattaaaccttttgttttgccaagtgaattggcctcctttgaagcgaaggtcaactccacccgatgccaaaaggaattcctcgagccatcttgtatcatttataaaaactttcgatcctcccattttttcctcctggttcataatacagttcagatcccccatgactagccaaagctccccaccgttcttaattctgaagtttaagtactcccaaaactcctttttttctctatcataaggagggccatatactgcaaagagccgccactgggaattcaattggggatcctggattgatgcttcaaaaatattgtagtgtagttccttcatctgaatcttgacttcattattccaaagcaaacaaaaacctcctgccaagctttttgatggaattattgacatcccattaaagcccagccgtcttgccacactctccatctttcctctatccaccttagtttccattagaaaaacacactcccgtttgtgttttctcacccaagccattaaggcttggtttgtcgggtctcttgcgaggccccgacaattccacgaaaggatcctcatttgggcgttgggggcttgataagggccgcctcctcgcccgtttgaatgttttgttcacttgtaacattgacttcaatcaaattcagtgtttcttccaaatttattgcagtacttccctcttcatttcttgctgtgttttgttgtttccttgaccgtgatgaagtcttggagcctgcacctcttcttctctttgttcctcctcgagttgcagatgaagaagaagcacccgatcctactttgaatggtgtatcaactggcccgggagaaaatggtggtaactgtggagcttctctggagaactctcgtgtattatattcagtacgttgaacataaggaaccaaagtcagacttgcttttcgtttcctttattgtgggcactcgtggacttcatttgagacatcaattgggtcatgaaatagggtgggaataggttcaaacttatcaattggggcagggcccattaattcctctgcaagcccaatctcttcagcgtaaatgggccaaggaaagtgtgtgggctcagggtgtttgtgtgggttccttgacttacaaaggtctttgtgtggtttgtctatcatctgctcataagtaggcccaacatgggccataaatgtagttatcactcccccatctctttgtgaaggagggggtctggaagagtatttttttaatatatcttcgtcagtgtcttgtgcatttttctttcctttgttgtgtctccgcaaggctcgaggggataccgaccttgttcttctttccctatgagtcacctcggtgttgtggattacctctgtaacgtcgtttatcttgatacccgttggtctcttttgtccattgtctacaactttcaaattttttccataaacagtacctgaggtattttcatgtgttctgattaccttccttttgagtttgccattctcattggcctttcgaagttgtgttgggatgtcccccaagtcctgtccctttcctttgttctgtccttgtttgccgttgctctggatcggagatctgcccgtcgacggtcgtcagacacttctgtcttctctaaagaaattgagttgattccttgtgttgaaacagctgataacggcggattctgcacttatccacgggccgtaagctgggactgcagccccttcc

SEQ ID NO: 23269 - DNA, 2177 bp, Cannabis sativa
  modified_base (1678)..(1692): a, c, t, g, unknown or other
  modified_base (1908)..(1909): a, c, t, g, unknown or other
taacaagctgaatagattaaggggcataatagtatagtgtcataagtacagggggtaaaaaagataattattctaagctaattaaacaaaaattcatacatcttatatatatatatatatatatatatgcactttcacaatttttttcttttaaatgaaaaaaaaaactgatttaataattaataataatttgagagagatcatgagtagtaagtatatatatacctagatgagtttgcatgatcaagtgtgtagattgttacaagtgtgggccaagtcatcctgtttaataagtaaaacttgattaattaataaatatgcattatagtatatattattttttttagtaatttgtggtataaatacataagtataactttcggttgtagtagataaatatctaaattaatttttacggtaataatatctaaattatatttctaaaacttctgtagatatcttacggttaagtgtcaattcaagtacctacagaagttccaaaaatataacttacagtcaaaaattaaattgaagtattcatctgcaattgaaagttaaactaattaggtatttacactgcaaattatctattttttgagttattagcaataaaatcccttatgttttgattttataacctcttaatattttttggtgccaaaacctctttatgattagttttttttttgtaaatttgaggcgtcattgttatatacaattggattactactgtattgactttgactgtcacatatacataggtatacacattggtcatcaagttgatatttaataatgatatttatttggcaccttgcaaagaaaagtaaatttaaagaggttttgttaaaaaaaatatatatataagaggattaactgcataaaaattaaaatataaaaaaattttgtggctaattaccctattttttttaatagaaatgaaccttcattaagaagacaattaaacaagacataaactcagtagaaatagtattttagaaaactgagctcacttcaatactattttagaaagaaaaaaattgggccaaatttaattaactcaacctaacaaaatctacttactctcaaatttatatttctagctaagagactctaactactctaattactactaattatatctacatgcaatatgtttaaagtaacatcattttgataattatttttataaaatgaactttaaaaaataatcaaaatacctcttaacattttgtgctctagatcttgatgcaatttaacaaaataatgtaatgatttttttactcaaattaaccaaacacaaaaatattaactctagagagatatttataatataggaaagaaaaaatcatttcaagcaccaaatcataagaaaaattaagtaaaaagaccaaattattaagattgcaaattaattaattattaagaaattgatttttaataattaattacctgatgaagccataggtttgtcagtgttcttcacagttcgatacatctgtgaaagtggccacaaaatcaagacaaaacaaatacaaaaaagtcaataaaaaaagtgtacatgattgcacaaataatttaaaatatatatatatatatatattttacctagaaagaataaaaaaaatcacaaaatcccagttgatagaaattcgagtaataataataataataatannnnnnnnnnnnnnnataataataataataaagaagatgctaattttgtttggagaggtaatatattattattaattttaattatacatatttttatttaataaataatataaagaattattaatcaataaaaattagtaatttttccccgcaaactttgacatatactaaattgtgcccctgaacttttttagccgttaaaaattctctccgaactattgagattgttanntttaaggacttttgtctaatttccctcctgaactttggcatgatttggtagatatcaaaatttggggaacatggtttagtacataaacaatcactgaaacactaaaattgaatgaaattaaacaaaagtccttaaatttaattagcatggttctgggggaatttttaatgaccaaaaagttcaagggacacgatttagtacatatgtcaaaatttaggaggaaaaattactaataattagcctgaaaatattaccatttgacacctta

SEQ ID NO: 23270 - DNA, 3620 bp, Cannabis sativa
atgcagagttttttattcgacacgtctgcactgtttatggggtcctcagaattttcagaaacctttttatctgcttctgaatctcctttactagcctcttcatcaacctaaaaagtattagatattaaattgttacaagatgcagtagaatataaagaggggcaaaagtaaagcaactcatacatcaagatgctcaacactccacgcccccacagggaaacagaaaaggacggtaaataatgatatttatcaaagttaagagtgtcaacattaagtattcatattgaataactacaacaaatttgctgcaagtagttaccagggatatttgaggcgaaatcctcttaacatttacaattgttacacatatgaccctaatcaaaaaaagtagcgacaaaagtaccttattttacgattttgttacagtcgtaccttttttagccgttaagtgtcaactcagaaacacgtggcgccatataattaaaccacatattaaataagctaaagaaatatgtcaccatgtgtttctggcacttaacggacttaattggcacttaacaaccaaaaaagagcactactgcaacaaaatcgtaagataaagtatttttgccaccatttttttttattagggtcatatttgtaacaattgtaaatgttaagagaatttcgccgcaaatatcccctaattaccacttaattcatatacaattgttgggcaaataaatctattagttctgctcgttaaaaattccactgcgctttagctgaactttcttaagtaactaaatattaaacatgggatatccagatcaattaaagagacttgggccccaccactcacacacccactcaaccacttgcccaaacatgaaatattcctaactaaacttgtaacctttacattacgactaagaatttgaatgcttaaaaatataattaattatcaaatcatgcaataaacttcctaacatgaaaatcgtgtgttgcaatgcactaaactaaaccacattcagaggagaaaactaacgagtgatcctatcaaataagttaaatagtgtgcttgtcacacatacagaaacacatctatgtaccaatttagtcaaccaaactcatttgcattcttaatcttgaacagaattgaagtgccaaaatagaaaagtaaaaaggtaagatttgataggtacccggtgaaccaaacagtttattgaagggtgtcttcgcagaagattatgaattagtgctataataaccaatgctcctgaaggaggcacagaaatcgacagtcgactcagtttcttagcaaaagcagcagccaaatatgcaggaagaagtggcgactttaagcaagaatcaagaagctgcagatgaaattagaatacattgagatacgctaagtataagtattaacacatagacagtaaaccttgacatgagtattagtgctgaactctcgttttctcctccccttttatgatataagatacattaagaaatttaaaactcagtcactaacacactcacccaccctattacttgagctagcctcaaccctcaagtggcattagtgctgaactaattagcattacctggaaaaattttgatctatgtttggccatgaagattgaaggcaccagtagggcatatagtttttcatagaagttgggatattctaaaccatgctgcgtcataaggatgaagagactactgagagccattacactaataacaccaccaatgtcatatgatgtcgtcaaaaagtcactgcatgcataaagtcagccaataagtaagatcaaactaatgaagtaatataaaatgttaaaacacaatcccaactgtgaaaatttaccctagtaattggaaaggcatttgcataattaaatgaaaataaacaagagttaccataagataacaggattggataggtaaggaataactgccgtgtggagactggccagaacctgaacaccaagaaggcagtttcatcaaaaacaaaaatatcaaacagctttagaaactattcttctgcttcaaaccaaaaacaccacgtacagaatagtcgtgtttttgtaaatataaagccccattcctttataaaagaacaaagctgtagccttaaattaaaggttaaccatccaaaccaaccacaaaatatatcctattactactataagaaaaacatttatgaacataactttaaataaatcgccggcagaattttacaaatttcagttacaaagatgataaacttatgtttaaggagacaacattggggaaattctagtataatcttacttctttgtatacatcaagtggaagtggcaacctaagaaatgaaagccatgctttagtaaattttggcttcatcttcttggcactattggatgctgtcaatatctgcacatatttaagaaaacaacatagctagtactgaagtttgatctcagtaaaacgagaaacagaatgaacatgcaaggaaaaggtccacgtatcaacaatttgacaggaactttcagcaatgacacattaaacaatccagcttatattttaccttggaattattctggtcgctcttcttctttttatcttccccttttagcttcccagagacattttcaggttcacctgtttagacaaataatcaaaatatagtgtgcatcagaaagagagagaagcgaaagggaaagaggttcaataaatctccatcaatggattttctcagaacaataatagagggctggaaatgaatattactgattttcatcaatctttaattaagcttcatcacaccgaaagcaaaggatgtaggaagaaagtattataatgtaaagcatccagaaataattactatcttacaatattcacttaaaaagatatgaaacaatcaaagagaagaaatccactgtttcagatgccactgacacactttatgtgcttttgtagccagcgccatgataaaagatttattattgtaacaaaactcagttgaacaatcgatctggacttaatttccatagacagataagacagtagaaaaagaaaaacaccttgcaatgattgcttaatcatcatcttttctacatatcaatcactctttacattgagcctactaaaagaataaaaagactcattccaaacacaagaaaagcaagaaataattaactatttacaagaagcaatcacctgatccactccacatctcatagtcagctttgtcagctgagccttctagtgcgggtatgcgagataaaatgtaatgtacattgtgaattaggttctctgtactgcaagtagatcaaagcactatatacatcacatgatgaagagaagccccagaaacaaaccaaagtatatatatacatatcgagatctaaacatattttaggctcaactattttaagagctagtcactaacaaaaaaaaatcacatggtaagtgacaaacctttctttagattgactctcattgtcgccatctgtacacagcagggaaactatatgtcattaagaagattgtatgaatccataaacacaaaacacaagaatgcctatggtacctgacacgcttttctcctccaaagttctacaaatcttttccacgataatgtatgtaaagtacct

SEQ ID NO: 23271 - DNA, 1839 bp, Cannabis sativa
  modified_base (553)..(558): a, c, t, g, unknown or other
  modified_base (1070)..(1075): a, c, t, g, unknown or other
aaaactattggtgccaaccgtcagattggcgccaatagttttgccggtgcaatagcttatcaaagtaggttcatagcgaataagggcattttttaacaccgatacttatttttcaccggcgtgatttctcgccggtaaaaggaagttttaccggcgcagttactctacgcgccgattaaaagtcctttaccgaccaagcttcccagataagctttgccggcgcaattagggtacttttgccggcgcaacaatgcgccggcaaaagcgggttttcttgtagtgagttatattagtttttttttttggactccccgagcttgaaaatcatgatttcctactctctgtcacaactcctttttccctctttttgcacggcacacttccttactggcgttaatggcggacagagtacactcccttggccatcgcacaagcatgacggcgacaattgtaaagaggccagcgatcgatcaacaaccacaccaagaggccaccaatcgatcaacaaccacaccattgcacgagcatgacaattctctctctctctctctcnnnnnntctctctctctctctctccccccagcatcggttactctaatcgtctctagtaggtggacagaggcagaagtggaggcagcgacgctctggtaggtgctacgacgccgatttgcgagcaggtatagaattcaaccactgaggtgcgacgctaaagttcattttattaaccactagggtggggtgcgactttgtgtgactctgtgcgaccaaatatatttcaagtatatcctaatatgtgtctatgggaccttatgtgactatgtgcgaccatagtctatttaaatttgtattttaatattggtctatgcgactaagtgcgactatatgcgaccatagtatatttcaaagtatatcctaatattggtctatgtaacccggtgcgactataatatatttcaatataatcatttaaatacattatatagatgataataaattatttaattattttttctaagttatttcataaagtatgtatgtgtataactatttagtataatttataaattatnnnnnnagtatattatataattgtataagtctaggtgactatttaattatattatatatatgagattcaatatataaatcaaattattttataaaatatgtatgtataaccatttaagtataatctataaattataattaaagtatattttataattgtgtagcgattaaccattaaagtacattgtataagtttaggtgactatttaattacattatatatatatgagatttaatatataaattaaattattttataaaatatgtatgtataactatttaagtataatctatagattataattaaagtatattttataattatatagcgatttcaccattaaagtacattgtataagtcttggtgactatttaattacatattttaaataactcaatcattgaattacatggtataagtcaattttaaactatttaaagaattagagtacacaatagacaagtgtaaattcaagattatttatggtcattaagaacaaagttaagttcttatcgaagaacataaaagaccatggtggtcatatagtgtaaatttaaggtcgtttatggtcgttcagagaaaattcaagttctttaaagtttgttgaagaacataaaagaacatgatggtcgcatagtataaattaaaagtcgtttagggtcgttcagagtaaattcaaattctttaaagtttgttaaagaacataaaagaccatgatggtcgcatagtgtaaattcaaggtcgtttatggtcgttcagagcaaattcaa

SEQ ID NO: 23272 - DNA, 3535 bp, Cannabis sativa
aagagtgcggtggtgctagtactagtagttgttctggaaaaggcgcttggagcctcgagcatattagagctggagcagtactccctttgagagagtactataaggagttctgtaattaccttgaaatttcccctttttcagttaatttcgagttcttatagaatcatggcctacctaaaggtcttgtatcagattatgggatgaaagtgtcctactcccctcaaaatttgtatttttattctgtaaaggctgttcccgcaaggaagcgaggactaggcagtttttattacctcaggacccacataaataactgaaagatcatcgtaagattaccaaataaaattaaattcaaggatgaattcttctagataactggtctctcccccatcaacacaacaacatttcgccttatacgtaagtattatcttttctcaaaagcttggttttgagtttctgatttataaattgaaggcttttatttattttgcttattgtattgacattgatcacgaaaaggccaattctaactctcgagatggtagaatgacataaagctctcttagatcttccgtttggactgcggtcagctgattttttactgaacaagaccaatttgaagactgttaatcttcttggcaccgatcaatccacctgcgactataagaatccaaagttttctaagtggcaataaatccctgttccacctggcgaggaagatagagactatgtggcttgcatccacttcctaaataaagtgtcccctcgggaagctagagaaggagcatcctgaggtaataattgtggatggtcccctaatgtgcttagggctgaacgtatctcgctagttaagtttaaggatagccaatataacttctatatctgtgatcgttttcgtgtagatcgcatatctcataggtttgatagttggtatcctcaatatcatatccaattaagttgtgatagctcctactttggaattaccgaacagtatttggatagagcgagccatccagactcagattgggacttatgtccaataaatccttatgacatgtatatgattactggttctagcgaatttagtaatactatagttgttcctcatcctcgtttgatgattatgataaatttttataaatgggagttaatttgccaccatctttatgtcaatttttaataagtgttgactcatttctttttttgtttgcagatatggacttcgagagtcttcttaatacctcgggaaaaaagggaaagaaaagagtcgctacaactgaggccttatcgggagcaaatccagaacttgtgaagagatcgagaaaaaccactacaaacaaaaaacgtacctcctaataaataattatcgagccatctgatgatcaggttcactccccgaccccagcccctgagggcattgaagagcaggccttacgatctattcaccaagtcaaattctcgagttcagaacccgagatggtctttttggagctctcttatcctttgtcacgagatgcaggaattaatggcccgtaagtttgctcgcagtatgcaacctccagttagcatcatttcaaatccttctaatcgggtgattgcgacttgatcaataatggaaactttgaggagttgtttgagagaagtttaaacctcaatctcttgattaatttctttcttcctttcttatttcattatatgctcttccttatctttcttctgactttactttcattgtaggaatctttgctgtctcacgtggcacattaaaggggcctttagaaaatcaaacagttgatatccgagcttcacaaatccatcagacaacgtgaggttattgcgaagcagtggaatgatgcccaaaaggagaacactcgtttgacaaaggatgccaaggagatgaagaaccacaaggctgagcttgaaaatgctaaaaaagaagccaaggatcatcgcgaagcccgccaaaaacttcaggaagaactcaatgaagcaataaaaaagcttgagggtgccgaggcagatgccaaagaaaggtgcaataatgctgcaaaacgctctatctacagagcttggctagccaatcttattatgaatttaagcttcttggaaagtgctgctgcggagatgttggcctattgcataaagaccaagaaagatgaagccttggatgctgaagaagaagaagaagaggagaaattatccaagtctcctaccatgtagacttggttattattattgttttatttctttttaaatttagaaaagtggccctttgaccgagacaatggttgcccctagtggaattttgtaaaaacttttgcattattggacggccaactttgcttatttatatatttttactttttatgcctcgtatcttgtatttgagctaaatatatttgtttattgcgttttatctcacaatctaaacatttatatctcgagttaacttaagatactttaggttaaatgcatctctaatgtcattttctttgaagtgttatagtagtaaataatctaccgtgtccttcactaatagtttttaatctgtcatgttttattcgagctgttctaattctccctggttacatgcaagcagttgataatctgctatacacacacatttttttagagcaaacttaaaatattttgaataatttatctcaggaactattttgaatatcttttgattgctcatatgaatagttaatcctatattcatatttttagcttaagtattatttttcaaggcatatctgcgcctcgtttataatacacgccagaacaatgcgagctgttaagtattcaacttgcatataggtttttgttgtattatgagttgatctcacttacaattgctatttggttttcttttttaaagaaaaagtttttcaattcttcgactttatattgtccgtagacaattttaatcaattatcctttcttttgtagattttttttattattgggttttcaatatagtatatatttatagctgaattccagtcattgtacacatatacatatgcccccaagtaattttaaaaaagataaactttgtaattacttgaacaaactctaactttattcataataagcctttaactattacagagataaatacatcatttacattttgaatttgctggtaataaggtcacaaatgttcattactccagtggttctttattagcgagctgttaagccaagctaacttataaacctcggtcagggccggccttgagcataggcgggctaggcctgtgcctagggcccacctagctcacgggtccaaaaaaaatttgtccccttttaaaattacacattttttttttatcaattttgaaaaataccatttttttctaaatgagggcccaaaaatattttttttccctatggcccactaaatttcagggccgcgcctgacctcggttcccacaaccacttcaataaaataaggaccttaccagtttgggttaaacactccagcagtcagatctcgcgtatttgtaaatgttggaattattataccaggatc

SEQ ID NO: 23273 - DNA, 3065 bp, Cannabis sativa
ttcttctgatggagccagtttgagaacgcttttagggtatgcatgtcagctctgtaatggttaatagtgaagtcaacaaactcaggccatgtaaaatctgggtaaattcgagggctccaatcattgaccaactcacttggtggacttatcaatttatcactattaacagtcaaaaagaatgccagagttttcctaggcttttcgctattcacaactacacgatgaaagcagctcttgtagatcccattagaaagtgccttcacaaacaaaaaacaacaaaaaaaagttaaggaaaatgccatcccaaatgttattaagaattgatatggtttttagtttagagagttaccatgaatgtatcaccgatgttaacaacaaaggcatcagaatttgaactaattctctgccatttattatcgacgaacacttgaagtccttccacttggtgttggtgaagaattgttatggaagatggatcagaatgaggtccgattcctaatgttagctcaggttttggacatatagggtagttattaagtctcattatggagtcggtttcttcataaaaatccttaaaacgagctttacctactccaaggctagctcccaaaagttctacaattttaagggatagcttattcattgcttcagctaaatcctgaaaaaccctcctaataatgaaagaaaacaaatgaaataaataaataataaaaaataatttaacatataattaataataaattagaaaaaggaagtattgtaccctgtctcttcgaaattttcacccaatttgttttgaaaataatttttgatgatgttggtaggagtgttttttatagtagaataacgaacagaaagggtttctttccatgggagtttggactggaaacgaccaatcaaactactggagtagccgaacaactctccttgtttttttagagccttctctttttccaagggtggcagctcaaagaagctgtccatgaagcgatgagcatcagcaataagtttggagtcaataccgtgattgacaacaaggaagaatccatgctttcgacaggcctcgtcaacaagctgacaagcctccattaccttctcttggtcacctgagagaaaggcagacaagttgatgagcgggacttggagatgtggggcatcgataatggacctttcttcctcaggccatatgaattgggtgggtatgttagagtggtctttcagcgctgaaaaatcaaaaaccaatgttttttgatcttcatattcattcatggttttagttgatattggaggacgggccattaacataaaattatatcttaatcttatattctagtttgtctcttcctctttttgataagttgttacaggaatgaaatcataaataaatatatttataatgtattttacattatgaaattgaaatctagcctaaaagaagaaagaaagaaatcataatctgaatattcattctttatgattttttcattaaatgaaaaaaaaaaaaaaatctgaatattattatgctttcctaaaaaaaatctccatgtgatttttttttacttaatttagattttttaaattaatggcagattgtaattttacttttgtaggaattattttcttttgtagatgtttctttcaaaaataaaaaagtacgaaatatacattgttttggttcatgaaacttttccttgctctagttttaatggaaagatttcattatagtatttacttttaaatcaaaaattataaagtatttcttgcacttttaaatttttgggcttttttaggaaattaatatcataagtgttattagattttattttatgctaaatcaaacttttattacgaatttacatatacaaggtattttaaacatttgtatttcttataaagttttaattaaaaattacctctgctcatactattggttttattattggttttatgatactaaatcaaatacgcagcggaagagtttagtaatggtgattttcatgtaccacatcccaaagggtctccagatgtgtgtatcccttaaccagtgatgaggataatgcaattggacttacacaagtatcttcaaaattattccactacacacaaagaatagtcttcactattcagataaagtgcataagtttgttcttgttgagttttcaatatatgaacaagaacagatgagaaaaaaattcttcgtttcttatactctttatatttttaaattatagtgtcaaaatgtccatttgatttctcaagtcaagcttcttttgatagtagttaaatatcttttattaaatcatatttaactatttaaataaataaatatctataaccgaattttgttactgatatgtatgaaagaatctctcaaacacttgacataatatctcagcaactttgaaatatctataatcactttttaaattagatatttaccttattaaattaattaattaacaaaaaaaaaaataaatccataggacagactatatgctaagcgcctacctttgtctgtttcggacaaggttggtgccttttttcctgacaacttttgtctcaacaaatcctttcttaacaaattttgtcttaacaattattgtcttttccatatttaattaatttgaaaattatttatttattataaaaataaataattacaatttttataatgcaaaataaatttttctaaatgacattatacaactgtttatcccaacccttgacagtatttcaaggtggagattcacggataatgaacctataattctaagctcacaataaactatagaatatttattgagtcttattaaccaaataattcttgtttattaatttcatgattaccccactaaatatatggaactgaactcttagtaattaaggaattatatttatcgaattttaatgcagtgtctattgattagccctctatgtctttgtttgtaattagttttggtcaaattaccattttaccattctaattacttctttatcctttagtactattaattcagtagtggaagtataatttagattctatctaaatttgtgcacaacattcc

SEQ ID NO: 23274 - DNA, 4585 bp, Cannabis sativa
aaaatattatattttacattatatcattacataagtaaaaaaaaattataaaatgtttacaaaagttgaacaataccgcgcgaagcgcgacttagttctctagtatcaaaataaagtaaacaaatatttgaacctacataactacaatatacatgatcattttaaaaaaaaaaaaaaaaatcatttaaaaaaaaactgaaaaattttccctagatgccaaactaaataaaatgtgtacttcaaaatttaaaattggtatgaacataacataatgataacataaactcgtaaattatttgttttgatgaatttttgaagaacttttggttatattataaattgaagaatatttttttttttgtatattaaatatatatagcttgttagaaatcttttaagtaattcataagaatcaataattatatgtatatgattatctataaactttcccaacaacttatatagtaacttaatggtttgagtaatttttccaatttttagcaattacacaagtccacaacttcacttataatatatctaaaacacaatgataaaagatacaataaaatatatttaatacatgataaaatgttagtacgagtttgagaaaaaataaaatgcaattagaaaaattaaactattacttaattcaaaaggtcaatatttcacatgtttttaaaatagaaaatagtaatttgaactatgctttatctaacataggaagaaaaaatttcacacaactcaggaatttaaataaaataataataataatactttcaaataaggtgcacatgggttaagttggttggattagagatattttaataaaaaaaattattgtaacccaacctacttagtacaatcatataaagggtgagctaagttgagttcattaagttgagataatattttcaccgtatggacaaaaagaataaaatattaacaaatatacgaatacacagagatttaaacttttatacagtaatacatattttaattacaaaatatacagtgtcatcatcaataacaccttcgctactctctacccagaataaaaaatgacagagacgccattgatcttggaccaaactttttgaaacaaaaaatcaacaacaatacaatgcatgatcctaaaaaaaactttcctattcgattagccaggttgaaaaaaataaaaaaaaaatcatcaaaaaacgtaaatccatcaatcagcaaaatcctttagaaaaaatatacttaaaaacagatatgatacatccgaaacacaaatctcgaaataaattgggtgagatctatactacataacctaaaattgtaatttcaatgttgcaaatcatataataaagagctgaaaaattgttgagcggagctccttatcaaatctaaaattatattaaaaataagtatgaaatatcagaagcacaaaactttaaatgaacggggtaagatctatactacataacctaaaattattatttaaatattggagatcatactagaatgacttgaaaaattattgatcgaagctcccaatcaaatcgtaaaaaaaagtttcaatgtattgaattactatataatatattgaaattaattttgataattactaattggattatatactgaggattgactgctattgagtgttaaatttgatttgaaaaaataaaagaaagatatataacaaggaatgtttattgtttttttttttatgaataagaaagttgttgattgcttgtttaatttatgtaattcatttatatttattcacctataatacatataaaattgtgtttcatatattttgaaactttaatttattttggtcatataaacataaaaattgttgatttattgttaattatttgcaacaaaattgattttgttcattggatgttagtaattataaattttattttcataaaaaaattaatgttttacaaaaaataaagaatgtttattgttgattgattggttaatttatgtaatttaattatttttatacataaaaaaaaaataagttaattggagtttcataaatcttgttgtgttaatttacagaaaagtagaatcaacactggttctagttcaaagcaatggatattaggatgagaacagtcagtacattgttttcaaagctacactagaatatgcatccacgcaaactacaaatatactgaaatggtggacaaactgttgtgaaaacataactgcaacaaaaatacaacgaacctacaaatgcaatttcaggtacaatctggatatccaacattaaagatcatagatgatgaaagcgtgggccttgcagttaaaaataagagaaaaggacataaaaaatatcctttgtgcataaatatggaattcccaacacaaataccattttttcctgaggttgacacagggcaagaggtccacatgcttgaatatgaaactcagccagggaaacaccaacacatcaacaaatagaaaacacaaatgaagataatgaggcattcaactttgttgactatgcacaaatagttaccgcagaaataatggataaactaaaaagacagacaattgctcaacaagaaatcaacgatgaagaagtattggtcatcatagataaacaacatccagaaatcgaaaaagggcagatgtacaaagataaagaaacattgaagagtgtccttagctactttgcaataaaacaacaatttcaatacaagatcaaaaattttgcacaaaggaatttcaaattgagtgtttggataaaaattacaagtgatcactaagagcgccaaagaatgatgcaacagagaatttcattgtaaggacatacaatgagaaacacactttcttactaagcatcaaatttggggatcaaaggctagcatttgcaaagataatagggaattgtattgaatacaagttttaaaacatgaaaacaacaacaacaccagtagatattcgatttgacatgaatgataaatttggattacaaatcaattacataaaggcatagaagagtagggagcacactctaaacattgttgtaggaaaagctaatcagtcatatcagttactgcctaattatttctatatgctccaaaaaacaaatccaagatctgtagtgcacattaatattgaagaaaataataacttcttgttttgtttcatggcactaaacacttcactgcaggcatggaataaatatagacctataattgtagtggatgaaacttttataaaagctacatatggggaaacattactaacagctagtgcacaagatgcagcaagtaaaatattctcactaactttttgagtggcagattcaaaaaatgatatctcatgagaattgttctttgaaaaattaagaacaatatttggtgttagacaagaacaatgtgttatatctaatagacatgaaagtataatcaaagcaggccaacaaattttccctagaacatatggatattgtgtgtatcacctactcaacaacttgaaaaaaaatacaaagttctttgaagagtccttttctcgtgcaacaaagacatacacagctcacgaacctaaaatatgtgcccccacgtgaaaaatatatatggatggggctttaaacgagaatggatcgggagtagggatagtgatggtatcacccgaaggcttgaagctccaaacagctttgtggtttaagtttcctacctttaacaatgaggcagagtacgaagctctactggttgggttaagactatcaaaagtcgtaggagctcaaagaatagaagtctttagcgatttgtaaaactgaaaaaaaaaaatactttgaagtgtaaaaatagaaaaaaaaataaggagaattatctcatatactatttgttaacttttttttgtttatttttttatttttacggtttgggttgctctagtgagtactctgataatttctatgtaggttgctatgtgaatttcggttgcgatttaaactgttttattagttcttatgtgagttgttatataaatttccctaaaaaaaaaaagcctgcggtgatgaagttaaaataaaaaatgaattccactttggcgtatttgattaagaaaggggacagaaaaatataaatcacaaaatacactttgcactctgttctttttcccaactagagataacaatatactgtatatttgatgaaaacacaggccatgagacatcaccatcgccattaataaataaacacaagtatcaaggccaataagttaataagtgtcaatgaccgattccttatgtcggtgatggaaccttatactaactagtaactacttcctcatcctgctttctctcttattctacattcacctcaccattaccaactcaacacacaagctcacataaacgactgttagactatgaaatagtacatgaacttaatagtaatttacaaaaagtgtgaatcactataaatatgtaattgtatagctattatgagatatgaatccagaaaataaaatttttgttcaattgagagatgagctatctcaaaaagtgcatttcgaaaatttgtcatgtctcgaaaaagacccatatttaatgaacgacatgtcgtaatcttac

SEQ ID NO: 23275 - DNA, 4389 bp, Cannabis sativa
agcacactctggttcattggtctggtagacttcatattgtcatttctatacccgtcttttattaatcttgtggaaatttatggttggactttgaacttttttccccagaaaataatacggctgtagaaggaaaataaaaagaatggaagtaatgagtttgaattttctactaacaattttaaattttcctcatggaatttttctttcaagaaatactggtttttgtttgttaacttgctttataattggtatcgtatattcttttgttatactggttattatgaaatatatgctgatttattgatcttcatgcatagttcctggtgagtattttgctcatttggattccactggaaaaagagtggatttggatcagcgacctgagcttacgcgtggtagtgtggagtttgttgctccaacagaatatatggtccggccgccaatgccgccattgtatttttttctcattgatgtttctgtatctgcagttagaagtggtatgattgaggtgagatgtacaatggttttttttttttttttttttttttaaattcttgctttgctccatgggttatccttttttatatagcttgtaactcttagataatcataaagcaacatagtaccacctagaacacatattttggcacagaccttcatatcaaaatgtttggaggtatgcggggttagacagagaaagtagtttcaaaaagaaaaatctatggagatgttgaatatctttgtgcattagaaagtatagtataattatagactagagtcacttcaatacgcatttttgcccatggggcttattactggtctcatcgaaatgtagaaagatgctcattctttgagttaaaaaattgcacacctttaaaagaataattactgtaaaaaaagaagacataatcgtatgtactaaatcatgtatactattttcagtttatgttgtgcaagtaataaataattttgtctctcaaattttacttcttgcatgataattgtagagtagtattcacatagtgaagcacctggaaatctgtgattgaaaagctctttttgaacgtcttttactctcaatttatgtcatctgtatggcttgtattatgggtcgtattgttgttacttcaatgaatgagtaatatcttttcactttctttcacactcactcatcttgtcttaaatataatatatattttttgttttctgcaggttgtagccaaaaccatcaggtcatgcttggatcagttgcctggcttccctagaacacaaattgggtttgcaacttatgacagcacaatacatttttataatctgaaggtatgttttttctatgagatttgtttttcagctctagctggtttacttgtttcagcaaatttgtattttaaaatcaatattcatgtggttatatctgtgcagtcatctttgactcagcctcaaatgatggtggtctctgatctggatgacatatttgtaccattgccagatgatcttcttgtcaacttatcagaatctagaagtgtggtggaagcatttctcgatagcttaccatctatgttccaggacaatttaaacattgaatctgcttttggtccagcccttaaggcttctttattgcttatggtatgctgttttttttttcattgtcacctatttgagttattgattttgagcactgagtttcattttaatgatagctttaatgttaaccattatatgtacttatggtagaatttggccattcttaataattcaatctttatatatgtgcttctgcagaggcaacttggggggaaattgttaattttccaaaacacattgccatctcttggaattggccgcttgaagttgcggggagatgatctacgtgtgtatggaacagataaagaacatgtgttaagacttcctgaagatccattctacaagcagatggctgcagaattcacaaaattccagataggggtgaatttatatgcattcagtgacaagtataccgatatagcctcattaggtataattgctatgccttgcctcaatatttatatttataatcttaaacgggattcaaagtgtatgctaatggttattgcttgagtgagagcctgttgttctttgcaatgtcttattaataccaaagctcctttatttgagagaaaaaataaatcaatgctttagctctattaatattcactgaaagcatattatgatttaagccattggaaatactgaaatagtatacatcttattactctaaagagtatgtgaatattttgtggctattatgaatttgcatatttatgtcagattgttggacatgttattattgcaattttaaatacgggtcgatgtttgggctggatagttattgagttgctaaaatgtgtcaattagtacttactacttgagaaatgtgaaaatttgtatttaagagtttctataatttatacaacttttgtcccggtgctgttgtgaagtatcactcaaagattcaaatattctgatgagaaatactgtcatattgttgcttttatggttcttttcttggcgtcttatttattgaaactatatgtatatatatatgcttatcacacgagttttttttttttatatatatatatatatatttttcttttctacaccatatatatatatatgaataaatattttattttgtaatacctttatttgtattttctgacttccaatataggtgctttggcaaagtatactggaggtcaagtgaatttctatccaaactttcaatcatccattcatggagagaaactaagacatgagttagccagagaccttactcgggaaactgcttgggaagctgtcttacgtatacgtgttggaaaaggtcattattctcttggcttgcctaaattgagcatatgtttctgtgggtatgtagtctgctgctttgtatctgatataactgtgttttggtatatttatttaggagtccgcttcacgtcatatcatgggaactttatgctacggtctaccgatttaatagcacttccagctgttgattgtgacaaagcgtttgcgatgcagttctctcttgaggaggctttattaactacacagacagtttatttccaagttgccttgctgtatccttttagttggttatatgatgtgtaatatcttctaaaacaagtgttttattatattatattgttaattactaagaaagttatataattggtttggttatgattttcactgctcttaattatcatatctgaacccttcttcctcttagatttatggttggtattgcattcatctgtgctattttgccttgcttttatataaatgacttgttagttaaatgttaattattgggattttagagtgagtaggttgccagttgtgaagcttccttgacaattttaaagatacacagcatcttgtggtgagagacgtattagagttcttactgcagctgcaccagtagttccagatcttggggagatgtatcgtcatgcagatactggtgctatagtcaccctgctttcaaggctaggtaagataagttgaatttgatgctagtactgccgtgactctgaattttgagatttttggcatttttaatttgggtttgaataacttgcagcaattgagaaaacattgtccagtaagcttgaagatgctcgtagcagtttgcaactaagaattgtgaaggcccttaaagagtaccgaaatcttcactctgtgcaacatcgcttgggagggaggatcatatatcctgaatctctgaaattcttgttgttgtatggtttggcacttactaagtcaacaactcttcgtggagggtatgctgatgttacactggatgaacgctgtgcagcaggtttcacaatgatggttttgccagtaaaaaacctgttaaaacttctatatcctagtttaattcgagttgatgagcatcttttgaaggtaacacgttggcagaacacaatgcttatttgtagtgattagtgatgatcggttgccaattacttacatatgtttacctaattatgtttgcagagctctggtcatgatgacctcacaagcattgagaaacggttgccgctcactgctgcaagcttggattccaggggtctttatttatgtgatgatggtttccgtttcattctttggtttggcagagtactttcacctgatatagctatgaatttacttgggccagattgtgcagctgagttgtcaaaggtatatcagaatcagatttcatagaaatatcatatgttgatttagaaaatagcgttgggcttgtttcatcttaaaacttattaattcacatttcacaacttctaagtgcatttctgcctaccaatggccccctaatggtccttatagtcctaagttgct

SEQ ID NO: 23276 - DNA, 3432 bp, Cannabis sativa
taataagtaaatccgattatattgaaatgagttttatttaaagcataaaacccaacagaaacctccatcaagcactttgtccccctgcgccaagttttttaattttataatgaatataccatgagaaagcataccaaccttaatctctttatctttccataatcttctcacaaacctgtcaagcacacttatgggtggatttgtagtagcaacatacccaacaatcgaaggctatcagtaggtcaccttatcttcaatctctgttggaaggattttcacttttgttgtcctctatttaggtaactcctcagcttcctaagattcatcatagcaacaattgagtttctttactagatgctcaaattccaagatgagttgagtcatcttcttccctaactcaacatcatgtgctgtgctgttagctagactcaaccaatataagaaatccttctaaatctcactctactgacgaatgatctcctacaattgttgaagtgaatgaattttccccgaaatcgcttcctcttcttttcttttcacttggatcttcaactctaaaatccctaaaattgtatctaaggatctcatttgtatgactctatccgaataagaaggccctgtcttcttattgttggccttccatgtatctttccccacatttctttttcctttagctattgtcatcgttgtttccatcgaaagaaacgaaggaagagagaaaaaagattcaaaaaggtattttataaattaacttatgctatctacacaatattttcatgacaattcattacccttcaatacttagatgtcattatacattatatatatcttaccacaaaaggaattttaatctaatatatgtttgaaatattttgttgcacttgtgattactttttttcatactcttggtaacaaattgcttgaacaatatttttggcactagaaactatacaatattttcaaaattcagaagtggaacctcatcaacacaattacatatgtagccacaatattttgtattctttcaaaactagatcaccttaattggctttagaataattaatttataacgagttcgcaaataaactctatctctgaacaatttttggatcacaaaatggaagcaagaatgatgccaacttcggttcattccaagaatagatctattttcaaagatgcattatgccttttttttctactagtgaacatgttgaagaggatgacctaatcatgtatattcacaatggtctttgttcaaaatatgtagtctatgatggttaatgtaacgcctttgctttaagcctccaatgggcagccacccacaaacttattagtttaatacgtttgtgtttgtttttgattacgtgcagtagaagggtgttggagaggagaatactaaaaaatttatataaatctaattttcatgaattcagtaaggctctagaaaaccataacaagaacgagatatgatagatctaatagaggataaaataaataactattatttgtgcatactgctgatacagtccgaattcaccacgagcaagttcttcttttctttgaatgcttccaaaattctataactacttgtcttccaaactatggcagtttagaaagatcaaataggacgagtggtctcctttttcaatggtaaattagatcacactttggaagctcagatgatgagtgtgagatctttttagtgaaataaagaacacaaagattgtgttcttcactatagcaagcaacgcaccaagggaaagagataaagagaattctcttaatttcgatcaatttttttacagtgaataacttaaccctttttcagttctgtcaagtctttatttataaagtttaataagtgacaagcaagcaaaccctctacttgtcttagggttaatcttgggggctatcacacatatataaagatcaatacagtaataatgtttaaaaaaaaaataaagaaaagaacaatatcattataccactggaaataatattaagtggaaacaatattgtgattaaaaatttcatgaactactaaaaaaatttgtgaataaaagtattaattataattttttttaactaaatgtacttgtaaattagtaacaattattttatatttaatataatattttagtaacaagtaatattttattgtgacttaaaatgatattcgttcacgaaaaaatatttatattgtgaatagacaaaatatatatagcaccattttttaaatgacatactaaattgtagttagtaggctttccattaatttgcaataataaatatgtatagtttaactgtcgttatagtaggcttgaatctttgaatccttttttctgcaccttaaaattaacaaatttatgaaaactagtacctactatatatcaatatgtatcatcatataaaaaattgtgctgtagtttttgtaagtgtcaaaaatagagatatcgatccttacctataaatacaaaaatgttgtccttaatataagattttcgtatacatctatctatgtattatggtgttttaggtataagatttgaatcgcatatcttactctataacatttcattctattactctcttaacatacttcatctattatatctagtagtttccaatattcataagtcaagtcttagctttataaagattctaattaaatactcattgtttcaaaattttcgtattgtgcacagttggaggaaatttgtggattgtttggtaaacaaggtgatgatcatgggcagcacaatgtttcatatacccaccaatcagctgagcaagtgcaactcaatttagagcctttgcgacacaataatactactattgcattgcagatcgggtacgtaataagaatctttctcttcatctcatagagatagtatttctctatacaataattttgtgtcttctggttaattaagttgtcgtcaatattatttgaatacagtagctacgatggtactgctaattcaagaatgatgagtggtcgtagagaaaatgtgggtgcagccccttcaatgaaaaatttgatggctttcaattcagaagaccacgaatgttttgatctttaggcccttaccgatggagctagcattactttttatatactatccgtttcatgtcttcttaattaatattatgtattgttcgtaaaagagagcacagctatctttagctactcattgagaattacatatatgttaaaagatttaaatattattatacaatatatatgcatttatttatgttatctatgtagtgtggagtcatttcatcatgaagtagtactcttacattttgagggtaagttttgatgataagtttaacttttaaataaggtctaacaattttgctgaaaaaaaaaaaatctaaaatctaccagtatgtatatcaggtcagacctgaaataaagtgggccat

SEQ ID NO: 23277 - DNA, 2792 bp, Cannabis sativa
  modified_base (1105)..(1130): a, c, t, g, unknown or other
atttgtaataataaattaataaaatgatgcttgtacgtattcattaattaattattatacctaatgttaatgcattatttaattactaatattatattataatttttaaaaacatacgaggtgagaatataataagatgcataaaagatatttttgctagttattaatttggtgaaaataattctaaaggaaaaatatatattttgtttaaataatttaaattatataaaataaatatttgttgagaaatataaaaatatgtttaaaagaaaaaattaaacttatttttaaggtatttttatatagtataggtgtgtagagtagtagtaaacgtgtaaaattatgtaagtttgacaaaaattgaataattgaatggtaggtgggtacttgtatattaatataatagttcatgaaatttcaaactaggtgaggaatatagggaagagataaagaatcaatcaaattattttcaaaataattagattcctcttaattataattaaagaatctgtttaaataattaaataaacaatataacatatattgtttatttattaaatgataattaattacccatccaaaatctaaatctactctaacaatatactgtacaaaccatgaaaatcaaccctagttgtaattattaaaatacttaaaattattattaattgtatattttttgggaaaaatttacacaatacatctaaaaacaattttttatatatatatttttatagatatttttatttatatttttatgcattttttttttacatattcacttttttttttaaagattaatgctactttcatgtttcttttatctaataaaataacataaaaacaacattttgtattgttgttaaaataaatcacgttgctttcctgtagcagcagcgtcaaacaacaattttttgaaaacaatgaaaaaaataaggaggtttttttcatttttacacttagtttttttttacatttttacaaaattctacgtagaaatccctattgcaactagcgctgcatcctaaattgcaacaaaaaattgtatggaaacccctattgcaactagcgctgcaatcactttagaaatccaaaccgtaaattnnnnnnnnnnnnnnnnnnnnnnnnnntatatgaggtaattccccaaaaatgagactatatttatatatttttgtaagaaaaaaaatataatttgcaaaaacgcaataagaatagtaaatctgtaaagatgtaaaaattttattatatatatatttaggaaataatctcttatctcttttagcttgaatgttaattgtacattgaatcacatttatgcattttctccaaatattccattcttctctatttgtaggtttttttttttagaattatcttatatattattttttaactttttttaatttatagtttgagttgttccgatagtttatatttgggttgttatataaatttttattgcaatttagattgtttcgttggttgctataggggatcttatgtggatttctgtaaaattacaaaagaaaaactattttaatgtaaaaattaaaaaataaaaaaaaaaacttttttatattttatgaaataactattcaaaatttaacctttagaattggtagctaattacctaataattgtttttagcacattaactactcaaagtaactaataattctgttactttgaacgatcaataattttaattaggtggtgattaagatgacacgcgtttaaccacatcataaatgtttacaaagttatccaattttaggtgtgtcatcttaactagtcacggttaatagaagttaataaatatgaaaactcgtaagattataattttagtaacttttgatgattttgtcgctaaaaaaaaaattttgatctactagttacaaaatatataattatgaatagttattctacaaaacatctctttttataacatttgatatttgtttaaaacataataaagtatatgtgcttgttgacaatttgtttgaaataataatgagtagtacttccaatagtcaatggctatcttcatttctcacaagtttttgtatggataagttaagcccccttctttttttgtgtggcaaagataagtttgcccaaattaaccaccaaagactaacatgttggaaaagttatttatcttctattgttataataatttacaatgagagttttagacgacgatgattccaattgtgagctttcgcacacttatgattctttgataataaattataattagaggtgttcatttgatctaatctgcatttttttagtcaaacaatattcaatctgcactaagtgtggatttcatattttggatccaatccgaatctaaccaatccaatctgcaatagtgcggattggatcaattattttggatcggttttttttttttttaataataaattatttaatatttcataataaaaaatttaaaaaaaaatactattattttttaatctccaataatagtctattttccatctccatttatatataaatataaatcaaactaatatacgtatatgtcaatatatatgtacttatatttaaatatacactaaaatatatatgtattcattactaaaataaataaatcagtatatatatttaaatttatgtgtatgtgtatgtgtctatgtgaataagcatattttttcttgagttttttataataaaataaataaaatacaccaactcaatatattactaaaaaagattaagaaattagaaatttgtgtgtgttttttttaatattactagaaaat

SEQ ID NO: 23278 - DNA, 5713 bp, Cannabis sativa
tctggcacctctgcttggcctcctctacaatgatactttgcccatcgttgccaccctagcaacatgaggatcatacgctggtgcactatgacacgaccccttcatctagccatagtatattactatcaatccagaataactcaaaagggagcaaagggacatattgaatgttatctctcaaaagtaaagctaacgagacctatgacacaacaattgtcaactccccaaaccaatgctcgaaatcacctgcatagaagagacaaggggaggtgagcaacctgacaaagctacagacaaagtctggtcaattgtacccaacggtacattctaggtaaattacattgtacaaggctgggtatcaatgaagtaccatcttaagtatatctacataggcaaatagtgattcctatgttgtgcacttgactataatggattcattaccaagtcttacatagagttcccatggaaaccacacataagattacagttgcatatgcctacaaggccattatgaaatccttgtcgaggtcaaaaaagggttgaatactagttgccacttggaaccttagccttggccggccagggttcccaagctcaagagggtcggccaggtcccatgacccagcctagagctagccaggaatcttatttttaggcataggccagccacctttttgggtaccccctttgtcggttagaccacatggtgaacacccatggccaggcaggtcttgaacaagacccccatggccggcgagggtataggtcggatctaaacatgtgtttttaagaaatcaaacatgttctttgtgttcttcatgactcaaagagactacaatcacaacaaagttcaaaatctgatctttttcgcctagaaatcacacattacacatcctaagactacaatgcagaccaaaataccgaaaagattacaatctaatgtgggaatcagaaaacattcaaagcgaagaaaagcttcatgaaattatggaaaattaaactaaatcaagtaaataggaggaaaagatagcttacccactacaagaaacctttgacaaagagaatgggaagcttggattactgaaatggcacaaaaatcttgggagatggagcaatgtggggctttggcctatagagagaaggatgagctttcaaaagttactttttctagtgagagaatgaaatgtggaaagtgaaaagagttttccatccataaggcttatataacttctgtgggaccacttctttacttgcaacgcagtgttcaactaaaaagtatgtaaaagtacaatacaattaacttgctgcaacaaataagatcagacaatcaagagcagatattttaaagattaaatgtgcaacaaaatttactcagttaaggctacataagtcccaactaagctagaaagtccctatccgcacagacatctgcatagagacttgggggggaaatgttatctcaagttctacccacttgacgtggcatgtctatgtagctaatatcagcaccatatggtagtacagcttgccaacatgaagtccaagtcatctactctgcacttcaaccaatcaagagtcctaacactcaaacgggatgatggatgacgaaccagccacctcaaggaggctggctagccacccctggccggtcctatggccagcttctggatagcacaaggccagccagcatgcatcgtgcaaatgcaaggtgggccatacattcctggcaagactttggtgcacagcttcacacgtggacatcagtctagattacgaattgggctttaacaacccacaaaaatagagggaaaatatctatttttaaggggcattttagtcatctatatggtactaatttaatatgtaaatatatgcttatcttacctaattgaagggtttaagctctcctatataaagagctaaaaccaaaccctaaaatgctaagttttaagtctgatttctctctctctctcacgcccaccatttctcttttcataacttgagatttccaatctctaattcctacattataaccttaagagagctacattagatcccacctatagtgatctgactagtattatctctcggtatcaatacaactaaaagaagaataggtcattacccgctaactaaaggggtcaaacctctataaaatcatgtgttcatttgctttaattgttcctattgagtaacatgttgcaagcatcaacattgaacgtgactccgctattggttgttccaaatttaaggtcaatagaggcaaacaacctttatagcttccttcaaaaactagctacatgtatcaagatcattcagtcctggaatagaagtcaaggcattcataagaataagattatgcacactcaagccaccatggaaaacatctacaactctcacactctcaactccaatgatctgaaaaaggctaaagtcttccaagcttctcttgataccctcctttacaaggacaaaatctttatgaagctaagatcgagagttaattgacttagactagggaacaaaaatacctaatttttccacaacaaagcctttactagaaagaaaaataacttgattcgatccattaccctcggtgatgacttgatggttaagggaaccagcaacataacatctcactttgtgaatttctataaatccttgtttacctctcaaggctatgacaatgtggccacttctgagattctcaatggtatccataataggctctccctaaaccaaatgaactccctaagcaaagcctacagtgagaatgaggtcaaagaatcacttttccttctttcttgggataaagcccatggggcggatgatctcaatacctatttctaccaaaataattgtaccactcttggattaacctttgcaaagctattttggttgtcttgaacaataactctgacattttcctcatcaataacacagttattgttctgatcccaaaaaaaaagaatgcttccaaacttagggacttcagagccattagccttattcaactctttacaaagtggtggccaaagttcttgctaatagacttaagggggtccttgatactatcatctccaataaccaaagtgccttcctttctgatatgttgatctttgataacatcattatagccaatgaaatcgtgcatgccatcaacagcaggaagtctagaaagttaggatgggctgctatcaagttcgacatgaagaaagcttttgacggagtggagtggagctttgttaaagctctcctccaccatgttggtttcccccacaattttacctcccttgtgcttaagtgtgtttcctcggtctcaaccagaatcctcattaatggtagtttttctgaagtgtttcatcccacaagaggaataagacaagggaaccccttgtctgcttacctgtttctcttagtggatgaagggctctgagctgtcattcgtgtcaaggaatccaacatggaattctctggcctttcaatctgtaggaatggccttgtgatttgtcactttctctttgttgatgacaacattttcttcactcatattaatgctcaatccagctcagttattaagggcatccttcaaacctgtaatcgagccactagccaactagttaactttacaaaatcagccatttttttctcccctaataccaaccctgcagccaaggttaatttctacaactctctgggacttataaatgagggctttgtaagtaagtatttgggagttcctcactgtgtaggcaggggtaacaactctgccttccattacctggtccaaaatttctcatccaaaatgaatgtttggaatgctaagtttttttctagagttggaaaataaactcttatcaaggttgtggtccaagctatcccttcctatgctatgtcttcttttaggttgcctagtagcacttgtaaaagtctccaaaagctcactgctaatttttggtgggcctcaacaaataacaaaatcaaaatccattggaaaaattagtcttctatgtgtgtctctaagttttatagggggttgggtttttgatctctcacaagtcacaatcaagctctcctagctaagcaggcatggagaatcagaactaacccatcctcccttcattgttgctttctcaaagctcaatcctttaacaacaatgacttccaccaagctaccaagggactttgctcttctatcactttgagaagtcttctttggggcagagatcttcttttaaaagggtttttttttggaaagtaggaaatggaaagtccatcttgcttttaatacctcgttgggttccaagtttgactactcttactcccttacaagattctcttccccataaccttattgtttcctttttcattgatgatacagggtcctagaacagaggaaaactccagtagctcctgcctactgaccaagttgatatggtaatacaggtgcctatcgatcccttcaacaatgattgcctcatttggaagcatcatccctctagcctttttagtgtgaactctgcctatcatttggcaaactccttatttgcctcaagttctccctcttccattgagaaagacactacaccaaaaatgatatttaataacacttataaatgtcacaattatatatttttagtaacacttatagtttttgtaacatttgtaggaagtgtaagatatgcccatgtgaggtaaagtgaaatgttactaaatgagtcactttagtaacatttgaaaatgccactagaataataattaataacattttcaaatgtcactaatagatttttatatgtttatttttttatatttaaataatttttgtgacattttaaaattgttattaaattatattactcacatttgaaacgatgtcatcaatagtatattttactatttaaaatgccattttatcttttaaatattatataaataattaattttaaatatattaaaataatatataattagtattggtatttaattacttagttattatgagtactacttatacaatgataggtactataccatcagaacaaaaaatattagaattttgcaaatttgataatttcaatattcaatttttttataattacatgaaaatatttaggaacatacataaatagcaatttctatcatttagaacactaatacttgaattgcattggtatctatacatagagatttctcttttctaatgatttttaatacaaaaaaaaaagcatctcatacttcagcaagaggaagagaatagaaaattatcctgcaataaaaagaaatatataaatcagtgagaataatgcactatagcaaataaagggaccctctgaaaccaaaccttcatttatctaaatttaattaagtcaaccaaacaaatgaaactaatggaatcttgtatgcttaatagctgaaatgagaaggaacacagtcattaaataagtcaaagaaatataatgttgtctagctagttttcaaaatcagctatgtgggtaaacagatgcagaagttgctaccatcatttttatgctaatagaatgttgactgctaatcacaatctgtaaaatcaataaaaagagagatatatacaagttcttaacactaacatacatatatgtatattaaaaaaaagtaaaaaaaaaaaataatgaggtaactctcttgcagaaagttcatttaccaaatggattgatcaaaagggttatcacaa

SEQ ID NO: 23279 - DNA, 3435 bp, Cannabis sativa
tacacgtggtcataatgcaatccataaaccatactcatatactaggtcaagcacacttgtcatacatgtataaaatgtcaacaatattttatgaatatataagactttagtttaattaaataaatatatgaatagaaaactcaattatttccattcattcattatttataattatattgtcacatcaaaaattatgctcatcttcataatatttttaaacaaacttattttccttctcatatatttttcttttttgaaatgtaatagtgatattgaccttgttcaatgtaacactaaattaaatatatggttactaccgaaagtgccttattataattgaaacgtgtcatagccaaaattaagcatggccgcaattaggggtcgacaatagacaaattggacccatcttaagacaaatccatgtgattaattaacacttttcatgaccataactcataattatatatgacaaaactcatcttaattactttattaattaactaattataaaaatttatatttatgtttcaaaaagaagaaactattttgcttattgcttggccttcttgtctcttctttccttgttttctaattaatttattttggcactttttcttttttgcttattattttccatcactttatctaatatttttcaaaactcattactaaaattcaaatttttatattttactttaatttttcatttttttggacattatttaaatattatattttgaaatattttttcatttaaataatataatagctcaatatataattatttttgtatttagataaacattatttagataaaaatgcataaaataactgaaatttaactcattgacataaactcatttttgtaactttttttaacccatttttgtaactttaaaattaacataatatatatctaataatatatattggatagattttagaattttagtaattgaataaaacttttactttcatttatttagaagtactctaatatagacttaaataaaagtacattttgtctctaatattaaatattacgttcactattataaccgttagattcataataattaaattaattagatggttattaataaacatgcgtaccaaatcaaacttaatttaaacttaatctaactacataaactaacttgtgcaacttaacaaaaagagatagattgggtttgtcatacaattttttaaggaaatttacaaaaaaaattgaaatttaggtttatttttataaaaatactgtcacggaaatgttttcaaactgtatttttataaaacaacaatagaatacaaaactgaacaattaaaatcaatggtggaacaactaaaaaacaaccgtagaacaacagtgaaaatttaacaaagtacacgatatttttgaaaaaaaattctgacatacgatataaaaataaaaaaattagaaatttaagtatgtactatgtagtgtaattatttcattttttattctatatttatattattagctggtggtacttcttgtctggctatatagatccaatatttgtcaatgtctacaaacactttttttttcttttgcttatatttatttattaattattaaatgaattgagtggttctagttaatcctactagaaaattattctagtatgttgtagaattggacaaaacactttacactttcgtgatttcctaaacctaaatcacagatccattagagcaaattattagaaattcttaggaacttttgtatgattcgatactacaataaggtataaattatacatagttagaaatttagaatattagttgagacgtgacatgatttttaaatcaacttttttatatatataaaacataataatattagtaatgaatcaaaataaaacaagatgacaaattgagttaaaagaacaagatgaaattaaaaaatgaaggaaagataggtatgtaaattcggccacaaacttcgaaattcaatcttttcttatgatttatttcaaataacttgttttcaccttcatatttgactttatatgatatcaatactgaaaaatatgaagatatccttatttgacttaacattatatgattatttagaaagcttaatatgagatctacaataatatggttgaatttgcataacttttttcatttttttttatggaatgtggctctaaaggaacacattacttaggttgtatttgttcaaggccgatcctgagaataattaagttctaagtagcaataaaattattaggttattttcaaaaaaaaaaaatggtaatttttaaaattaccaaaaaatatgtgtatttttaaaatatattttttatttagttttgggccaataggtgcctagcacgccttggtcaagcccaaccctaaatcaattcccataggaaccaagtagtgttcttgaacttgcaactatttttcatcacactactcctactcaaccaaactttcagaagccttaactaccattttattttgatattttaaggaaaatttacaaaaatactgtaatttgaattaacttttacaaaaatactgtcacacggaaattttttaaaaatactgtgtttttataaaacaccagtaaaacacaaagcagaacaactcaaaacaccagtagcacaccagtaaaacactagtagaacaccagtgaaaacttaatacagtatactgcagtatgaaacttataaaaaaacatagtaaaaaagtaaaaaataccgcctggtaatatttttgtaaataaaataacaaaagttagtatgtcatgtaaattttcctattttaattaccagtaattggtaattaaacttaaatgattgttttgatagatctcttatctgtttagacatacagaaaaaaaatttagtctatttttttcatgatcgtatactttatagttatttaggaccacttgtaaagtttcaaaaaattctaaatagtttatatttctgtaaagacattctgtttataaataaaagttgtgggatttgcatttatgtttataaataaaaattgaatattttgatatgtactatgcaaaattattgatatttaatattgaataatttgtataaatatcagaaaatttcttactcatacatgaggttgtgacttgtattgtataattaaaatcatttagccataaataaaacagtcagtaacatattaaagatatggaatttttaatcaacggttgctagtatgattcactgatgcatgttattcggtgcaagcaatctcgattcgaattactgatgcagtatgacatctaagtgaaggtgttgtatataatagagattattcgaatcactctaatacctttttttagttttgtggtactaaattaggtatgtaacgaaataataattatgattatcaccgtaccatatccttggcatcaccacatgtatatatatgtga

SEQ ID NO: 23280 - DNA, 4506 bp, Cannabis sativa
agtttgcttatctttagtttccatagtttctaatgttgtaagtgtactttctgcatagttttgttacagacactgtcatgtatatatatatatatatatgtaacatttctctgttcttctttgtattctgtagaatttgaatcatctccagttcgttgtcaagtgtctgatgtgaaaagtactgcatgtggggctgatttcaccgtttggttatcttcggttgaaggagcttctatactgtacggtttttgtaggagattatttttgccattttttttccagggcaaatgaactccaatgtttttcgttttgaacatttggttacagaattatatctgatttgtctgttttctcttattaggactgcgggccttccacagtatgggcaacttgggcatgggactgacaatgaggtattcttaaagacaccatacaaatgtgttaacttttgttttgtaatgggaaatttgaatttatatgcatacatttggtgcatattaaattttttgaagtttgaacacgaacttaccaaaattaaaaaaaatgaacacactttatattaatacccataatatctttctccattctcttctcttctaacttcaccatctatactctatattttcattcataccgatggtagtctgatggtatctattttttttttgttattttttttatgcttttgtacataaaaaaatagtagtatcaggccaccattgaaccaccatcaaactatattatatatttatagatgttaagctttattcattaagctcgttaggaaggcattgagccaccatcggactgccatcgaacctttgtctttaatctttactcattggaccaccatctggccacacaaaaaaaccaattttctgcccataactcagatccgatcgtttttcgatcccaaattaatatcaactcacagataacagacattaatcatacaatttatttttaaatcaataaacctataaataaaatcatacatttcaaccctaaatcacacagaatacaataaaatgaaatggaaaacttatattcatggcgtggtggtcgtggttcggagatcatgggtcttgggtttgtagtcgtcagtgggctgggggtcttcgtatgcgtgagaagaagagagcgagagagacagagagaatagaggaagagagagaggagatgtgagttatgagaatgatattgttgggtttaatgaaaaagtgtcctatctaattaatttgatatatttaggtttagtgtatcaactttgcccaaatgtttgaatattaattcaaatttcccttttctaatttcgtttctagagttttgtagacattcttgcactttattgtttgaatattaattcaaatgtttaatgcacacctttatactggagtcactagttatagtccctcacatgttattgtttattttttgcagtacaatactaaagatagctcagtgaagcttgcttatgaagcccaacctcgccctaaaccaatagcttcgctttctggtgaaaccatcattaaggttgcatgtggaacaaaccatacaggtatttacattttctttttctctctccccacatgttaattttgttttcaatcttaactatactgagttttatacttgtttacattcttttggggagctagtcgctgtggatgcaaatggtcacgtttacacgtaagttcttatttattttatgtatttgtattttgtgatggggattggatataatttgctctaccctctctctcagattatttacatttctcaacttatcactcaatgacattttttctggttgaatgtttaggtggggatatggtggttacggaaggttagttctttttttttgctcttattatgtctttgctaaattttaccattcttgatgcaaagttgagactattttttttaacaattttatttattacagatttttagatttgacgtgaatgtttaaacagattacatcctgtgttggagcatcttctttctcttctcactgtgtatataatttattgaatgccacttttagacttggacatcgagaacagaaggatgagtgggcgcctcgccgtgtagacacgttccagaggcaaaatgttttacctcctgatgcaattatatctgccggttccgttaattgtgcatgcactgctggtaattagtttttgttactacatttgaattatgaagggatggatacatcatgatgtgacatcttttgatgtagactttagaagaaaaagatagaatatttgaataacggaattaagtgatgagagactaggagaagacagagaagagaatattcgaacattttttgttttctttgatatcatcaataaaaatctgaaatgctttgacataataaagcttatttgtaagaaccctgacattaactaaaaatctaaaatctccagaatatcatgatcatactacttttgaggcttgtataaattgattagggtgaatagatctgattggttactttttgtttttcttcagctggaggccaattatatatgtggggaaaattaaagactacaggcgatgattggatgtatcctaaaccactcatggatctaaggttctgtttatgtacctcctttatatttatttaagaacttcctttgtgttgtcatcttttcattttattttagagcttagtccctttttcattattgttggatggtgtggaacatatggtagtgctattctacttttgtgcttttcttttttgaaaccttatataattgtgtagtttgaaggatgtcaactccagttgatggcttaaataatattccttcttttttccgcagtggctggaatttacgttgcatggattctggtaatatgcaccactttgttggagctgatcattcctgcataagttggggtcatgctcagaacggagagctgggatatggtcccatgggtcagaagtatgtaatttatcattggtgaccgtttctttctgacaggtttctcatccgtctatttattaatgcctgcttatatgtttccgttgcattagatcttctgcagtgccaaaaaaggtggacattcttgagggtatgcatgttatcaggtatatattatttgccttgcattcatgttgctttcatgtatacctataccgataacgagtgctatatctggagcttattaataaattgttgtatgcgtctgtttctgtgtagtgttgcatgtggtttgagtcactcaatggttgtagttgatagaacaaatgttgccgaccaactatcgcaggtaacttctcggaataactacaaatatagcacggttctactaattaagttctcgttcttgtcttgggtacttctcgttttagtttttaaagccatgttgcatgttctttctagtcacaaattagcttaatttcagttttcaattcttgatcatctcttattttggtctttctggggagtaattttcccccctcctggtcatgttccaccataatttttgtatgtaacgatgtctcacatttccaagtttcgtgttctttcgcagcttgatatatatgatggcaaggcttttggtgaaggtacgttgcatttagtggttgctgacaagcagaacccgagggcactttgattattagataatattttcataatcatttctaatttttcaataaattttcaattaaaatttgataggaactcaattaaaatttaacctggctaattatctctcatagcagggattgaagaacctccaacccaaactatagctgcaaagccagctgcaaaaaagaagagtgcaggcaaggcatctgagagcgccaagaagaggaagaatgcaaaagaatcatctgacgaagatgaggaagacgacgacgatggtagtgatgatgatgaagacagtgataacagtgatggcttagtcaatggctatagtcataaaggaaaacggggtgggaaggtttctgggggaggtcgaggtgctcaaaaagcaccagcgactgcaggagaaaagcgaggccgaggccgtcctccttcagcagacaaaagctctaaagcagcacctgcagctcaggggaaaactggaactggcaaaagaggaaggccacgcagatcataataagttataagtttttctaacaggccatttttaaaattttgcactctcagtgtagagattattgatcaaccgctattgtattagaacttaaaaccgtacgtttaattttttttaaattttctgatatttttcaatttatttcctcgagattgtttccttagatactttttgatttgatcttatttaacttagagcactgaaaaaccaaaatacgtttaaacaaaaaccgaaataagatgagttgaattaagtaccagatattattttaatttattcattgataaacatttattagttggcctctttaaaattaaaatttaagaaaatatttattagttgtctaataaatgttgttaactaactaactgttttgacagttggtta

SEQ ID NO: 23281 - DNA, 3483 bp, Cannabis sativa
aacttaaccttcctaagcatagatccatgctttggcaggtagtgaatggtcagttactcactagaaatctccttgctttggttaacttgaacattccctcctttttgtgtcatgtttgtgagctgagaagtttggatgtcttaaacttcttggtcacttatttaaaacatagcttgtggcttaaaaatataaaacataaatttaagtgtaaacttcttctattttcatttcattataccaagaggttttacataaagaagaaaattgtactaaaatttacacaaagcttaaaggatttatcaaggcttggtcacctcagcctattggtagtaccgacataagtggtctacattcttggcgtgagggaccctcgatccatccattctcttaagttgaaaagttccttggcccactttttcaagtacttcatatgggccttcccaattggagccgaatacccccactcccggatcttgcaaagctagaaatactctcctcaagatgaggactccaacatcaaatgtacgactcttgactttgaattaaagtgtcagatgatcttgccttggtacattttaagttggacctgtcactgttcttggagttctttgattaagtcaagagaatagtttcaaggagggtcgtaggtgtctcattaatgagaggggatcatggcatccataggaattactgcttcacacccataagccatcgcttatggaatgtgtcctattgaagttctcttcgtgatcctgtaggcccaaagaactcacgaaagttcctctggccaatgagctttacattggagcttcttcttcaaaattgttttcaaaattttctttactgtttccacttgtctgttggcctgcggttgggctatagttgagaaacttttcacgattccatgttgcaccgaagtcagtgaaatgttcgttgtcaaactacttcctgttattggagacaaccttgtatggaagtctatagcaacacacaatgctcttgataacaaagtctaaggccttttttgaggtgacggtattcattagttctgccttaacccacttagtgaaataatcaactgcgactatcgtgtatttgactcctccttttcctgtggggaaggatcctactagatcgatacccttaactgtaaaaggccatgggctacttatgagtgtgatttcagtatgtggtgcatgtggaactttggcatatctctgacattgctcacatttctagacgtactctatataatccttcttcattgtgggcaaaaaatatccctagcaaaggattttctttgacaagttgggtctgaatgtgtgatctctgcaaaatccaccatgaatctcatggattacagtactgattttggttccagcgatgcacctcaaatatggcattgacaatcctcgacgataaagcttcccatccatgatcacgtaattgggagcctgatattggagtttcctagaaaaagccttatctgtgggaagctcccctgaatttaaaaaattgtaaatgggtgccatcaaagagtgtgagttgtcgattatggcatttaccccctggatctcaatgcttggtttctctaagtgacaaattgggactactctgtgttggataatctcagggctgttgcaaatttggctaacatgtccgcaaatgaattttagttccttggaacttggcaaatgttgtaacctttaaacccttgcaacagctcttaggacatcatgacgtatgcagccattttttcacccttcacctagtactcactaaaaaattgattctccaccaactaggaatcactgtgtactttgctctgttaagctcccacttgcttaaccaattttaagcctgccaacgtggctttgttttctgcttcgtagttggaggcaaaaaaactaaaacgtagagcactctagagttggtgcccttacagagagatcataatgatcccagctccagctcccttttcatttgacgctctcacaacatagaccatctaggtaggaaattccaggactggatctctaaaaggtcattcaagctagagcactctactatgaaattagcaaggtcatgacctttaatagacactcgtggctgttactgggtatcaaattggctaagttccatagcccatttgagtaatctacctgaggaccctgacttttgaagcacctggtagaggggatggttcgttagtacctttatggcttgggcttagtttttgaggcacagtcagtaagaaaaatttcaaattctcgatcatagggtacctgaattctgaacccatcaatcttttgcttacgtaatagatggggaactggaccttttcttcctctcgcacaagtacgacactaatatcatgatcagacactgccaagtataaatacaaaacttccccttccacgggctttgacaaaatggaaacttgagtcaaatgctccttcaacttctgaaaagctacttcacactcttcagtccattcaaatttcttattgccttccaacacgttgaagaacggtatacacttatctatagattttgaaatgaatatgctaagtgtggcaattcgaccagtaacactttagacatccttgtgtttcttgggcgaaggcatctcgaggaaggccttgatctttttgagtttgtctcaattctacgacagctgaaaataaaccctaggaatttctcgaaggaaactctgaaggtgcatttcttgcggtttagcttcatcccgtatttttttattaccacaaaggctttgttgagatcttatccatgcccattggagttcttagacttaaccaacatatcgtccacatacacctccatatttttccctaactgatcattgaacattaagctgaccatccactgataggtggctctgacattcttaagcccaaatggcatcaccttgtagcaataaatgcctttgttagtttggaacctggtgtgttcctcatccatgacatgcactttaatttgaatatacccagggtaggcatcgatgaagctgagcaacttgtactcgaacgtggcgtctaccatttgatctatccacgaaagtggaaagtagtcttttggacaggccttgttcaggtcagtaaaggcgatgcacattctccacgtgacatttggtttcgaaactaaaatagggtttgcaagctagactggatataaggcttcccgaaggaaatcattagcagtcaatttatccacctccgctttcacagcttctgcccttactgaatctaaaacatcttagcgagatgtcttatgaaaattaacttgagaaaagcctatgacattgttgattggtactttgttgaagagcatctcaaacacatttgcttcttttctcgatttattccctagatcatggtttgtttcaaaggcacaagttacagtctcttgatgaatagaagactttaagggtcatttaaaggggaaaagtgttgggttttatgc

SEQ ID NO: 23282 - DNA, 2813 bp, Cannabis sativa
ttgttatccaataatgttttaaaatttatagcatgacataaattttatgttttgtagtaatgaagtgacaaatgatgtttttagtttcttttttccttttttcgattgcacttaattgtgtggtccattcattgaaataaatataatttgattatgtccttacaaaatatattatatataatttgattatgtggaaaaaagtgtggctttgcattgcattgatttgataatattaaagccaaaaaaaaaaaaaaaaagaaactcaatattttttctttattcaatgatgttgttcctattttcttttctcattttaattaatttattcaaccaaataaatatgaagaaattttatagaaatttccatctgtgtttactttttatttttgttatttttaatgctattaagtttccaagaaaaaataaacaaaggtgtttaatatttatttctattgacttaatctaataattcatttgtcaaatttggtcaaatatttttcccaaaactacttattcaaaagaaaataaagaattttaataccaaaagtcattacaacatattgaaattacttctccaaattattataattatttttaaagttattgaataacattgacaagaaatgtatgacatcaacaaaaataaatataaatattaatattttttgtaataatgtaagcatttatatgtaaacttttattggaaactattgattgaaatttcaatggaaaagtaaagtaatgattagggatgatttatactaatttgtaattaagaatataagaaaatatgttcatttgcaattgacaagcctctatgtgtgtaaatgaagtcaaataatttatttttgaagtagtttgataaaaaaatatatatatatttttttggagtaatgcaatgtgtatcaaagtatttcacaaaaactaattaggtttagtattgtcttaatatatatgtggaagtgttttataaaatatatttgtattatatgtattataaaatatttttttttacattaaaatattaattgtacatatagttttttaaaatttttatataaatatctgtaaattgaattttatcagttatttttaaatgtcaattaatatctaattcacacaagtgtgtattttgaatttttcagttcaattcaatcttcacaaatgtggatattcacactttgcggattatgattggtttgactaatttatgaatacttttatttgagagattaccagtgagaacacgacaacgagagggtaagggtgaatgcaagagagcaaagtacaaacgattgaaagtgtagagactaatttgtcaaataaaaagaaaaatgataatcgaaaactaacttattaaaatatctaaaatataaagtcctatttaagactatacaattgtgtgcataattttctttgtttggttttgtgttttgaaaaggaaattcttcttaaccaaactcagatatctacatcaataaaatgaccaatataatgatcaattacatctcttgtcaaatgaaaatagctatcttgtagacttatggtgtggaggatgtagctcccattaaaagtgttaattttttttaattaaataattatacaataaaatagtaaaaaaaaacctcataaaataattataatttccattcgaagtaaatgtaaatattcttttttataataattaagctcccacgtcataacaaaaattctgagtctgtatactgtataggctaagttttgttaaagaatgagtcattcaatcatcatcacgataaacaaaatgacatgaaccaatttgataaagatacataaagtattagatatcttaataataatattattcgctatagaacaatctcaacgttgctagatagctaatatagtattcaaacaatcactctaaaaaatgttgatatcttcattatatcaccacttgagggtaagttaaattttgatgagatgctaccttttgaactacatttatatatgtgttttgtaatagaatagttgaaaatatattcatatttttatattataaattttcaaagcttaattttttttttctttttcaacaaaaaaataaaaacacacacaagattaaaatcataataaatgagataatttgttttgtaaattagtgagaaaaaaataaacatattttcgcctataaattagccaatatatcttgattgaatttatgaaaaaataaaattattttattttattttctcgaaaatattgcattcaataatttctttttcacaatatataaaacaaataatagaatttaagtaggattttattacaatattacatcataaaattagatttattataattcaatgaaaaaatatgttttgttgaacctactagagaaatttcaagctactgcatattccatatttgcacttctctacttaccataaatcttttagcacatctttaagataaaatagtactaaacaactctaaaaaaagataagcaaatacaccataaagagaacaatatacaataaacaaataatgtacattattgatataactcattatcaagtccaaaaactaaaactacattaaagaatacaaaaccaaaaatttgtataaatcttttgaattataaaaatacaaagagggcatcttaacaaaaaagtatcttaccattttgatttaagggtatctacacatttagtatcctgtgttttatcaaaatataagttaagtatcttgtgttttcaataatgcttatttgctaccttgtattttaaaatcatacatatttaatactttaaatttataaatttaattaatac

SEQ ID NO: 23283 - DNA, 1529 bp, Cannabis sativa
ttttgtaaaaataacttttatgaaaatttttattagcaaaaaggaataaccatgaattacactgtgcgaccataaacaactattatggttacaaaacgaccatagattacattgtaagtgaggttattttgtaaattttagtatttgaaaaggttattttggcaaatttctccctccataccaccacttaaaatttcattgcccaaaaaatttagacccaacttcagtaaacttcgatattcaactcaagacttgcttaaattccttttcctagtcaatagcagtataaattaagaaagaccaattggaaaagtgaattacctgttccttttccaatgaagacgcagtatcgttggaagccattggaacctgtaaataacccaaacaattaaatcatcagccctttcaaaataatacctaattggatcaattacaaccaacaatcttacaaaatggtgaaattggggtttgcacaagtactcgaactacctaagggttttagaagaaaatccaatacagagttaaaatccctcttgctcgtttactcctcgagatccagtaattgtgttgttagcccaaaagaaaaagaataaaagccctagctttattaatccaacagctatatatagtcgagttagggtttaaagaagtaagtcttgggtgtatataaggtagacggaaatttggcgaaagcattgacaaatgtcgaaaatttagtaagggttttacagatatccaataatataatgccacgtggaaattaaacagcatttgattggttagtaaattgggataaaactgtaattttgcaaacattccttattttcttttttttttttgacaaaaatttcgtaacatcttcttcaaactcaggaagtattagcaacttcctctttggcgctctcttcctcctctcgttctaaagattcaaagaaccccggtgatactggtaaactccctctctctcgctctgtttctcgatatatgtttcaaaaagagtatgagttagtatatgtttataaggttgaagtttttcgtgttaaatcttttgaatgttagagaagtaattggactgaaatttttatgatgccgttgaaattagataatgttttttttaaaaagaataacttttttttttgtccttttattttaattttaattttattcttttagaatagatgaaagtgattttaaactgttgttgttgtggtcataaacatagtggaatttgtatgttgagtatgtttattgtggaaatctttgttttgggtttttatgaataataacttcgcagaattttctggagttatggaacacgggtcgttttcagatcttagtaaatcatcattttctttgacggatgaggatcatacattggcaaactcaattaggttcactttgaatcaggagtaagtgctcttttatgtattgtaacatttatataataattttttgtaggacttttttttcaaatttaattcatttaaaatatggcataattgtcaaagccttcaatcgtattagaactt

SEQ ID NO: 23284 - DNA, 3148 bp, Cannabis sativa
aagcctttgaagaagtttgctccccaaagaggcctccgtcaaggtgacccgttgtcccctttcttattccttttgtgtcatgaagtgctatcgaaactgctaacaaaggaacaggaaatgggtactctcaaagggatcaacatagctagaaatgcccctcctatcaaccacctcatgtttgcggatgacacaatcatatttgcacgggctaacgctcctaatgctcaaataatttgtaagtgcattgaaacctacgagaaatggtctggacaaaggtgcagcaaacccaagtccaatctacttctctcggcaaacatcaatcacaaccaaaaaatggaaatgctaaatttcctggaggtaaaggagtgtactgggcaagaacaacacctaggcaacccttttgtctttaagcgaaggaagaaggaagagtacattcggctcaaagagaagatgttgactcgccttgagggatggagatgtaagctactatcttatgcgggccgagcgaccctagttcaatctgtggtcatgaatcttcccctgtattcgatgtcgacttgtaaagttccactgaccacttgccgtgaacttgatgctattgctcgcaagttttggtggaccgggggggtggagaaagaaagatataaggccttgttaagttgggaaaagatttgccgccccaaaaaagcaggcggtttggggttcagaagatttgaagacatgaacaaggctttactcactaagcttgcctggttcgttgccaatcatcaagatagaccgtgggttacttgtttgttggcaaaatattgcaacaaaaagaatttatggactgtagatccgggagggaatgactccccaatgtggaaagggatcctttatgccagaggggttatccgggagggaagtatgaccctaattggggatggaactaatacagatgtgtggcgccagccttggattccttggctaaacttcagagagtttagggagttgatgagctcgattctaccgatgaatccaagcctgaaaacagttgctgatctttccctgcctggcaacaagtagcatatggatgccttgaagcacctctttggtagtaatatgggagaaagaatagggagtatacctagattacctgcccctgcatcggacaatctgttatggaaaaaggctaaagatggggagtttacagttaagagggcttattgggagtgtatgaagcccattatggactgcaccagtaagatttggggtgccatctggcacaacaatattcattgtcgtctctcgaccatgatttggagagtggcggtcgggtgtctacctactaaagataagttggtgtttgtgcaaagcaagggttgttttttgtgtgaggcagatgttgaatcacatgagcacctcttttgggactgtccttttgcaaaagctctgtggttcagtgggccatttcctaccaaatactcatcctgcgagggcatggggtcgaaagatgtcataaatgaaatcctcctgcatactcctactaacataaagaaggagttcttgtcgttcatgggtgttcttttcgaagaaatatggaaagtgagaaatgaagttatgatcaaggccattccggccaacatcgaggcggcgagaagtaaactggtgcgaagatttcatgaatttacaaaagtttcagacaacagagtggatgataataacttgaggaattctatgacttacctggaaaggaagattcttgaggaaacaagatatatctgtgttactgatgcatcttggaaagatggagtcgcaggcattgctgtgggaatcttcggaaaagactcaggacaatggagttggaatgcaaagagaactctggctagatctcctgaggacggtgagctgcaggcgatcacttgggcccttcgtttgggtttggatcacaggtataactcgatcgctattttatctgatgcttcactattggttcatgctcttcaaaagagaaaactccctccttactgggagttgagaccgatggttttggagacttggaatctcttggacagatttgaatctgcttccttgttctttgttaagagacaggacaattattatactgataggttggcaagatgtgtaagaattaatggtaatttggatggttgttatcaaagggaggggtccccttatgtgattcccaactaccttaattaatgaactttaagtgttctttcaaaaaaaaaaaaaaaagatacgataatgtttattaaatcatgatccaactttattatgcacccacaaactttttgcttcattattgtacgacagcctattctcacaaactaataatacaaaaaatatatcaactgctccaacaattcacatacgtgactcaagaaattcatccgaacgaaccttctccaatggaatcaaaggaatactctgatccccaacaatctgcaaaataattaatttgtataatttataagtattctaatttacatatattgccatgaaaatcatatgttatatgtaaagttaaattatactaaaattaaccactagctgtgacatatatgtgtatgtatatacgtaccgatatttttcttgttaatagaaacgaaccaagcttctccaatggaatcacaggaatactttgttcatttctgaaaaaatttcctggatctaccttcctctttatctccaccaatctccaaaaattctccttaaaatgcgtaattccaagatcatgcgcagtacgataattattagtcttccaatcgtgatcgttgattcccaaatcaagatctctgtaattcaggtaggactctctggggttgtttgacacgtacggagtcatatggtcgtacaattttctcatcaaaccaatgtagtaactcgaagcctctgttcctggttcatcccaattcaacttatactgaatcttagctaagttcagtcgatgcggaaaaggcgttgcatttgttggaatctcagccattctaccaccgtaaggattgaaaaatagagctggatattctagctcaaccattttcttgaagatttcgttcagaccatctttggaaattggtttcttcaaataatcagattttcttttcaagtgaactagcttctctggttttcgacggagcaagtactc

SEQ ID NO: 23285 - DNA, 2420 bp, Cannabis sativa
atttacatgatcataaaaaaaaaagactaaaaaattatttcagatactaaaacggatagagatgtatcggtgcatcctttttaagagggtacattatagaattttctaatattttgctagcaagaaaaacttttaatgatattaaatttagggtgattctacaatgcacccccttaaaaaggatgtactgatacactctttacttatttcggtatctagaataattttttagtctaattttttttatagtcatgtatgttatagctttttaagatattctacaacctttctctctctcacttagccgtcgcccgtaaaggtcaatttgtatgctatagccaaaacacgggtgcctacgatagttacacatactgcactccaaactcccaccaccacctttctctctctcacttagccgtcgcccgtaaaggtcatatttctgacctttttttctcttctcaagttagctatatatatatatatgtaaatatggcattactaaatttgtttcctttagcttgtccgtaacactctgcgcaatggtttagttttctttacttgattagggtaatttggaaaatgagacttgggtggattgcttcttccagttgtacaactccaagaacacttgagtttggtgcctttgtttgtcaagagcaacgtggttctcgaggagccatggcggctgcaaggttctggcaagagtctaagaatcggtcccaacgattaccagagcctgcttctccattctctaggagtactgcgatgagagcttttgccccatcaaagctcattactccgaagaagttatccattgagagtcctgtattatctcctcgaggagtacttagcagtagtaggcgaaagacttctccgattaaagggatttgtcgtcctgcgtcaccgagtaaagcttccatgtctgttgtgtcatccacgttgaggggaacgagcccattgcagatcaggaatttagttccaggtacgatgagtaataaaaacgcaccatcgattttaagttttgcggtcgatattcaaagagggaaagcaggagaaaacagactacttgatgctcactttttaaggctcttatataatcgtctcttgcaatggcgattcataaatgctagagttgatgcttctctttcggcacagaggttgaatgcagaggtttgctttattgttttaataattttatttatttatcttttcacttaaatcagtagctcttataatcacttactatgtcatgtgtgtgttttgggttagatttgccatatatcgagataacgacaacttagaaaatgattttttaacaaagaggaattgtatatcatgttagatattatatttagttctactcagtattactataccttcctgagaaatttgacagagggtttccgtgaaatagaaaagtatgtgaataagtgaaaaggttatgttgaatgaaggatcatgcgcagttgcttagcactggtgggaagtgctaagtgacagtaaacttctggcaatgaagaaaaaaatattgactagtagtagattttgtcagaaatcgttcatttagaaaatacaccaaaaaggaagtttccaagcttctgaatgtcaacactagtgtgaaattagaagcctgtttatccataataggtgcttcaagtctaaatctataaaactgcattttgtagggtttttttcagattactttacagctattctgcgagtttgtttgtgtatgttgttgtactagactgttggtaggttaatgactaaaaaaggataccgatgacaatggggcaactggattttattattttttttcccagttgttttttactgagtcagtagttataaccctcttttagctggacaagccgacttttgacctaagactaaggcctatgggaacgggttaattgttttactttggcattctttacagtttagagtgcatatctactagaaattggctcccaaaattattaatatcgtagactagcagaaaattaaagaaatatattttgcttatctgaagctcgagaaaaccttcgagtgttttttctttctttttttacatgtatttttcttttagttgaaatttattaatttatcattgttttctttgtttatttgtgctatttacatggtagaaatttattagcttgtgtctctttgtatcagagaagcatttttaatgcatgggtcacaacagaacaactccgtgaatctgttagaactaaaagaatcgaattacaattgatgaggcaaactctgaaacttatttccatcctaaaggagcaagtaagatttcttattgctagatctgtttattgagacaatttaagtgagaaaaacagctgaatttttggttctctttaggaagggattactttttattctgtttacctttgagagattacttt

SEQ ID NO: 23286 - DNA, 5463 bp, Cannabis sativa
ttcaatcttttactattttgagttatattttgagttgcctgtacacgtatttccttagaaaatatatatgtatgtatatactagtaagctctatattagtaaaatacctttagctgtgttttgaaactcgggatctcgacccatataattaaagatataatatattaaataaattgaaaatacgggcgttacaataaaagtttctgattatcatggtaccatatccccaagatcaccatacatacatatattaaatctaaaagtaaaatagatgaaaagatagtttacctctcaaagcctattagggtatcctcgagtctttttcgtatgttgtattcttggaacagtttcatcaaactcacacattattcttccatatcttccatcacacacaagaactagtgtgcactagtaggataaaatgtatatgaagttcttgttggattctcaacacatgagcaagaataatttagagtgtttgagagaaaagactaaatcaaattaatccttttaggctttttaaaaagttatgctaaaattcttgtcccttaatttggtttacccggtatattaaattaacctaataaaaattttatttaattaattatttaaattcaaatcttcttattaaatcatatatagcaatttgagtaaataatacaaccaaattctagggtcggggctggggttgggcccatggtctgtgtttgtggtcgaggttctcttctgagcccgggtataagtgagggtcgagttcagagtccggagctagggtcaggatcaactatggtaaagatagtataatttttacatatcctattaatacaagtcaataccaaagtattatattaaataacacagtacaatgttccaaacaaattccgaatctgtattttataggttttgaatttggtatgagaattacggtatttcatatttgtggaaattaaattacactcatatttataattaacgtgctgagctgtaaattatataatattcacttattcttactttattctattaattattattattattattattacctatgtggtatggaaatagaatcacaatagctgctagaattgacaatttttaactgaaagtggattattgtaacattcagatttcaatagcacaaaatgttgtaaaatacaagcgaattcagtctatttgctttgcactcaagtgaattcctgtccatccacagcacaatgccccttcccgccaatctaatcatattacacagttaagagtctcagtcttctgggacttgggaatgtcaaccttcatcttcccagttccagctgagctttcttgcaagttgttaatgcagctaacaaaagttggccatcactaacatctcggcgatggctgctatcgattccagcatcagcatggacacagcaaacaatgtgcttgtgcttctgcctgtctgcagccacaatctttcttttcctgcacttgcattgacaaattaactattaacatcacctggaccacccctattctttcgagtttcacgtctttactcctcacagaaacatcattaaatatccatgcccctgaataaaatggaaacgtttttgcaaagtcatggctaattgatactgaaaacttaagaaataatcaaacttggcaatgggggcatacactataaagcttcttttatttgtgaacgagatacaagtcacataacattagtatataatttaattctctttagttttgtctgttgttacttgacactaataacaaacacaaattgttatgtccagtaaacaaaatggcaatctggtactataattttaagttcagtcaatttgcagcttcgatggactatataagatgtcaaatggggaacccaaacattatgcatgttttgtgtttgcaaggcaaagtccatgcaataaagtcaaggtataaactatgatcatcctgtatgtaatgtctaaatattattaagtaggtagcatatgactctagtcaagttaactgacctaaacaatttaaatacaccaagagatggagtaactctagtctagacatcttaaacataatttcataattgaaagtgccacatcgaaagtgctctattatggaagattagccacatcaatctgcaataactaataaaaaaaccaagaatataatttatgaagatgtaaaaacaatatctctggtgtaacttgagatcccactttcagtttcccaagatatctatatcaattttatcataaatggtaagtgttatggtttgcaaaataggtatataaatgaaaaactaaacaagtaagagcttcaataatttatggttgacaaagctgtatacattagaaagaacaatgattcggcatgatctcgtttacctacttgatgtgacaagttcataatcacacaaagaaatgagttcttatcaagaatctatgtgaattaaagtggtcatgttaaagatgtacacaatagataatgcctggaataatacttgtcctatttaaatgagggggatcctgaaattcttacctctgctattcacttaattcacatataaatctaagcatgcttacactagaaaatactcaaaatagcaggttatttgtaagttttggctgagcccataaaatgagagcactaatcaaaaccattgctttgctacagattgcccttgataaacgcaaaaaggccaaatcaataaaaatagaacagtaaaacaaatattgcatcttatcaaagctacttgtaaggtggtccaagtactcacagtaaaagattgagcttatctatggtgtaagagatcctggtccacggattcaaattctttaagattgctaactacattttgaactttcttggatagctgatcactgtgttcttcaacaatttttataaatgcagtaagctgttcttgatatgtagtgcatagtcgcttcttattccgcagctctgcagtcaattcctgaatcttcttatctttttcatcctaaaaatagtaacgcacaaaaacaagataaagccaaacttatatcatacagtacttaatcatcaaccatgatttagtaagaaaataataaaaagaaaacttcctaatgttaacaacaagaagagaagggaggacagccaactgtctcatttgtatttcaaatatgaaaccctgaactatccatgtaggaacacctttctaataacttatagaagcataacagtcttcaaaagtttccaagtaaaaaatagcccaaaaatatatccacctttcttatcactattagacacaaataaaagaaataaaatgtaatgcgttaccaattttgtgttgttataaggatgcctaaaaaatacaattaaagctttaactttcaacagaatggaaaatataattaagattcatgatacattcaacttgatttgaaatgatttagtgctcgaatatcacaggcaagcaatgctgttgagtttacacaaggtagtgaattctccagagcatttggaaccactatcaggtcagcaggtttatacacacacaattgttcaatttgatgattaaatgactaaaaaattcatcaaaataatttagaacaatcaaaaaattgatgaggccagaattgttgatgcctacacatttaatcaattggtatattctgaagaaacatgtaagatagcagccaaggactatgcatcatatgtattctcagaatgtgtgagggcatgaattgcatgagtgtctgtaaacacattcaccaaaactgatgtcaagcaaaacattataattatagaaatttcctgaatttctattaacaaatacattgttatattaaaaacaggcaaatatgtgaaaatgtttctgatgaaaagaaaaatagaatcgccttgttagagcagccacattattaaatacaggactactcaccattgtttgacgagcttcacgaggtgagaagacaagtgggtgattatggtcctttacaaatttagtaatcacccattttccagacttatcatacttaacatgaatcatagccttgcaaccttctcttgtgctgggtcgaggctttcgaactggcccaaatttacctcgaatactaacacagtgaccttccttattacacccaagtcgacgggcaagaattcttccatctctttcagaacggcgacatgacatgacgcgcatgacgaaccccacctgcctcgcatactcatcatagaatatcttggcagcatcttcagaatcaaatgccataccctcataaggttctacaatcccatctccttcatatgtccctaactcttgctcttgcacaccacaactctccactgcctcagctccctcatctgaatccactgccaaaaattgactgtcacttatttgtcaaacacaaagcaaagaaaaacccatcatctcactataatgagacaataactcctttagaaaatggattagaagtagtccttttggactttttttaccataaaagaaaatgtattaaattcataaattcgttggctcgttaaggtaacaaaaaccaagtagagtttttttgtttttttctttctatagactactagtatttatgaccctccctcataatttaacaaattattaatattctgttagttattttatcgaacgcttggtgagcggagcggaaaacaaacacaatacttaataacccccgtttcagattcagtgtgttaaagtcagttactaaaaagccatacacatccaaaaattaaaaaaaaatacgatcaaagcaaaaataatacggccttctccaatggcagggcctaatagaatgggcaccaagaaaaatccaaagcaaaaaaagagaaaacaacgcaagaggccgaaaagactcgtacccattaaatttaaggcccatgttggtgtaaatacatagttatacacatatactttttagcagttcacttaaatgattgattgagatactgacagagtgagcaaaaaaagggccaatagaattggaagactgaacgagagagagacaaaggctttataatgggttgtcttcgaattgggtacttacttgattggagagcagaggcagttaagatagatacgtggaggcgttgtggttatggagatggatttccgttgaagaattgaaataggatatggcgttacagcatcacagaatcccgggagagagagagaccagtgttgaagctgtgtgattttgtgtgggtggtgtttgatatggtgaatcagggtatacaggttgacgatgacactgtaaactctaaaccactcctctctcaccacttgtcacctatctcttattgcccttacatctattataatttactaacaactcacgtgaatcaagtttatttatttatttgtattttgttaaggctaattaagattctaatccccaaattttaatatgtattaaatcttgatcttttaaagtcgtcaaaaatatttcttgaactattgagattgtt

SEQ ID NO: 23287 - DNA, 2392 bp, Cannabis sativa
tataaaattatactatatacttaggggtggttggttcatcaagaaaaaaaattagagatgaaagtaaacctaaaagttaagacataataaaaattaatttattaaaaaatcataatatagaagaaaaaaaatatacaaaaatagagagtatgtatataaaaatatttacaaagtataaatatatatagaaaaagattaaattataaataaaaaatttaaatattaaaatttcaaggtcaacataggccactcctaattttatgctaaatctgtccctgtatatacttgagttttaattcttttagaaaataaacctttgtttttcacttgaatctaaagatgagagaataaaattcttcaaacttcataaaattcaagatccaaacaaaggtttaacaaatgaataaaatagacctacaaatttacttaactattaagtaaatatgtaattatattatggtaacatttacatagctattctcattatatttgaactttgttaatgatacttaattacttagtataatgaatcaaattaagaacttttgattcatcaaatatgatagtagaaaagattcataataatttttgtattaaaataaacaaagcataaacttgaatgaaatctttcttctctggaaaaaaaaaaagtttattatctaacctaacgagtaattaagtttattcttatataacttaataccaatgtcatcttaaaaaaaaaaaaaattagtataatcatcgttatttattaaagttatttaaacattactaatactcaataccatcttaaagtgtaagtattactattaagcactactgttattattattgtgaaaataatgttattattatttacactaaaaaagcaccgagaagaaataaaattaggtaaaaaaaaaaataacaatttgcggcaaaatctctttatgttttaatttttataccttaaccccttttttcttgtggcaaaacccccccttaagtttatttttttttgttaatttgatacgtcagttaaatatcaactggatgaccactatatacacttgtatatatgtaacagtaaaccctcaaagtcgatacagtaataatccagttaaaatttaatggtaatatctaactgacaccttaaatttgtaaagaaaagtaaacttaaaagaattttgccacgaaaaaaaatgagattaaatgtataaaaattaaacatagattttgccacaaattcctcaaaaaaaaaaaatgtgaaaatatttatagcatatttgataggctgaaaaaaaaaattacactgtcaattgagaaaatatcttgaaggtaaaaaaaaatacagtactacaattttctataataatatgatagaaaataaataagcaaattagaagaaaaatgactgaaaaaaaattgcaagagaatatagaatgacaacaatttcaatattattccatgcaaaagtacaaaatattcaatgctttacatgggatatagtcagaaccatcccctgcaaaccaagaattcataatgctttccgaggcagaggcggagggattttccgagggccacctttcgattaacctgaaaccgaactgagaggcagttgaaagtatggttggctcgtccactcgccttataatatgacatagaatcaatccaggctgatgatccttactatttgatgaaatcatctctttcgcggttgcaaatagaggcgaaatggcttcagcaatgtatgtaacatctgtgcctattatgatatcgaaaccattgttgtttacttccttgattgtttccatgtgttctttgtttccccactctagttttttcacaatcaatttgtttgataatggttgtttgagattcgaggagacattttgtgtcaatagctcgagggcttttgtgtctccatcggtggcgatcactaggttagcgtatttagctgcgatcattgagcagatacccccacaaccggcgcctaattcgagaacctttttttcggaaactatggatggatttcttgctaagactgaagccattagatgagctgattcccatatcattagaccggtcgatgtgcatgtgtgttggtactctttggatagtcttttgatctcgaaattatgatctctgatctttattatctgtgaagattaggagataatattttagtgtcaaatgaatttaggaaagattgtgaaaatagtgtttctgtttttaggttttgaaaaaccgaatagggtactgaggcattttcccttagtcccacaacaagaggaaaaacttcgtaaaacttataaaattcataatctaaggtgctgtttggtaacacttttattttctaattttataattacaaaatgaatatttaatttttatttttaaaagatcggaagag

SEQ ID NO: 23288 - DNA, 2041 bp, Cannabis sativa
ttttgggttttatagagttatttttagtattttcggttcgtaagttctaacttttataaaattttcataaaataattatgaattgtcacaaattttcataaaattaattatgaggaagttaggatattaaaatcaagattaaaataatatgtcaataagctagttgaattttaattttagtatattcttaaattatccgaaatttttaagttcttatcattataaatagtccacttacaaaagaaaaaaaaatatattattacaatttcttgtgtttttttcctatgaatttgttataatttttattttattttttcccttttggttatgtatatatatatatatttagaggacaaattcttctggtttagagatgaagagttttgtagacaaactattgccggtctcaacccttgctgcattgaattggttaaggtatatatatgctttttcatatacatatatttttatgagcatattggtagtatttttacatgtgttattgcaattaagttaacaatagagttattatattaaattgagtattgttattaagtattaatagtgtttaattagtactttttataagtagcatcctatgatttattagcgatattttttaaaaattattttcttaaattatatgaaactcaatacttaattaatacaccaacgatgaggatacaaagcaccaatagtattatatgagactcaataattaattacactaattaattattgatttttttgaaatttttttaggagataaatatagaatattttaagttgttcttattggtatatatgttatccaaaatccatgcggaagtggcctttgaaaagtgaacttgaccccacaatctatggcccaccagagtcaaaaatcaccacagaattggttgagaaattcatcaaagtatatggctacaataatattaatgaggtacatatatatacaaattcaatcacattaattaattaaaaacaatcatgtagtccaaaaaattaatgcaataacaaaatgaaatttttatactaatgttatgtttattttatttatgcaggctttaaaagaaaaaaggttgttcatgttggattaccatgatgtattattaccatatgttagcaaagtaagggaactggaaaatagaactttgtatggatcaagaacactgtttttcttgactccttatggtacattgttgcctttggccattgaattgactcggccaccgatggatggtaagccgcaatggaaggaagcctacaccccgatgaattggcattctaccgatctttggctttggagactcgcaaaagctcatgtccttgctcatgattccggtgttcatcaactcgttagtcactggtatttaccattactaataaaattatattttacttttactcataattaaaaatacttgtaagttaaaagtatttagttacaaattatcactaacatataattttaatatttcagcaaaaaagaacaaatagttctagtaacagatcaaccctgagatttattggaccttaagtattaacaaaattatttgggcccttataaaaaaatgtggtattttaaaaactactaaaaaatatatgtatttttaaaataatttttttttggtcttcggggctttgaattgggtggaccctaagtgtaggaaggcccgaccttaggcataagtgggctaggcctgtgcttagggcccacctagctcacgggcccaaaaaattcttcttttaagattacacatttttttactaattatgaaaaatgccacatcttttatcgacccaaaaatattttctttcctataacccactgaattttaggccagccttaagctaagcctaacctttcttaacccagatccgatcttatttagaaagatccgatcctatttagaagtcacaatatttgtgtgatataaattttagttaaacaaactttgacaaataaataaatatatatttttttttactacaagtgatatgttatgtattaattactataactttttctattttaacg

SEQ ID NO: 23289 - DNA, 4188 bp, Cannabis sativa
  modified_base (864)..(870): a, c, t, g, unknown or other
taaaatacaaataaaaatcatacagcacaacccaaataacatattagacagcaacaacaacagcaaaatttaaaaggcaaacactgtaacaaggaataataaaaataaaagagtagcagaatgaaaaaattaaattatcataaagttacaaatcaaatctgaaaacattaataagaaagaatttatgatactggaaggaaagcatagaaaacaaacctctacgaacaaatttgaaaaattaaagagagaagacaaaagaatccagaggcaatgatcaaaaacttcaggctaagtaaacaaaaaattttgagagagaagaagctttcgtcgttgtttggaatcagcctctgtaattttagatctgaagttcttcacacattcgattaggagaaagcacgataaaataattgaaaaaattctgtagagaggttttgatcaagctctgcatcgtttctcataatttttgttgaagcaataaaacatataataccttttatataataaagagtattttaggtattaaaaagtatataaagacatttgctttattatttaaaaaaaaaacgacatgaactatcaataaagttagaaatagggccatttttacttgcatttctcttaaaaaaaatgaaatttacatggtatactcacttttgctatttttttacaaaaatactgccatgcagtattttttacttttttactgtgtttttataagtttcatactgcaatatactgtgttagtttttcactggtctttttcagttgttatactgttgttttgagttaatctattttgtgttctactagtgttttataaaaacacggtatttttgaaaacttttccgtgtaacagtatttttnnnnnnnttaacccaaattccagtatttttataaatttccctaaaaaaaattaccaatcacaccccaaaagtaatatctttagaatgtaagtatcatacacatagtgcatgttaatgtaagtaaataatggttaattttatgtgcctttcaatagctcattgatgcttttacagtggaacacatatcacttgggtgagtaactgatatgcccaatagagaattttaggccttttgatctgctcctatatgctcaattcatagaattttcttatgtttgccctattttgtgatatacgtatttatgcggctatgtaattaaaattataactaagctttacatctccttttcaattgtattaaaatgtttgtacaaatcagaaatcgaagttacgacctatactatattttacatacataccatacaataccactttctttctctattttcagatactcgacccagtttcgaaggtaacataacgcactcaacataatttctagcaaataccaatacttttttttttcttctctactatttgttctgggtttctcataacatgttgaagcaccacatgcactttaactacttgtagtttgttgtacattgcataacatgctatgtcattgcaacgccatctgtcaaactacttccgtaaaaagttaattgctccctatcaataataacattagctttttttttctttccctttttcctcttcacagtagcaaaatttctgtaagatcaacttactgtactgtacacagtttaaacgaagctattcttaccaatcatattacattcccaaaccaagttcatcctcaatgtcatccccatcttcaaacagcttcaagaaccgagcttgatcttgctgtctctttttcttttgccaatacttgtacacagctagcaatccaaaaaccaatacagtggaaacaacagcagtgatcagtattaccagagcaacatgcactccttttcctcctttatgcaactcagagctcgatttgtttgctgtaacacaaaaacatggtctaaaattagctaaaattgcacacaaacactatgaaaaactgattggatcttccggttcctatagaacctatcactaaaatgtcccttaagagaaatggacttagtgagaaaggtttaccatcagattgcaaacagatgctattagccctatgtctgataatgagaaaggaatatcatatcttcattaagaaaaagatcttctgataaaccgacaatgacagactcaacgaagaatttattcagtattcaaactctcaccactcaccagtagcaaatggtatacactgtggacaagagaaagtagcattcacttccttgtccttgaatttgaagtattttccatcagaattgaaatcagaaggacaaaactcccactcctcaaatatatcatccgacttgaatacatccttctcatacaatccacagcgcttgcattttttctcagaaagttctgttagaggctgcaagagcaaacacatattcaaagattggatttacgattccatactttaaaattagctgcaaattctcatacaatgaagccagccaagcatcccaaaaaattggaaaactatacaaagatctaagctttgaaagtattaaccaacaaagaacaattccaaaaatgacggagttaccacattggatttggctttgggttatatcattccccaaagtgaaatccccatatttgaaccccaaaaaccctaaatagagggcagtcccaattgggaactgttgtcccaagttccaacatatgaaatcaaacaatggcaatctcagtcaatgctcattaacaataaaatcaatataatttgtagttcatgtttgtttgattcatgtaattaagatagttagggtttcacaaaaagaaaaccaatctaaaaaaaaaagttctaaaatctgaatataattaatctaatgtatcttcttctgtacgacgagttacgaattgtcaaacctgccaagactcttcgcctctgaattcatacaattcattcgccttcttcacatccggcaaatgggttctgttctcccctttgcattgaaaatacacatctggcttcacagatttcaacaactcatgggttctgtatatctcaatcgaatccaaagtcaccactgccgataacgccaatcctaactcacacaatttgccaattcaaaatcaaatcataaacaacaaatcagcacaattatgtttgtttaccgggaaaatttgccttacctgaaaagaagctgagaaataagccacatactaaaaaaatctcagaaactctcggcatagcgtttaacaaatctgagaaacggcgagtgcacagaacgcaccactctattacgacggcgtttggcggtagttgtttcacgttttatttttttattttttcttttgtttttgcgtgagaaaatcgaaatggttcgatcagggaataggacaggggaaggtatgtaagacaagaactaaaagtcataaaacactattcacgtctccctctatgattatgccacgtcttgcttggctttttagtatttgttacgtggcaagatgagacggcgttaaggatatgattgttgaccatccctaatattgactttttaacccgtttaacccgaattgatgtatgtgacttgcaccgccaacgagcttccccttgtgttttgtagttaaattcgttgagattagagaaatactcttcgaggactcactcttatctttttaaatacactagagaattatccaaccaatttttcataatagttgtaatccttaggttattaaatcattaaattaaataagtgatattattagaaatagttgttaatgtgtagaaaataatatgcactacaacactctacagcattcgcagcggaccactctaccgctaataccctctcttttggccgctatagggtattagcggctagggctgaacattttgagcgggtttgacccgaacccgaactggtgaacccggaaaaaaaaatttaaaaaaagtttcgggcgattcaacccggtacccttcgggtgggttggcgggttgagattttagggataccgggtttcgggttgaacccgcgaacccgcccgccaacccggtttataaatatattatatatatttttttttattactgtttttatatatataatatggactttagatttttatggactatggatattggatatagatgtattttgaaatattttagttttcacttttatcatgattcatgcacatgaatatggagtctgatttgaatctttgataaataggttgtttgtttgtt

SEQ ID NO: 23290 - DNA, 3872 bp, Cannabis sativa
ccttttttctgaaactgaaaattctaaactaaaacatgccctctcgattcataatcccaacagttccgtcaccggcgccggcgccgacaccgtcaacctcagccaaaccccactaccataacatccctctactccctcccttaacagctttctctttcctcttcttcttcctcatcatatgctgtttccgtaagaagagaatcgaatccccaaaaccaccacctcacagcctcccttattccgtcctccgccgcgccaccgactcattcgccgcctcacgccggctcggccaaggtggctttggcccagttttccacggtaagcttccaaagacgaatcaagagattgccgtgaaggttatggactctgggtctcttcagggagagagagaatttcaaaacgagctctttttcgctgcttcgatgatgatgaagctcgatgactcaaaacgacatgtcgtttcggtattagggttttcatctgataggaaacgtagaaggatgttacttgtttatgattttatggagaatgggaatttacaggaggctctgttgcataagaaatgccctgaattgatgaagtggagtaacagatttagggtttcgattgatatagctaaaggtttggaatttcttcaccatggattggatcaaccgattattcatggtgatattaagcctagtaatatacttttagataaaggttttaatgctaagattggggattttggtttagctaggttgaagaaattggattcccaaactgagttagttgttgttgatgggcttaatggagttaagaagaccaattgtagtgatgattatggcgaaattgagagtgtaactactggatttgaagattctaatgtgaccccttttgatttttcaccagatgtttgtgtaaaggttgaatctttttctcctgagccagttgtagtaatggagatggagtctccggtggtggcggtggaggctgagtcttcgcctgagctggttcagaagttaagccctttgaatgtgaaagagtatgtgatggagtggattggtagtgagattaataatgagaggccgaagattggaacaatgacgggatcttctagctttgatcctgtggaaaaaacaacagaggagatgaagaagaagaagaagaggagtagtaggaagcaattggattggtggatttcgatggatgaagagaagagtgcgaaaatgttgaagaagaaaaaggagaagagattaaggcctgggagggaatggtggaaggaagagtattgtgaagagttagctaagaaaaagaagaaaagaatgaagcaacaacagaaagagaagaatgataatggcaataatggcgacaatggcgacgaatggtggttagatgatgaggaattgtacaaaaatagaagaaaaagaaacaagggtagtttagattggtggttagatgggcttagtggtgaactcaggcgcggttggaggagtggtagtcatgattcgggtagtagtgaaatcccgaaaagtgggggctatagtagtactactactcctagtatgaggggaactgtgtgttatgttgcccccgaaacaggtttcgggggaaatccatcagagaagtgtgatgtctatagtttcggggtcacattgttagtccttatagcggggaggcgtcctcttcaggttacagattcgcctatgtctgagtaccaacgggcaaatctattgtcatgggctcgacatcttgctcgagctggaaaacttattgatcttgttgataagtctattcaatgtttggataaagaacaagctctactttgtattaatgttgcattactatgtttacaaaagataccggctcgcaggccttcgatgaaggaggttgtgggaatgttaactggtgaattggaattgcctcagttacctgatgatttatcaccttcaccacctcctcagtctagattcccatacaagtctcataaaaaggtatggtgagctttctatatctaaggtcttgtttttgatgttttgttttataattaatgttaactgtagaatgcaatactctgatgatgatgatttgtttgtgtacaaaggaaaagaaactatgatatgatatatatagtttattacattttacattgatatcaatggagttgatttatttactttaaagttctttccatttttggtgttttttggattggcaataccatctatgaacatccaatgcaaaactcaaaacatttgatttcgaccaaacttttctttttcgaaaaaagagaaagggaccgatcacttgtcttagactaactcaaggtcggccctaagcatagacatagggcccaaaataaaaaatgaaaggttttatttaacttttatttaagtaaaattaagtgtagtataaacaataaatattcacagtttgattggtatgacacgttatacaatggtgcgggttcgagtctgggctggtcctatactgacccccacatcctcacttgtggcagagaaaaaccatggtaacaaaagagaaacaagaattgagaaaaaattccatacaaaattagatcatagtttttcattgtctacacaagtctaagaatgaaaatttctcaaaatgattggtcttaaaaatccaagtggctttccgaaatttgatcttcttccataaatcttctgctgaactttcagtctgttatttctttccaaccaaaaacagccccataataaagttgccaagattgcagtccaccacaaatttaatcctacgtttgcttgcacttaacttttctatatcttgcatagttttcaggagcgtagtaatgagtgtttttgctttttttggcttagttgatttatttacttttaagttctttccacttgtgctgtttttgcatccaatgcaaaatttaaaacatttggttttaacccaacttttctttatcttgcatagatttcagaagcataatcatgagtgtttttgctttttgaacatgaaccatgctttagtgattttagtcttctagaaacttgaacaagtggttttggctggcaagacttgtgaaataaaggtaaagaaaaaccaagaaaagaagcaactttgcttttttatctttagagaattttatgcccaattatggttgtcttgttgttatgtgcacttttttaggtttgactaagctttttttgtatgctatttttatttttgtacttggtcactagaaagagttattcatattaaaacacaacacaacatatattatgtttacaccaacaaacagctcaagtgccctgtaatgatgtgtaattatggttctgtccaaaacttttacatgagacaataattgacattgatacttgtccatatcaatactgtttaggactctttgtctgtattatgttgtattgtattagtattatttaatacaatattatattttgtattaatatgtttgggatttgggatcggaactgggataggtcgagactcgggttcgagagcgaatttggatctaggtcgccaattccggaccctttgtaaatattataatacaaactaatacaaattatttgttttgtattaaatattatgatttacattgtattaaaatttataatcgtaataattaacacaatacaatattttattcaaacattatattatttcttatttaaaacaatacgactcttatacgacctaaataaactcttagtctccaactttgtacatgttgttgctttgcttgggcaaatataaggcatttcaagttcatggttgatctcttctgttctctttccctaaatctaatggttgtcattatattccaagacttttgccattaaattttagtaatgatttaatatacaatgtgctcgtttggt

SEQ ID NO: 23291 - DNA, 2558 bp, Cannabis sativa
aattttttaagttttaactttttcctccgttcttaccagagctttggcattcggtctactctcctcgcattctttgcaagaatcatccaactgaacaatcccaagaagcgcaagcctcctagcgcagtgtagtataaccatccctctcttcgtataaagtgttcttggccactgtttacttaatgcaaaagttttgaggttgagacggtgtacactgtatgcaattcattattcagagaatgtttgtcctatttacacggtgttctgcgagggggagacttgtcgtctggttgtgaactgactcgcttaaattcacactcacaggtacttttaggtttgtcatggaaaaagctagttcttcaaatgtcatgggcgatagtgaccttggcagaaagagacaacggcaagaagctactgctggtacaggggtccactcccagcttcacgacccataactaaggttgggtcgactctgcccataccatccttcttcctttccaaagataccttctatggggttcgtgttccccacaaggacaatcccccttgacccgcacgccatgcatagggagaaggaaataaataaggctctggaggagcgtctgtaagtggagaagggattcctgctctaaagaccgcttaactttaattttgaaattacaagataattaggggttaattatgaaacttgcatgttagttatgaattatcagtttacagagatttatttgaattcaaaatgcattgtttatgttatatatgaaatttcataattttgcatgttttgtgcccgacaacgttagaacgaggtgtttggctatgagaatcacatcttagtatttttagtatagcggggctatatagctagacattaggaatgtcaagaatagtcgagattttaaaattgacaaaatacttctaagtgatttttatgacttttagtgtggacaagggcaaaatggtcatttttgcctaagtttattttatcttttagtggtattttaattaagttaataatctaaattttttcctcctttatggctgagattactttaataaaataaaacctatttttttcattatttttacaaaataagaaattggacaaaaaattgcattttctctcaaagctctctctctctctttcgaaccctcttaaaactagctagtgttctaattttcttcagaaattcttgtgattctcagctagtttttagtgatctcaaacctaggtaaagttcctaacgctcctcattttgatttcgtgagttttaaattggagatttttgcatgaattggatttttgagttctaaggttgcttttgttgtttgtgtttgttttttggagtttaaatatggttaattatgtcgaattaagctagttttgagggttgttatgttggttgagcaagctttgagttttagaactcaagctttgctgtataatggtaatttttgattttgagcatgctatgttgttctgttgattaggatatatgtctattggggtataatatgcaggtctggaaggttcagagttgatttggttaggttttccgaattttttgggggggtttttggtgtaaacaggttaacaaattttacttgccctgtaaaactgattaactggatcaagtgctgggttcctcgaattttttgtgtagtcgattcgtgttagtttcaaagctttggttggttaatttcctgttagtttagggtattgccatgttagctttcagtaggtagattttttgtttttaacctaagtccccagttgtgatttagcgtgtcacttatccatgttatgaatgatgtgatttaagggcctccactcaggttggccagcacatgtatttacatgtttagcgtacatgatgtttatgcctgttagagtacattgatagcagtatcagtatgcatagagttgtattggatactgataaatgtacgttggctgaaatactgatcaattctatcacatcaatatggctagagtatgactagcatattgagtataggctaatattagatcgatagtactatcgtatgaatgttcaagaatcagtatcgtgtgggacgtggggataaggttatggttgggcgtatgggcgcctgattatagcccgggatgttattatgttttatgttatgcttttcttactaattttgttgactcacaatttctatttccgtgtgtaggtaagggcaaggctaaggctgagcagccgtgagagtgagcagatggagattgtacatttaggggcggttaggcctggagcatacgatctttgggacatcagggcttattttgtatagtccttaggcgacagatttttgtatatgtacagtgaaacttttgtaaatgcttttgtaaacgagaacccaaatttcatatgtatgttattttaggttcttaattaaataagcaaaatttgggtttggttcttcctctggcttccagtcctagtctgagtcccaaatcgagacaccgactactcgtctgttccaggccccgttacctgaatcccgagtcaagatctgcatcactgtcacgggtc

SEQ ID NO: 23292 - DNA, 3640 bp, Cannabis sativa
  modified_base (2807)..(2808): a, c, t, g, unknown or other
cttaacttatgatgaaataacaatcttgcccttccttcaccacaaagtaacctaaaatcttaggggtaaatttgtcctataccataaccccgagtagaccaaaattccaaatatctaactatattgccccactaattctagaatactaacccatatctaaaagactttataggccaaatcattgcgttccactgttatcgggcagtgaacatgcaattcatgaaaactaatatataatataaacaatgcacctagattaaatatatctccgtaattgaaaaataattccctaagacttatttatgaaaataagccctaatttctactaagaggcaaaaaattatatactaataattaaaccttttattatttggtaattcccatgatttaactacgtggtcattacacaacctaagagagccaattgtaagacagcaaccaaagatcaaagttagtgttgacattctgatgttgacacatttgagaagtctcccaaatcaaaggaaatcactcaagacaatcagaaaacatatgcctaagattgtcaaaattgatgcccacctagtagttttgagagaaacaggcaaagtacatgttatcaagtcaacctcacaatagttgaaagatgacttgggggaaaatgcttacatcaaacctagccctagtaacggtgatatcaatgttttacatgtggcaataaagaaaacattatgggtcggggttgagtagtctcgagtcatagcagtcgacttgggggggggtccctatccctgcacccaagttgactttgggaactctagaatgggtatttcaatcctccaagttgtccaagttgtttccaactaaccatcttccagtattttaaacaaagaagacaagaaaaatccaagtccaaggccttgaagctgaaaatatacgaaacaacaccccaagaagtgaattaggcgcctacgattttcacccaacacctaggttgacaatccaactagggttttggtttttaggcccatcttagtgtgaatgagcaaaaatttttactaggacatgaactatacatatcactaacatatttgaggaaacagaattagaatcagagcacttttagttttgagcaatcgaagcactaagagctctaggcacccagcacccaggttgacatattgtcaacctaaagcgcttccaaccaccatactaaataaatatcctaagaatttccttcgtcttcatccaaaatgaggaaacaagttcttttaagggagaaatggatcgacctagaggctaggacggggacccaccgcccagattaacctagcccttggcctagtgcccaggttgactctttgtcaacttgggccatttccatcagcaattcagatgaagtcctcctgacatattctcaattttcatcaacatttaacatttgactgctttcgagaatcaaatagaaccgtttaggggtcaaaactaggacccaacgcccaggttgaccctttgtcagcctgggccattcctaagaagtttttttttagaagtgttttaggtattttatttattttcataaaagattaagaaacaaatatttttgggaatcaaatggagtcatctggtggccaaaaactggacccagcaccatggttgatattttgtcaaccttggctattttcaatccttcttccaaaaaagtgttctggacattttttttctgtcatcataaataatgaagatacaagtgatcttgaggaaaaaaataagatttccaaagagcctgaacaaggcccccaacgcccaggttgacatgttacatggtttcactgctcaaatacaaattctactatggaaggggacctcgttcgcgatctcgaatgccataaaagtatcaaaatgagccccagaaaggttcctgacaagcacctagctagcaccaaggttgacacctggcgtggtgcgttaggttttgcttaatagaattcgatttggttttgagcattgaactattctttttttttttgtattaagagataactaaaaattttggtaggtcaaattcatactttgatatttcattatttaacaaggtagattattggcaaaatcgaggagtttcgagttttcttgatttcacaaaaaaaggacatctccgagaattggtgaacaactttactagaggattaaagatgatttatttggtgtcaacacatcacttaggcatcaaaaaatacaagtctaggacattttggcactcacctagcgtccaggttgacgtcaagatgtcaaccccagcgttgtgtgtcaacctgaggactgggttgtcaacctggcaggaagatgttgaataacttttagtaaaatagttataactcactcaatattgattcgattgacgcaattcaacttgtgtttttaagctatttcataaatatatcaagtttttttcacgcccacattacaattcttaagattttgggtccaaaactcatcctcaacaaagttgcaatttttccaacaaataacccgaaaacgatccaacggacaagattcaaaatctgaccattggtgattattattttaatgaccacatttgtaatatggattggtaaaggcaattagtactaattattaatatgttagtagttatttgtgaatttatttaattatgggtctcattattaaaaatgggcatttgagttataatttctcaattccgaagattttattaaactctaggtgtattacttgtattatatttgaattatgcaatttttataatttttgttcgtcgacaatggaaaatgcgatggatggctagnnttgatcacatgggtaggtctagaaccttatttcttagtgggatgtaaattggaagaagtaggatactaggtttgaacggggttatagattttgatcattttacccctagtcttaaaaatacctaagttataagagaaaggacaatttagtaataagccaaatgagtgaattggtggctgcctaggaatttgatacctagcacctaatatttcagcaatgattaatttagaaaaatcatttttcatttagagaaaaatcaagaaatagccaaattaaagaacaacatctctttcccttctctctcttttcgaaccagccaaaaataaggggattagttgctgatctttgtgttttcatcaagaattggagaaggttttgatcaaggtaagccctagacactctatgattatgtttttctcaaggttttaattggtttcaactagtgattttagagaataggggctgtaagggtttgattaggttatggttcagtttttatgtccattttgagttgattctaagttttggtagctggttttagtgtattgtgttagaattgagcaagtttgagctttgaaactcaaacttaggtatctaatagcatgttgtgattcagtgtattttttcgagtgttattggttggattatgttgtatatgccctgtttaggtactctggaaggtttggtagcaattgattgagttttgagcaagttttggatgttttgaggaaaattggtacaaaccggttaaccagttttccagtataggttagccggttttggcaggttctccgaacaacccattttataaattctggtccatttcagtgcc

SEQ ID NO: 23293 - DNA, 1310 bp, Cannabis sativa
aaaagtatgttctgtaaagtttatttttatttttttattttatttaaattagatctaggtccggggtcagatttgggttcgggtcagaagtcaggtttagtgctaaggtcgtggggaggatttgggtctaggtctagtcggagtccaaaatatcgattaaaaaaaaaaaactatttcaaaaaaatattgaaagtgattttttattttttaaaattttgattctcaattaagaaattgaaaaatgaaaattattttatagaatatgtttttgaaaaatatttttactttttcaattttaaaaacagaaaaataattaaaaagtgttaccaaacgccaccatatattattattattattatttattaaaacttatcagtttaatatatatatatatatattaagttaagaagaacaaaacgaagaatgaaaccctcctcccttgctcatcttcgtgtgcgacgaaccgtcactttcaccatctaattttcttcaattttcaatccaaaacctagttattcaagctccggtagtagcgggatagtaaatcattgaaggggaaagcttaatataagaattggtttcgttttgagatgaaaataattagttttttatattgactttgtgctttagaatagttatgcagattttgacttcatagaattattcttgggtagctatgggagtagtttcgatgtttacttgttgaatttgaggtgattttgagttagaaatcgagtttggaacttcttaaagcttaagtctgagctttaatggcattttttatttaaagacttgtttttttttatttcggttacgttggaatgtgtcctataaagtttggaatgatttggttaggtttggagctactttggaaaatttaaagttaaggaaaatcgtgtttctggctattcagaacaggaattttggatggtaccaaccggaattccgtttggttagtttgcagaaaagtttaattttatattttggccataacatttcactcgggtatccgttttggacgttctatataccatttcgaagcttgcaaagagctttacaatatggtatatattttagagacaatatataagttttactttcgtgtatctataccgtggcatttggtaaaaaaccctagattgtcttatacgaatattaaggagtgttttgggatagacacttattggtttatcattgttatgacatagggcccaggatcgtcgatcgttttccaagcaagtcggccaacatacctaaactgaaacttgaggtaagaagtgttgggaatatatattttaccaggatctaga

SEQ ID NO: 23294 - DNA, 2824 bp, Cannabis sativa
  modified_base (1964)..(1969): a, c, t, g, unknown or other
tgtgaaattttatggtgcacctccgaaaagtggagaactgatgcacttacttcgtttttgacatttaaatagttttaatcttttttatatgacaatgtatattgtacttatttaagacattttgcaaattttttaaaaattcaaaataatttaatatatcaaaatttagttcagtttgttgcacttgtgcttattttatttttatacgcttgtgaaatacactttgaactctaattttacattgtaaattgttttaagttttaaataattatgatgtacattgtcagcaaaatgtcaaaaacacagagtatcattgcaatcctttttgggggtacatgttaagttttatttaaatctcaaatagattaaaaaaagggggtttttttttcttcaagaatatacaaaaaagtaactatattgctaaaatatagtgggtcggccctttaaacaattatacagcttacaaacaagaaattacaataatacttcttctaaagtttcagtcgcacgaaacaaagatatcaccaacgaaagtttttattgttcaacctatcaagacaaccgaaatgaactcaagcaggaggaaaactaccattaattttagcgatttcactcaagaagaagacaaaaatcaaattgatcaccgaaagagcaaaaaatttagttcgaaattcaaattcaaccctgaatttcaattttatttgcacaaaactaatcctatcaattttcaaattcataaagggtagatctttaacaaataggtctggagcttccaatcaatctaaattaggtataatctaaaaaaaaaagaaaaaaaatacatcaatactatatttaatgtttatcctgttacattaacgttgatttttagatttcccatagtgaatatattaatatcaaatcacgaaaagtacagaaaattcgaatgcatctacaaccacatacatcaaaatatgattatggtttttaagttgcattatagttgcattatcatttcataatgacgtttatcaaatttgcaggtattttgtaacaccctactagataaggcgtgttaacgtgatttttaacttaactatgcagctcgttattaagcaacgagtttattgaaaatcttgatttattaaaactttacttatttaattattaacactaaaataatatacttataaattgggatcccgttttacaaaatatttacaacagtttcataatacaagttacaaaagtttgtcgcctagcgactatacaaaataagccatgctgtcccaaagattgtacgctccaagcctaaccgccccgacatgtacaatcttcatatgctcgctctcacggctgctcaaccttagccttgcccttacctacacatgcaaacaataattgtgagtcggcaaactcagtaagaaaagcataaacaataacatagcaataactaggattataatcaggtcccatacacccaaccataatcttatccctgtgtccaacacggtgttgagtctagaacgttcgtacgacagtactactgaccataatatcagcctatactcgatacgctagtcgtactctagccatatcgatgtgatactgtcaagtagtacagtattatcgaccatgatattagcctatactcgatacgctagttgtactctaatcgtactgatgtgatattgtcgaatagtacttaagccatcatacatttatcgatatccaatataaaactaaacatactgacatcgctattttaatgtaatctaacaggcttaactaacatgcacactaaacatgtaaatacatatgtatatcattatactaatcttaccttgtttccgaaatcaagtgtgccggccaacccgagtggaacagttgctcgacgaattacaggcccctaaatcacattattcgtaaaactggtgagtgacacgctaaatcactttctagggactaaaacttgaaactaaaannnnnnctatcgataaacaacatggtgataccctaaatataataaaaacgagaacaattagagttctcaaaactgcccaatcggtagactggttccccaaccaaaattccagttgtgtgcagtttcttggggaccaaccgaaattccggttcctataggtcccactgaaccggtcgaccattttagtgcaagaaaacttcaaaacttcactactctctcaattcaaccccaaactcaaccaaaccttccagacctgctatatataccataataaacatattcaaagtaataaaacaactaaacaagctcagaataaaaatctaccattaaagaccaactttatctaacaaccaaatcaagcaaccaactagcttcaaattagcttaataaacataattccaacttcagaacatttcaatgaaaacaaaacacaataacaacaaccttaaccccaaaataatgcataaatcttgcttgaaacctaagaaattataaagaaaaggtgctaggatatttaccttgaattaattcaccaagaaattttctaaacttcaagaattaggctgaagaatcacaagccctagttggcttctgtggagctcgagagagagagagagaaagagactagagagaaagagaagctattctcttgaattttttttattcttgaataattgaatagataatttttttttatttatctaaagtcatattcagattagtaaagcttaactatagctcacaaaaggacaaaaactaattgatcaaaaagaccaattcgccccccattaaaaccaaaaagcttctaagccaattaggggtattttgatcaattctaaaatcttgactaatcccgacatt

SEQ ID NO: 23295 - DNA, 2485 bp, Cannabis sativa
  modified_base (27)..(30): a, c, t, g, unknown or other
aaacgtgattaactgctaatttccaannnnaactaagcggtctttacacattagctgccacttacaaattgtttcttggttgcaatctgagggagtggtctctaataagagacttttacattttggctaagcaacatttgatagaactttctaactttttctaatcttcatgtttgtcttgctgtcatacatgtaccatgtaatatagatattagaattgttcaaagtggagcaatgtagtttcttgaggcctctagtttttttggtttctttaccttttctgtatgtgtttctgataactctgggttaggtttccccttatataaatattcattaagtttcaaaattatgctttgatctgttgcttagttgtaatttctgaattttcatggagtcattaatgttgtttcctgctttacttgaatcaatttttggcacttaaatttattgttgaggtcatatttgaagactaaatcaggcagaggggtgccaagcacctctaattcaacctcttgttcacgcattatcttgcatgttcacgtgtaattttttacttttcacttaaaaagcatttcttttgtactttttcgataagataaaggaaaagaaaaaagtccaaatataatttttcaagaagacgaacacagacacaaatagcctttacgaagttcaattagtaaaactaaaagctatagaatttcatcatgattataattgtttcctgaatttttattaatttgtgatctgggttgtggtggtccttttgtttgtggctggaaactatagtatgatttgattttgttgaaacataaggtttattgtaatattttcaaaggaaatttttcaaaatattagtctggtcttgtgggtttctttttttttttttttgctgtaagggtttgatcttatggttattaattctatatagtgacacacctaggtagcgaatataattttctgttgtgttttatatagctttgtttaagttattttgggaacaacacatttgaatttgattcttattttgaattaagagcttactaactgtgtttgtttcacttcatctatcgcagttgcacacagcttaagaggctttcgtacggagatttctactttcaaaaccaacagggtacatggttgagttataaatttagattccatctgctttcgtggtcggatatatgtgaacgaacaagggattaacgctcgggtactgttggtaagtggggctggtggggctgtttttttgctgcaacaggttatttattgctgcttttctttgctgcagtaggctgttttggaggttcttggcctcctttgtattgttttgctgtgttttgaataaaaagttcctctttggttcaaaaaaaatattagttagttttccattccacaagttaaaatcttttctaatgttaactcaaagcatgtctctgtaaattagaaggaaaaagctccactttagataaaatgttctcaaagtgtaacttaaaaaagaataaaaagcttcactttagacaattattaggaaaaataataaaaagcttcactttagataaaagtttctcaaagtgtaacttaaaaattaagaaaaggtcatttatttaagaacagtatagataggagttataaggtttggtgtcaccacagagaaaaaataaaaaatttgggtgaggtaccctctaggaaggacaagtttgttcattacccaatggttgatttgtccctgaaatccactgtaagtaaatttgtaatttaatatatgtaaatatatataaattatggagttgactaaacgttttaattatgtgtagtgaatattggacggtgataatcattcaggctgctactcagtcagtggcacttcttgacacaaagaatatgccaattcagaatgaaattaaaaaaatgtgtcacaacaaaagttgtatcattttttttttcattaatttaatttttattactaatttggtcactaagtaacttctctttagtgtagtgctttgcaaacctacaagattcaaaaaaatatacgaaacagggttgaggtaaagatcagacaatacaagtgtcgaggacaaccgggcgatttatagtgtggatattactgcatgaagattattcaaagcttcacgactcagcacaatcgagcaacttttttgaagaatgaggtaattaaacatatatgatttttatttgataattactttttattttaaatacatttaatattatctatctctggttgtacagttcaaagatgacaagccgtacaacaatcaggagataaacgaaatacgggatgaatggggcagttttgtgaagtctagaatgagtatgcgattatttatattttgttatattatatgagtagcatataatacttttagctatatgatcgttacttttggtgatacttagttttattgatatagtacttcatagttatatcaattttttattatgacatgtaggatacaatttt

SEQ ID NO: 23296 - DNA, 2098 bp, Cannabis sativa
actgagaaaggtcatggaatgcgggggctccacgtgtccccgccctgcgcagaaatacctcttgcgagtggtgtttaccgatcttttcggaaaaaaattaataagagcttaagaaaagaaaagatattaaaaaaagacaagcatatttattacatggttcaggcgttaatgatgcttagttcacggttagtaatattagccttttagggtgaatgtttgagtattccaagtgtctacaacaataatctttgtactccttttgtttctctttagaagactgatctcaaagaatttcagtagagtttctctaagtaaaaattgttcacctctcgctcattaaaaatgagggtatttatcgccacacatggggatgagggaataccctttatcctcctagggtttgtactctactcactgcaagggtcggtacaacaatatgacaatctaaccattggttgttaagaaccttcttcattgcgtagcatatagctttagggagagattttgtacaaactgtgacaagtgttgtgtaaatgtttctcctttgtaaaatactctctaacaaggccgttgggcaaaaggcacgtccagaaatgagtacatgcactaccatggcttggcatgggggacaagatctgatcttgtgtcagataaaggtgtaactgcctatagagcaatttttatatgatgtcgacgtggtcactgaccatgagactactaccacgtcctaatgccatcacctaagggatttttactcgggagccatctacctcaaccattctcaaggttcgaaagatgttacttatgggcagatggctcatctcgtcaagtgtctattgcacgtttccaggattgtcaagaagttctctctgggagaccttatgagttatttcgattaatccattcatctaatacaccatatcccttaatcatgcctgaaaacacagataacatttacccccaagcttttgggactctctgagttataggagcttgtcatattttcctactactaactgttaacttgtgttgaacatcaaaatcaaggacacatcttctatatgagctgcactctgctaagggtagatttgacatcagtatctacttgcgtggcaaccacgcgacaccttaaagatctcagttggtccctttggcgcgtgtcgaggaatatctttcaaaaaaggtggagtgctactgatagttaaatgctgtgaagagactcgtcttaatggtctggtgggccctgggctaattatgctagacctcttatctccctagttgttagatcaactacaaaatcttaaccattgatcttgcaaaggccggttttatttttcaaatataaactggtctcaatggtgttcttttcacttttcccacactaaacttcgtatttttctcgataacttttctcttcttttgcttgcttcattgcatgcaagaggagttagaatgtttgatccaacgactactcaacatctgcgtagagcttttcccagatattgaacccctctaacttgatcagctagactctctgttaggtgaagtacacaatttccaggctagctgtaatcgctgcatcatttgcacaaataagaatgaaaagcaataaaaaacaagatttgttacaggtgttcaggcccttgtgataacgggtaatgatctactccccttttagttgtatttatacaaagggaattactatccagattgctataggtagaatctgctatagtacccttaggattacaaggtactattcaatactggcaaaactcaagtgttgagatgtgctagggtaggcatgtaagagagaagaagtgaggaagagagagagtttatcagacacttaaagttttggagcaggcttctggcttagaggcaacttaggtttttaacttaaggttaaggcatttatataggaagcctcaaaccctatgtttacaattcaaatccgttaacttttgcataatttgttagatattaataaaaaaccttattgcctttgattctatatattatttagccattttgttgggcttttagggcctaattcgtagcccatagcctgttattcacgtgtagaaatgtccaggaa

SEQ ID NO: 23297 - DNA, 1838 bp, Cannabis sativa
  modified_base (74)..(74): a, c, t, g, unknown or other
  modified_base (1689)..(1697): a, c, t, g, unknown or other
tgtcttcctctgtttcagcattgtaagagcgaaataaaaaaaaacaaaggtatatgatatatatatatatgtanatatatatatatatattggtaagagctattcctcctactccaaaaacactgattaaaattctcatggtttctcctactccaacttttagccattccttaagattactagtgtgaacaaactccaaaaaattacccttctgatgacatgtatatattgacaaacgtgtatactttttttttcgaaaaacacaaacgtttataatttaaaattagtaaacgcattgatcacttaaaaatataagaataatttacattcatagttcataaaagtacatcaacacgtgttatgaaaaaataaacaagaccacatcaatacgaaaaagaagctctagggtttgaaagtattaacattacaatcttggtctaattcaaaagtacactacacacgagcataaggtttgagcaggcatgtaactatggacaattggacatgtcaggctcccattgtaggttcgattatttgattaggctaataagtttcagtaatttcaaaaaaaaaaaaattatttatgatttgactttctgatacaatgttgattaatttttttttttgatgtttatgtagagtattagagtctctatatgagtgccacttttgccttttgcctttactgttaggggcatatttgttttcgatatttaggaaaattattaattaattttatgatgggtctaaagtgtagttatatttggccttctactagttttcaattttatcaggaataatttacgatgctgaaaatagagtttaaaatagtccattgcacgtgtagaaaaaaacaggcgcaagtgcaactgaattttttatttctttttaaaaccttggttccaacactgtaaaaattattcaaaaattagtgaaagcctgtcattactatagaaaaagttaaaagtataatttctccaaatgtcaaaattataatttttcctgtagtataggcaaaagtggtgcccttattatttaattttctataaatatattagaactttttaggtgggaaatcacttttacctctgttgtagggtcattttttgttttcggtacttgagaaaatttattacacaattattttttataatagtgtgtagattatagttttagcaggaatgtcactagtttttttaaaagttatgtataatttacattgtcaaaaacataatttaaaattgtagagaatggtgaatagaattgtatgttatatttcatagaataatatatattttacataaagttaggaggttaaatgagaaactactaaatacaaataagaaactactaaatacaatttaacctaatttgtataattaatatacaactaatattctaacactccccctcaagctggagcatagatattaattatgcttagcttgttacagagataatcaacccgcaccccattcaaagtctttgtaaaaatctcctaattgttcttaggttttcacatatcctgtgaagataaggtcttgttgaattttctcataaaccaaaatgacaatcaatttcaatgtggttagttcgctcgttgaatacgggatttgaggcaatatgaagaaagattgattgtcacaccacaattttgttggaatagaagtcttaaacccgaattcagtnnnnnnnnnataaatccatattacctcacacaacacaaagactgtgccatagctctatattctgattcaactctagatctagatgcaacattttgcttcttactcttccaagagatcagattgcccccaacaaatacacaatatcttgaa

SEQ ID NO: 23298 - DNA, 1818 bp, Cannabis sativa
gtgggcccgatggctatgaaataaaagagagaagaagagaaagggggtgatgtaaatgaaggggtattttagggatattataaaatgtatcatatcccacaaatatcaaatattatgagtttagggaaaaaaatttaagcataaaaaatcaaattttcttattattattatatacatttaaaaattaaaattatattgtatataaaaaaatttaatttaaatttaaaatgcttaaaatattgtaaatagttttaaccgtccattattagtttaactttgaattaaaataaaagacaattcacacaatgtttcaccacgatatcttatatcttatctgtaatttagcttaaaaaagatcaaaatctcaaactttatttaaaaaaatatatatgtatgcattgcacctacaacttaatatatatttatgtttttggaatacttttttttttctttttttctagaataagtagaatatatgaatgaagatgaagtaggatctctcatctctcttcctcttaaaaatatgtgattgtgcaataaattttgttgcacaggtacaaaaagaaataaacaaaagtacaattgaatttttaaactctatttttaatataacaaattatttaaaaaatttaaaaaaggaatgaaatatctactataactataacatagaaggtgatattaaaaaattaaattttaattaatttcttgaaatgcaaaaaacatccttaattacccataaggataaaattagtggtcactgaaggagctagttggagactacaaccttcccaatttcttttccatgttttcatatgtattgattaggtaaaaaaggaatattataaatttgcccccttccctcccccaatttatcttttctttacagtttgccccaatgtatgtctctactataattttgttctaaattaattattttgtaaattattaattaagcaataattaatataatgtgcagattttaagagccctccaccgccacctcgaagatcgccacctcgtcaaaataatcccacagctccaaagtagctaaaatggttccagccttttaagcatgaataataaattttaaaatgtagaaaaagttttagaatatctataatttaatttgctttttattaaatatattaaaacttctttattttagaacatgtgatgtgagttgcgattaaacaattacactaatgcaatcaaaaacagaattcaacaacacataaaaatttcagtaagacaagctataacaaaataagaaattaattaatgaagcaagttgaaaagaattagctcgatagggattgaatctggatttgaaaaaaataagccgccttcatggctgtagtggattaacacctcttgatcctcactgtttagactcaattcagtgagcaagaacacaaacaattcaaacaaacataacttgaattaaaccagcaatgacaaataaactaaaactagaaaacttagcttgaaatttaagggataaaatgaattgaatctttattgatcattagcactatatcacaccagttacaaaagatcttacttggggtacccttgatcaaaaacataagggacctgtactcactttattttaaagggacccttgatcaaaaactattatggtagggattggttattttacctatcaataggggatagtgatttatagcccttgatttaatccagttcaaatcaactcttaaaactacaccaaaattaatatattttttttatttataattaatctttaatattattaattgtaggttcaactaataaactccaaacctaatgttttta

SEQ ID NO: 23299 - DNA, 5087 bp, Cannabis sativa
taagtgtgttaggtttgggtaactttttatatggggttttcaagcctatgactcggtttgggcttctatttataaggtaggttgtagttgctagagcttcctccaaaatattttttctaatccaaaactgaataataaacatctaacttccttcaacaaggttcagttcattctttcagcaacactattttgctcgggggtcttaactacggttctatgccttgtgattctactttcttgacacaacttgtcaaactcagagttaacagactccaaaccattatttgtccaaaggttcttaactttaagatctatttggttttccacctaagttttccaaactctaaactgttctagacattcatatttagtttctagcaaatagacccacacacacctaatataatcatcaactattgaaagaaaatattgcttaccgaagtgagtaggcaccttttatggcccccaaagatcagcgtgcacatattcaagtatccttttcattgtgtgccttaccagggtgaactttagcttatgctgtttccctaaaacacaagcttcacaaaatggtaaggtacaagaattttaattttcaattacacattgtgtgtgtagttttttgaggccctattcactgatatgtccaattctgtgatgccacaacttcatatctgattctttccattttaccatacttgcctcttcgattggaacagtttctccttggagaacatataaaccattgatcttttctcatttcatcactactaaagaacctttggtgatccttaagctttcgtgatagatttgtatctacatccttcatcttcaagcgcacccaacaatatgaggttttgtctaagctccgggatctgccttacattcgtcagcaccttgattctaccatcataccgtttgatggcaaccttcccgattctaatgaccctataagaatgatcatttcccattagaacattacctccatcaactgatctataatcaaaaaatgattctcaacttggacagatgtgataagtgcatctggaattgagaatacactccctattcattaaagattttgagatggagaacaattctccatttgtggagcagtcgtcactatcattcgcgattgtagtagaatccttctcatggtgatgatgttagttgtcctatctatctccattgtgagatttgttgaagcctttttgctccttgtacttcttgcaaaatctttgcaagtgtccaaaccttccacagaagtaacacttccttgtttccttctctctggacttcgatcttgattgacagtgatggtatttattctaagaagttctttcttgggagatcttcctctttccaagtacactacttctttcttggattccttttctaattgtaattcaaaatgtttcgacttaagtgcagtaagaacatgttccaatgcaatcacatctctacacttgatggctccttgacttcttgatatacaattgaaagtgatctcaaaaggacgatggcctagctttctttatcaatcttgtgatttatattagccaatcctataataatctctttaaatctatcaatattattatctaaagaaagggaataaatcattctaaaatcgtataacatttctagtaaattaatcttgctagtaattgatggcttcaagtataattcttccaatttattccaaatcctttcgttgccttctctgtgatgagttttcttcaaacattgtttgaagatacatatgatcatgtagtatgccatctcctccatttctgcttttttctctggtttcctttctgccaataacttttcatctccaagaaccttggagactttttggtgcactaggattctttttatcttccatagcgcaaagtctccagttctatcgaacttctccaatttaaatcttgccattaatgacattcaatgtttcttcaagaattacagcgaaataaatcttgattcttcgttcttgatcgattaccaagcttttgtgggaaaattacgactaatagtgaataataatcgaatgaaaaaaacatggatgaacagagtaaggggaaccaaaaaataattaaagcatgaaataaagaaatcaacaccaagatgtatattggttccagtctaatagatcgatgtgatctatgacactactctagttctgaaacaccaccaaaatcctatttattgattgagcaagaacaggtaccttatagtcaagatcgattctctaatgagttctctcaaagtatttcaactctcacactcttacccaaaaattatcttcatctacagaagattcttcataaaaaattcaaacccaatctccctcttttctaagtacctttgtctctctacctctcaatattttctctctccaactctcgatctcaatctgaacaatctaaagtttgtcgtgtgtcctcttttttaaattcttaagagatggtggtatttataaccttaggatcaagatcctaaagtcggtggctacaagaaacaaaactgttaagctaattaggcagtaactaaattaaccaactctcccttgagatctccatgtcagtcttagtgcattcggaaacataagtgagcttccgggatcacggaccaaagggcacctactgaaggatcttccaaataggatagagtcagctggagtcgactatttgaatcttcctttccaggaggaacaactagccaaccggaacaccatcttagagagaggctagcttttcttgaagatccatcctggaaggacaagagagccttccagaacttgcttttgccgatgatcaatctttctaagaaggataacttatggagatcttttcatttggagaaactatactatagcaagttattatacccagatctaataactatctgtatccgtctagaatttgtttataggggaactttgtaaaattctatgtgtagtcttacattattttcagttgattaattagttgttcataaatattcaagaaaatcataatgaaattaggtatagcactttcaaaaagaaatcatttaactattggataaagaatcacctaaaggtgggattattttggagaattgtactaattggactccaacatgtccaaaaactagaatacaaagttgggaaacaccatataccaaaagtgtttcgtaaatagaaaagtctcacatactctttgagtaaattacgttaaactaggttattttcactctgtatttgtttctccactcctcatgattttgcagctaccatcaaaatcaagttttcatttatattagggatatttacatcatatattcaaatttttaactttttttattgcagggcgaaatttttttcaaaattactgtgtaagttttataactgtgttaagtttttactgttgtttaatggttattttttatttgttctactattgtttttagttgttctattttgtgttccactattgttttataaagatataatatttttgaaaaaaaaaaattgtatagcagtatttttgtaaaagttaactcaaattctaatatttttgtaaattttactttattttattctcgagacaaaaaaaaggtggcacactttaaaacatgttataatatatgcaaacatgtccaatctatgtccgaatttgacaaaacaaaaaattatgatcttaaaaaaaatgtcaaatttcatgtgtaaacaatttttatgcccgaacattatttttagtgtataatattagaataataaaaatacttaatggaataataaaaccaacaaaataaaaactatgcaaaaataatacaatagcaaaataagagatgaaataatgttacaattattcaaaacaaaagtcacacacgaaatagagagaacacaaagatcaattacaaagagacaagagatgtgagagcaaactcttaacaccacatacactttaagtgtatatatagtaagggagccaccaaattttaatttgtcaaaaaacttatttctatcactacaagcacttagaaaaatgaaagaaatggaaagaattttctgaaattataaagcctaaagagtctttttagccaggtctcttctcgtaataaaaactagtagtgaatctataagcctctatttatagtgtttaagtaaccacaattttaaaattcaaactctaaatctcatgttaccaacacttaaatgagtgacataaataggactgtaaaagttagagaatgaagatgagatcaagcaccgttaattcttcaagtggtctttttttttaagttgaagagcttcagtcgacatgtcttctagtgctggaccacatcatgtcaccggatatagtttcagcgcactcattttgaatttttttattaatttatataattcacttaattacacatttgaaattatgataaattatttttaactctctttatgttacattattgaccacaataaaaaaaaatataatatataataattgctaaactatacattatatttattattttacattttattctgtattacattatttgaaataaataatataacatataatcctaatattatgcttttttagtaaatgagatccttgtattgcattaaaagaactcttacaaatcgctaaactattagctaacaaaaacaacaatcagagtctatacaaatttgaaagctaatcttggtctttcactcttattttttgtggtaagtctcccttaatttatttacaatcaatgttttgcaagtaaaacaagcacattaatggttcttatctcatgagaccaaatggctctctttaagcccaaatcaagtatacacaagaattaaagacaagaacataagtttccttttttactttcctcactttgcttcttcttatataattcaagataccttgaaagttgtaattgtgagagccaattccaatccaactcaacaactcctttgtaaatctcttcctaaattcacattgaaagaatgagtgtccatgagtttccaactcaatctcacacaaagaacaaatttcatcagtctctaactcaaacaccttaaacaccttgagtctatcttttca

SEQ ID NO: 23300 - DNA, 2992 bp, Cannabis sativa
ttaaaatataactataaattatatagatagattttttcttaaaaaaaatacgttttatataaacaaaaattcctaaaattttagtgttaatgaattttactgtccaacttaattttaaggactccttatcttatatatggctcgttgctaaatagcttctttattaaagggtactgcatcataccactaaattagtgtggaatttcatattattttactctaaacatacactaaattataatgtgcactaaatttcacactattaataatgttagattttaaatttacaccaaattaaatgacgtgtaactttttttcattttaaatattttttaattttctttaaaaattaaccataaattatttgttaacaatatacataattatattataattaattagtatttattggttataaatataaatagtataaaatgtaaaatatttttaaacaaaatatatttatttaatgtgatattttgtgtaaattattagaattgtagcactaaaatgcaataaataattctgcaccaacttagtggaaaatataaatacaccaaaatagtacaattctcttgaaggtggtctaacatgtgattgatatgaaagaaaattggtaggacaaatgaagagagcataccaaggatggagatcatgagtagaagcaattaatgtttaacattaaaagtgaaattagaagaataaaaaagtttgtgaaaattataatacaatacatatactttccaatttgttttatctttaaagaatacagttcaaataaatatatttatataaattaaaatggaggaattgaaatttatagattagaaggtcttattatatctcgatctctcctaccaaacaagggatttcataacatactttatatatacatatatttatatatatagttaaaaggatacaaaatatatataggttgcagatcaacatatttataactattcattcatttatttgtatatagtattatttttttattatttcaatatagtgatattgatataggatttttttttatatatatataaatgctatttattattattatattatatattaattaatgcatgaaataattaattaataagatatttttcaggacctcaaggcaaaaaaacattatttttttagttttgtttcaggaatgtctcacaaattagaaacaataataatatataaaactaaattgatggatgagatatatatttatatataataaacaataatatatatttagatttattaattaattaattaattaattaaagtatgtacgtaccgtgttcattgcattcttgatcaacttcatatcatccaaactaacaattttgtagacaattcgacgaggattattctgactcctaggtggaccttttataggagtcttgctatctttaatcaacaacaaagctgtccccataaacttcaaaacatcccaaaacgtattccaaaacaaattcaacacccaccaaaccctaagtactaagctcattaagtactttgcagtgaaaaacccaaagctcttatagtgatgatgaactgcattattattattattatttttagctgtgggaagagttggcaaagcctcgggatctgagatttggcgtgtacaagctagtaagagagacatgagagatataccatctccaattgagtgatgaactctgaaaattcctacagcctctgcctctgtggtcttcacattcagaatgtggagatcccatagaggccttgatttgtcaacactgctttttgtgaggttatgaatgtaatcttccacatacttatctgggctaattgatgataaatcaacttcttcaggacttatcacgtgcttctccaaatcaacttctgttctcacccatttcatttcaccacccttaagtttctcatccttaacctgttatatacattacattattaattatatataaaaaggaaaaaaaaaataaatagaattatttataaaaaaaacacttacaggcaaactacagaagcgagggtgtttgagcaaagtgtggggcaaattggctttaacaacagcaatgtcaatcttggttttgcagcccatcattgctaaaatatgaacattaaagtttggttcatggaacagttgacctgctggactcaatggctgatcttgatcttgatcttgatcatgatcatgatcatcacctccttctttcttcatcttcatgatttgatcatcttcatgatgatccatattaaattttgttttaagaggcctcaatctcagaccttcatcacaatatgactgaatatccatgatttatgatcaaatagtactataatcagactcagagcatatgtatgatatgaatatattgaatctagatatggtatgtatatatatatatatgtttattttgttaggaagaagagtactactaccttttatctatttcctttctatatatagaggtagacttactattaattacctagcccgaacagggcccatctcaaaaacttgctgtgtgcctaacaaaaataaaaaactttcaagaaagtacaatacttttaacttatacacattttattacttcaccttaattaaaaggattgacttctagtacatcctctatcctatatttgttttaatattaagaaatgatttttagtccaatttttatgttttatttatttatggattatttataattttagaaaatttagaataatttacagtgataaaaataaaatttaaataattacttactaaaaaaaaaaaaaaaacaaacatgtatgcaaacaaaacattagcactgtacctatttgaattattctaaaaatttacaaaaaatcttaaataagtacaacttctcatgaatataaaaaagatagaagatgtatatttgagaaggtgcactataaatttacctaactaactatatatatatatatatatatatatatatactgctaatacttattgatggttattaaa

SEQ ID NO: 23301 - DNA, 3274 bp, Cannabis sativa
tatatatatatatataccagataaagagaggttccacttccgaatatgaaatcaacagtgccttcaatataacaatccttgaaaaaatgaagacctctgtcatcgcaaagagtgtcctgaaaaccaatgaacctacagttgtagaaggatgacttattcccggaaatcctcaaagcaattgcctgagcattccttctcttcccatctggttctggtgcagaattctttttaattcaacaacaacaacaaaaacttcttcaaattagctactcacatatatacatatgtgtgtgtgttgaattcttcaataataattaaaactcttattattcgaaagaaaatcatacgatggacgtgccttaaaaataacattagcggcagaaaaatagtcggggtagacgattaaggtggcgctgtcgacagttccgtactgcgctgcggtgccgtcgaagaccaaagtgggcatggcttttgggtttccgtagaagctgatgaattgcttgctccggtcgattgtaatcttctccttgtactcacctggtccgattgagataacgattcttcttgtgttgccgtttgggacactatcaatggctgcctttatattattaaagtttcccttcccatctttactgaccgtgatcaccttaactgggacgctctctgcctggaaaaggacaggatcaagggttgactttctaaccgttgactgcttaacattactgctgaaccaattgtcaactccgtaagggctttccggtattggcgtgtcgccacccaacacgactgtcgtcgttgctaataataatacgaaactgagattaaccgttaaaaatgtagctttaacgttattactattagtacgtatcatggcttttttttctttaaattttatattttatattttgtttgaagaagaaaattaaagtatattgtatgttattttgggttagtgatgaggagagtggatttttatattccataagatatgtactaaaaataaatttagatgttgacgaagtctttggttctttcaactatatttccacttttatttgtttttttttttatgataataatagattgtttttttgttttcttgggtggtagtttatttactatttagggattgcatttttgtgttgaaagggtatgtgcatataattagacaatatcctaggttataatttatatatgtacaatgtataagactgacacatgttcatgtgtgttgttatgtttcttgagcattgctactctattgagcacattgtctaatatttttttttttttttttttgaaagaacctcggttcgggcattgtctaatatctaaaagtagtgtattgttattgctattcgactgtccaggtgtgttgtgtgttgttattatattaagttatatagaatgtggctttttttttttaattttatgaaatatcaacttcattaaattaagaacattcagaaaacaagatattcttcaaatcgggccagatatcttgctctaaaatgcaaccaccaggaataaatcgaaagtgccttgcaataacatgggcaactcgatttgctgatcgttttacaaaacgtaacttaacatcctttaaaagagataaaaaaaaatggcaatcctctataataataccaaaagtagaagacatcttttggttgcttttaattgcttgcacagatagaagattgtcagactcaagctcaacattatgccatttcttgttctttatctaactgagcgcttccttgatccccaaagcctcaaccacttcagcaggatagttaccattgcacagacatgttttggcctctatgaacttgccaaagtgatcacttaattaccactaattcgtagccatatgagttgtcttgttgaaagaccgcatctacattaatcttgatgttgtttgttgcaggtggtgtctagagctcacccccgtcatcactattattaaacgatagtgataaaagagcacttttatcttgagctttcctccaatgttcaagagtaattgaagatgtggccagaacttctttgacagtagaattgcatttgttccagacaattttatttcaagctttccacaaagcccaacatagagttgcatcatgacaaataaagtctatgtcgctggtattctgcagcaactcaaaccagtgaccaaacgtggatgaggagtctatcatgacaggccaaccaaagacagaccaacatgctctagcaaagtcgcaagtcagtagagcatgtgttgttgtttctgcagtagtatggcaaacaggacactgtgaagagatggggacatgtttcgtgacaaggtttacacaggtagggagagaacctgctataccatgccacaaaaaattcaagactttgggaggtatcttcaaatgccagaatttacgccaaaaaccaaaattgtttggtcgtaaactgactggttttcgactctgcagcaggttataggcactttgcacagatgaattcccgtttgtgatctgctgtccaagaccaacaaccaggtcttgcagcattgctaagtggaatgccaagaattaaatcagcttcttgaggagaaaacaagtcacgaaccacatcagcatccaaacagttattgtttggttgaagtagggaacttacaatatggttacttaggccaggatgattagaagagacatatttgttgcttgttgatggcagccaaggagaacctataatgctagtagttctaccatcgccaataacacgtgcaaccccaagccgaaccaagtctttagcaccctaatacgccacacaaagcttggattatttctaagttcagatgaaatgaagtcaaaatttgggaaatacttcgctttgtagactctaccagcaagagagtcaggattacacaataaacaccatccttgtttggcaagcatggcaagattaaagtcatggaggtgcctaaaacccattccaccttcttcttttggagttgctagatgatcccacgacatccaaataataccgcgacctttactggagtttgtcttccaccagaaactagctattcgtttttaaatctcattacaagttccaatcggtagaagaaagacactcatagcatatgtgggcaaggattgaatgacagctttaagtaaaatttccttccctgcacgagacagaaacttgccatcctaactattaatgcaagcaatgactttgtttttaataaagccaagcacaatatttttattgcggccaagataaaggctgtcgtcaa

SEQ ID NO: 23302 - DNA, 1990 bp, Cannabis sativa
  modified_base (52)..(56): a, c, t, g, unknown or other
  modified_base (1927)..(1946): a, c, t, g, unknown or other
ttcattgttttagggaattcatatttaagatgttaattcaacatacttgttnnnnnatctagatcttggtaaaatattcccaacaggctttaattccatagtcttgcgagacccgaatcccgaggcgatttagggaggcaaagatggtcccaagctttcaagtataagccacgattaccttgttcacaaccccaccaaaaatccctcaccatgccatcaattctcgtagcaagtttgttggatagcttcgtagtctgcatagtatacacaagcatagccagccccacagatttaataagcgtggcccgacctgctttagatagcagcttcatcttccaaccatgcaactttgagacaaggttttcaataatgaaattgaagtcaatatccttattcttggatctaaagagtgggagacccaagtaattgatgtttgtagtcgtcaagttaagacccacttcctgtaagataccctttttcatcccttcactggtgttactactgaagaagatagaagtttttagcttattcacagattgccccgaccaccggcaaaatttctcaagatagttccaataacctttggcttccttgatagtcactctgcccacgagaataagatcatcagcgaagaacaggtcagataacctagggtcgtctctacccagcctgatacctttaatatcaccaacctcaatggccttttccaaaatctgcgagagaatgtcagcagcccagataaaaaggtacggagataaggggtcgccttgtcttaacccacagtccggggtaagactgctaaccttacccccattcaggtcgatattgagggtagtagtagtaatgcactgggtaacccacttccgaaaacggtctggaactttgaagctgctgagaacatggtcattgaagttccagctaagttatcataaactttcaccagatcaatcttgatggcaaagaggccttctttacccttcttgcatttaaacgaatgaataatttcctggactaagacattattgtcattgatgctacggcctggaacaaaggtcgcctgagtggggcagattaatctgggaagcacccaacgaattatatttgcaatgatctttgagatgaccttgtacactacattgcatagggagataggcctaaactgagagactttcttcggattattcacctttggaattaggatagcattcgtagcattaatgcctttgtgcatggagctagaaaggaagaaatcttccaccccttcacagaaatccttaccaaccgaattccaataattcttataaaaaagcacagacataccatcaggaccctgggctttaagactacccatggagaaaagagtattcctgatttcatcagagctaggaatgatgaccaagtcattctgctcccagagggagaggtggtcagagattagatggtccaggctctctaaaggcccaaggaccgagtttctaaaaatgtttcccaggaactccgagaattccctaccaatttcacttatgttactcagccacaccccatcactgttcataatcgcctcaatctcatttcttctaattttgatagttgcagtggtgaaaaagaacttcgagcacttatccccctccttaatccaggaaatccgggacctttggcgccagtagagagcctttcatcttagagcctcgttaagggccgatctggcttccacttcttcggcccaaaccctttccccagttgggagaccctggatgaagttcaggttgtcttccaactgggcaatacggttatccaattttacaaattggcttatactccacttactaagggcaatacgagtgcccccactttcttgaaaatcctagtcagagcccatctatggtacaccgagccccaggcattctctgttgggttttatgccctnnnnnnnnnnnnnnnnnnnntaatcagatttacttattaacaaagatcagaaataacattttat

SEQ ID NO: 23303 - DNA, 1111 bp, Cannabis sativa
tggatttttactactacaatcttcgagtattgttattgaacactagtggtgctcagcaccttctatgagtggtgctccacgattgattaatcatattttttaaaaactatatttttaagtcatatgagattcaatatttaattacactaataacagtataacaccgaagaggttgctagacactagtattgtgttttagcaattctcacaatctttttgaaagttctttttagtgcctaaagataagtgaaagaagtttttttggacaagcatataaagacttgttcaagttaagtgatctccactattttatagtcatgtgaattgtgaggttcttcttctcttttgtttatctttatttacattacttgttcggtcactttgtattgtaacatattcttactcttctccatctttattagttatgcactcgacctaaaggcgactcagtctattcatcatcatcaccaccaaatgtagaagctttataatacatgggtcccaataggccaagtcaaacgtgtagagattcaactttctctcaccttgtaacttgtataaactttcatttatttaacttttcaaaaaaagtagattgattcacctttatttatttcggtattaaaaaaaaaaaattagtttaattttttttcatagttgtaaatattgtagttatttaatatattctgtgaaattttaaaaaatttgaaaaaaattaatactttgaaaacatgattcaaacatgttgttgcacgagtgactcttttattttacacgtgtgaaatagatagtttgaacattgctttctacattgtaaattattccgaattctatgtgaattttggttgcaatttaagttactccattgattgttaggtggtttctactgtaaattttttataaaaatatatataaaaaaattatttcgaagtataaaaattaaaaaaaaaaaaaaaaaaatcatttcttaaaattaatttgttattttaaaaaaaaaagataaattattaaggtgtacttacatttatgcaagagaaatacccccaataaaacttctaaaataaataaatatatataggcgaaacggcgtcgttttatggatattaaaata

SEQ ID NO: 23304 - DNA, 3281 bp, Cannabis sativa
tcatttgaccatttcttttatggataaataaaatattgatacatattatattatatgtagggccctatacaattttttgacactgtgtgcggtttttacgtcatgcggctaattaatgagaagatttaactatggaaaaatatccaaaggaatatctttcgaaacacataattagaaattaacatattcttttaaacttgatcaattttaattataaaaatactaacatattgatttactcttatattgtagtgtgatggtaagagcgagtatacaatggatgatattaacattgtgcgtgaagaatgagtcgactagtatactaggtatttttcagcgtagttttatttttattttttttgctagcaagtataatcttagctagatttatatagttagaacatatagttgtcatacttataaccattaacaaaacctatgtaaattgatatattataaattttattagataatattgtatatatcttgactatcgatgtaggggaaatttttttaaaatatatatatatatatatatatttttctacctaaaatcaatacggcggttcttaacaaactgtcatcataaacctatctcgccgagatagagtagcaatctcaacagttcaaaaggaaatgccgagattgtaaccctatcttggcggttccagtgtcaacattgcacatatatgtgagcatgtggcacacttatcttgacagttatattttgaaccgtcgagatagggtactctatctcgacagttccaaactgtcgagacaggtcatcatctttatatcgacggtcagatcctcgcgcggtggttgataactgccaagataggtctatcttgtggggttcttaactgccaagataggataattttcttgtagtggatgaggtactgtgatatttgatttggagtaacagtggtgtttcctctttgtctacaacatcttgtgttggtttgacagaggaaatgggatcttctactcgagcaaacgtgaatgaaatatctctaggagtcaattttgacatcatctcctctaatactatcatgctgcgaagtttgatgtcaaagatagtctttatcaagaaagtagcatccattgagacgaacactttcttatcttgatcactatagtatagtctacccctagtctctttggaatagccaacgaaaatgtaagtcgagactcaagtttcaaatctttcttcctaaggaaattagtgaggcatccccatattctgaaatgatgtaaactaggttgtttaccattccgtcattctaagtgtgtcttaggaattgacttagaaggaagcacataaaatgtagtgttttgtttctatagcacatcccaagaagaatgtagatagatgaagtagctaatcattgacctaacaatatccaacaaagtgtgattccaacaatattttgcaacactattttgttgtggagttcatggagcagtcaattgagatagaattctaagttcatttaaattatctttaaacttcatatctaaatattctcacccctatcagtttgcaagatctttaaacttttacctatatggttttgagccatttccagaaattctttgaactattcaaatgtgtctgattttttatgcatcatgcagaaatttgagtatttaaagtacttgtctacgaaggagatgaagtacacataacgataattctaatctcctctactatgcactttattattcattaatgtaaacataatgataattcttctcaataagataaaagatatgcaaaaatgttaaatattcgggttaagaaatataaaactcgatctaatataaattctctataatttatgagaaatttaaacaataggaagtaataaactcagtcgtaaatcacatagaccaatttaatactttcgttctaaattgaaatctatgtgtattagcatatccaaacctcacttctccgtttttgattcaaattcataatagcatgtaagagatgtatagtcgattacataaacaataatcacagattgaatagatcttatatgaagaagatacagaaaaattacattaattcataataaaacttcaagagattcattaaaaatccaaaatagaatttggttcataatctcaataaaatagtcatgataatgtctctagaagagatattaaaaccaaaaattaaatgatgagagacaaaaaaaaaaaactagattagagttgtcttgctccaatcttcatatatccaatcctcttctttttcttgtctctaggttctctaatgtcctatgtcgttcattgcttgaaaaattctctaaaatttgactaaataaccctaaattcgtaattaaaaggcccaaccgacatagatccgcatttgcgtgtaaatgacccgcgctctgtcaaggtatttttttctccagcctctctcagtaaagcaaacataactttcatatacgaactccaaatgagctgattcaagatgagttggaaagcggagaaaaatctaaaatttttatactttcactttttccaaaatctgctcagaacatgatcaaatttaaccttgaagttttagctttattttgcttgcaaagttttcctaccaaaaacaccaaaataataaattaatactaaaactaaacaaaatgaataaaataaacaaaacataagaaataaacctaaaagactctaaactaacacaaatacagaagattattgatgaaaaataattctattttatagttaacagtgggattttagttgtacactcaacaaacgattttgtgtgaaagaccactttactttttttacaatgtcaatttttttgatccgtacagacttggatgctggagtactgtcatatggcgatgacgtgaaattttgaaacccgaaaacatcctctttggaactcaataacgctgggcgctaatttactttttattgactgtatttaactatgaaattgtactgcaagtatagcaataatatttggaccatatttcacttgatctaacttaaaattagacgattcaagatgatttcaaaaactaaaaaaattatctacaacttttgatcatatgataatttgctagaaagtgaaggaaggttagtaaaaaaaaattagcttgaaattttggacaagcattaccgagcacaaacggagagtgtttaatatttcaaacatagaattttctttacaactcaaaaatccttcatattcatcttctttgatatgtcactacaaaaaacttctacttttagagacaactttttag

SEQ ID NO: 23305 - DNA, 3405 bp, Cannabis sativa
  modified_base (3327)..(3327): a, c, t, g, unknown or other
tattatatcattatccaattattacttatttagtacattaataaggaaattttttatttttaatatctcgattgatattatgattaattaagtaatactagaaacacatttaaataatttgtacttagtatttacacacataataatgtgtataattttaatcttatataattttaagtgaaataaagttacctcacttataattaattacatcattatgtgtaaaaatatatattttactagtttttaaacaatattaaatatttactctagttttcagtacaattaattattcagaaattaattagtaaaaagtttgctatatagctacatattattttttcaaaattagtcattatttattttgtttaatgtataattatatattgataaaaatttttgtttaaggcatatattactgaacacaagtttcaaatggtattttaattttattttcgatacaattaattatatttagaattgttcaaaaattaattaaatttttacgttgtaactacatagttttaataaatcactaaagttttataaatatatatacattgatgattagtttggtttaatgtatatattacagaatcattaagatcaatcaaagtgtcgccaagatcggtatcagagagaattgttcatagaatatcaatgatcaataaaactccaaaagacattcataggaacccctatcatgaactcgaggccgcttatgtggcacaaatatgtttgacatgggaagctttgaactggaattacaagaaatttcaagagaaaagaagaatgaagggtattaataatgaaaggaggaacatgaatataaatagtgatgatgagtatgatataggttgccctggtcaaatagctcaacaatttcaacaatttcaagttcttttacaacgctatattgagaatgagccttatgaaaatggaagaagacctgagatttatgctaggatgaggcttttagctcctaaattgcttcaagtccctgaatacagaggtaattaattaataaataaataatattttaatatattgattaaacctaattcttattttttttattatttctagttgtagataaatagttaagtttaattttggcgataataatacctaaattatatttctgaaacttccgtaggtgtctgactaagtgtaagttattatccacgtgttattaaataaaaataaaaatttaataacatggaccaatcaaaattgtcacgtgataattgtcttgacacttaacggctaggttcccatggaagttctagatatataattttagtatttttaccgttaaaaattaaacttatgtatttatctgcaagtgaaagttaaaattaagtatttacgccacgaattacattatactcttatttttaaagattcactatctagtaacttatgtatagtacattttttcactatgcatgatttatggttaaggtatcacatgttggagtatatataaatgtatataaggattttaatagtttacatatttatgatgggtgaggaaatataaaagaaaatgaggtatatatgtatgatgtataattaccaaataagtcctagcttattaggttaaaatatagtttcttattataaggtcttatcaaattgaactaaaaagttcaagtaagaaaattattatatatataaaagtaatattttatattttagacgaacaataacaggagttattttcgttttaccaaatagatccatagcttattaggttataagtgatgtggttctcccctattggttagtaacctgactaccaattgggagagcccttcaaataacttgtttagtattttttttatatatcaagtgctaatgtttgtttaaatacttaattagaagattaatcgattaatagtggtttaattctttgattggtttgtttcttaagattcgttggatgaccaaagggatgatgaaggtgcggggtcgaggatctcttccccaacatttcttatcataatggaggattgcatccacactttcatgaattttctcaaggccgacaaagaaaatacttgccaaatcataacatctttgtttagaagaaaacgaagaagaggctcagtcgatcctacacttctccaactcattaagaaagtcaatcaaaaagtaataataatatattttaattaattaagtattttgaaacatgatagtgcaccgtgtcttactcttagtgtacaatcctgactatttattaatataataaatgaccaggatcgtacaataccagtaaaagggcactatcatatagtttttctctaaatactacaaatcggtattaaattcttaattttcttattttaatttttattgtgatcacagaagaagatgaagcttaaagatcttcgccgagctcgaaaatgcttaagaagaagaaggttgaaagttgatgaagggatggagatagtaatgggtttaatagacctcaaagtggtttctagggttttgagaatgaaagtgttaagtgaagagcaaatgcattggtgtgaagagaaaatgagcaaagtgaaaattttggatggaaaactccaaagagattcttcaacactttttttcccatcacattgactgaccccactaaagaaatatatgttttgcttaattaaattaattaattaattatttgccaaaaaaaattaaataaaatattgactgcacaatattgaatattctactatacattagggcacttgtttatttttgtaaatattaatatatttagtgttacatgctctaatctctttttcatagaaaatttgcagagtggggcctacatttcaaagtaattgcatgtgggagtgacatggatttaaagaatccaatatgaatgggccctcttctgcaaagtctaaaaaaagagagatgatatggtattattggttggtgtgtaatgtgattcatcaatatgttgaaagtgaaatataaaagaccaagagacaaaagcaaagcaaggaatagatcatacaatacaataacaagaccaactttattactttaataaattttattaattaatttttgtaactttttttatctttctttactctctttttgtaaattgagatgaggtttatctaataagagtctagctagagataagagatatgagagtgagtatcaaaagaagagaatggtgttacacatgtatataatataaatatgtcatgggcatgtatttaattgcaaatatagaataataataataaaaaaaaaaaaagttatagcacatggtatggtatggtacactcaaaggagatatatatgtgtatatatatntatatatatatatataagtagatttctttaaacatatatatatggttaataggaccatcactttctttgggaaaaaga

SEQ ID NO: 23306 - DNA, 2693 bp, Cannabis sativa
atgatgttccttggagaatttgtcgtaattcatatattctgtctaggatcgttttggtgtcaaacaacaacatcatcactctctattccttttttcgtgttccctgtctatttatccagaaaaaatttgttcctagatattgtgttcggcgagaacctctccaagtaattatcggggaagattgtccagtacccttactattttactcagtttggatactaactgcttggtctttcctttttcagacttcactatcaagagacaatcaagaacgttaagcctcacaggatgaggctcgagataataatgatccagcctagaatatgaacgttagacttgttcttaccgaagaagaacgcatagtgggcacttcttgggagatggacatcacccttaataaattttgcaattaccaaatgttattaaaaacaaaagatttgtgggggttccaaaacgctccgtattttttttggaatagactcttgcagagggggagaaagcgagcacaagtgtggatggatctggtgcttagagcatagagcatataattgttggagtacacttccccctaaggggttattttgccaaatttttggcctctgtagggcttgctcctttccaactgatcctgcaaggctagaagctattggcgggatggtacatatttttcaaggacaggaaattgtcaatacttaagcccacaaaagtgctctacttttatgagttgaagcgagtaccatgagggaaaattgattttacacatccggcttccctcttaacaaatatccaacttgatttcttgactttcagagatttggtaagtggactgtcctttcatttatttcttttctttttatttattagggtatctcgttgattcgacttcctttcttcctttacaagtccttatggtcggacaaaaaggaccccatggataaatgtacgccattaagtctacatggcttgttataaggaggagctagatatcaacaatttggtcacgacaccaaagttgcatgaagtcggcctaatagttcctcatcagacgattgatgccccaagcttctgtgggttggtcactaaaccggaataagtgagggaaaagattgctgacattatgaaagaggaggtgaaacaggcagccacggaagataaggtctagctagctaagcttaggaagcctcaagtggaattggatgaagccacatatatagtagtgcgattccaggacgttcttttagatgaaggtgctttggaagccagtacttctaaatgaggtaattcaccttatcttttggttcatgctccccaaacaggagacttcaaccatattaaacaagatgggtttgacccatattttctaatagatcctctcattatcctaccaaacaatgtatgttgcgggtagatgagatagtaaagagtccaaaccatttccttccgccttctcaaaaaactagggtagatccatttacccttatgcacaatcctgggttctttgagtacaaaagctttttaggacatgaaggcatccttagctttggtaaggaatactttgaagactcgggttctaatcttgacggttgattccagatcttataatgtttgtcatatatttgtgatttcccactcactatgtatttctaacttttcttttctaatttcacagtggcaaatgctaagcaggccctgaagcaattccgggtgaacattgccgataaaagcaaagcatttgagtacaactaatgccaccaaaaagactcctcagtcaaggccatcttggtctcaagccaaacctgaagagacgacacctccaaagactaaacatttgaacacaaccatcacatccattccactctaacaagttccaccttctgcttctatggcatcagcagcaccaacgacaccgtccaaaacaagtagagtaattgacctctacgaggatggggttccaaatgaacctcttgttcagaagagatctgtgaaggtggaggaacgagatgctaagaaggccaagcttgatgccttggcagctaaaaggagagatcgagttgaaaaggacacaactttcgaggactcgattgggagtactactctcggagactttaaaaaggtatataaaaggaatatggttcctcctcagttcccaattaggcctgttgtcccagatgattatgaagcagcactaaatgatgaagaggatcagttggtgacccacacttgggattctaattggggagatgtccattacattcctaccagatttcttcgaggcaaaatgctaaactgtcaacctaagacctgactttaaagttatccaaaaaggtcgtggacagatcctttgctacattcagatttgtcttttcacttgggagcaacattgccccctttgctgcaaacctgcttgaccaagttgggacttcaatgggtcaaccaaggccaaagagatgggagatagatgcacaggaagatctggtgttccttagtcaaattctccaaaaccaagccactagggtaaggtttttgaacgttgtcacacttactttgtcctttcctcatgtcttcattatttctaattgtttgtctttaaatactttaaagaatctctattttaaaatatctgatgtcagtgttagcattagtgtagcaccattataagttaacactaagaatagttagcaatattttataaa

SEQ ID NO: 23307 - DNA, 4007 bp, Cannabis sativa
tttggtatgttgttgcttttgaattgtgttttatgatcatttatctcttattaaagacacagaacttaaatgagtttgagatattgttcttgctgtccttagataattgataggaaaattttcattgtaagttgtgttaaggactcatttcacaatggtctatttccttcaaacaatcagatagcatccagaagaatacaatatggttcatattgctcaatgttgtatggaaatgttcattgaattagaaaacataagttggtatcagtagttttaggattggtgtgaggactgtagttgagttgtttatgtgacccaagtcttgatttttgtgaaaatcagtgaaagatgcagctgatagaaggaaattagtgagtaaatggcatcccacaacaaaaggaacactcaaaaggaactacagggtgccatctaaactcgaaggaaggcgacttcttaaagctattgcttccttattgtcagatgacgatcacttcgtagatgcatcctcccacaaggtagcacaattgtagaaagtgctaaatcatgctttatcccatttgttctttttgtcttctctttttgcttaatcgaacgatgttgtgaacttgtagggttgtcaaattcgaagggagagcgcacatggagagagcgtttgttgcaacaatgtgagggccctgtttgatgaactcccaactccacacctaattgtggagatcacaccattccctgaagggcctctcactgaaaaagattacaccaaagctgagaaattggagagggtacttagaactggcccgaacgtttgattcttctctcgagttaaatcatcgctgtctctcgttagaactacagcttaattgtatgtatgttttgagccttgtacatattgaacagaaaagtttgctgctccacattttacctgaactgaaaacatagcaagcttccttaaattgacagttttagttttcttgactttcagaattggtagtagtagaagtagaatttagatacttttagttgctgtcttgacaagaatgaagagataatactaaagggtattattgaatctatgtagatcatgccattggagttgagtttttaagattgtgaaattttctgaaaatgatcataagtaaataaatgtgcacataatacaaaagtaatcaaaattcagaaaagaggattttggcaaagcagaaagttaaatggtaatagtagagcctaaggaatctggtgcaatcatttgattcttaggtgaaaagggtattgagttcccagttagatctgtggcaaagagattagcaagggcatatgatgagattgaggttggcccatgtggttgttaggttgagaccaattgggcattggcattcctaaaggctggtttgaatagttaaatcttatcattcccaactcaaaaactttagttttcttacctttaacaatcacccaaatattagccaaacaaaagtttaatttcagttcttaatatttccctttacttctttccaaagaaaaactcctttattaattgcaatgaacaaggctctacactttagcctatagtatattagtatttggtgacctgaaaattacagcataatctagagatgtccaagtgggactcaaacatcatcatcttcaaagttcaaaacacccaagtgaaaatacatcttggatgaccaccctaccctaatacccaaaattgaaaaacagaaatacaaaaatcccacattatttagatgttgaaatttcttaactatagagtattttaaaagataattgtaatgtgaatagaaataagatgtatgtatgaacataaatagacgcttagcttaattaattaatgagactaataaggcgatagtaggagaaccatttcattattgattggtagttcaacaagctaaccataactattgagtgatcaagcaaacataaacaaattacaaatcatgttctccagttatttctaaacgagagtaatctcactcatctcaaaaagtgtaattatatatgtattttttatttatttaaaaaagtatattttagagataactacactcaatgactttttccaactagttgtaacttttatgcttccaaagagatgtagtcgtcgtcctatttgtttttcacaaagagtaacaagaaaaggagcacggtctttaagtcacataatggtataagagtagctcttcccattgcatccctggagggtaaccttttcaattgggataacacattattcacatacactcgaggaaaaacatttgacattttatatgaaatctatcaaccatattagataaacaacaattgaattgatatccatatgcaactctgttgaaattaaatggtgcacacaccaatagaatttctgagatgggcaaaagtgtggatatctaatgattttgtgaaaagattagcaagttgagcatttgtggatatatgcaaatggttaaaagtttaggttccaccatctgtctaatgaaatgatatttgaggtcaatttgtttggtgcgggagtgttggacatgatttttagaaatattaatagcacttgtgctgtcacgaaacagaaccaaagagtctcgtagaaaaccataatccgttaccattttgttaagcaaaatgagttgagtacagctactcccagctgctatatactcagctttgacagtggaaagagaaatagaattttgcttcctactcaactaggagacaagattattctcaagataaaaacagctcccaatggtacttttacgatcatccgaacctccagccaatttgaatcactgaaaccaacaatggacatgttagtatctcttgagtgccataagccaaacttagaagtacttgataggtatttgaaaatacattttattgtagacaaatgagtttttttgggattggcttggtaccgagcacacaatccaacattaacacaaatatcaggttgactgactatgaggtaaagaagactccctatcatgcccctgtacaaagttggatcaacagactcaccagactcatctttactcaacttagttagggtgctcggggtaggggcatgtttagtgtggactaagtcaaacttctcaagcatctttttgacatatttagattgagaaatgaaaatacctcgatcagtttgcttgacttgcaaccttagaaaaaactaagatctcctataagactcatttcaaattcacttgttatgagaacaacaaaattagcaacctctctctcacatgtagatctaaaaataatgtcatcaacatagatttgtgcaacaaaaatacttagttgcaagtgcttgataaacaaggtattatcaacagtacctctcacaaaatcacgggaaatgaggaaagaaaggctctgcactttagcctatagtatattagtatttggtgacctgaaaattacagcataatctaaaggtgtccaagtgggactccaacctcataccttgtgggacccaatcaaattacatgtttttgttttatgttgaatttcttttgacgcacaagatgaacacaattttagagaaatgagtgtcaaacatcatcaacttcaaagatgaaaacacttaagtgaaagatgaccaccctagtactcaaaattgaaaaacaaaaacacaaaaatcccacaccacttagatggtgaaatttcttttcattccattttatataatcacctaatccaaaaataataacctaatagagattctttattaaactttttataaagtttttagtagtgttttcttaatgaaataattaccaaaataacggtaggttttttaggagattttttaccactcttaagagctaaatggtgtattaaacttattaaacataagacacccacaactgaaaatatgtatgatatggtaggaatacacaactgaaaaatatgtatgatatggtaggaatacacaactgaaaagtgttgatttggtcttcattaattagggctaaagaggattagttctactg

SEQ ID NO: 23308 - DNA, 3617 bp, Cannabis sativa
agttttggggtacaagtgcctttcacatgaagttttccaagtagctactacaaattacaattagatacaatggtcatgaaaagtgagaaagttcttcccaattgaaaattttcagtttcacaacttttcagaaacaaaagactaaaagtatttcatttggaaaaaaaatgagtattcattatacatatgaaaataataaacaaaaagtttaccaggttgaaattgtggcttagtccacaagcaagcaaaaggttgtttattgcctctgtggagacagtcaaacctccttcacacatttcatcaactaaaccaagagcagcatgcacctatattaaaaaaaatttaacacattgagtaatctcaaatcaatctccaaactagggaaaagtttacaaaacataatcattaattgagtaagcaaagagattactattttcaacatacctgacaaaataaaataaaatggggagctatattttagaagaaatatcttgtaattgtatttagtcaagtcaatagattaatcttaccttgcgtaaatcgcagcagtatttgacaagcttttcataagatgcactggaaggcgtcacctctaatttagagtgcaagtttttgaacgttaagatgacatcttcaaccttcaatgcccaacaaaaagtaattaaacgtaaaatagcatagtcttgtgtcacaatattacaataccacattatacataaatacgttgacagccacattaataggaagaactaatcttaatcagagtttccagggtagtgttaagacatcacgaatatcactcaagatttattagtaaagcatacttcagcatctttctaaatgttcagcataggtcatacttctgcatacatgatcattgcatcttatttgcttaattgttcagcatcttgactcgagtaatgttataatttgcgagccttttaaggttccaattactggccctactgcctaaggaaacttcaaaagttacagtaaaagcccagaaaaagatttggaatgtagcaagtgcagttatatgttggtcgtgaagagacaaaagagcttctaaagattgtgaatagggtagtgccttttcatgggataaggttaatgtttgggtttctttggctgtgaacataaaagagtttaacaatgcgatattttcaatcttgtcgtcagggatggaacttcttgctgtataaaaaataccaatgttgttctatcatatttgtacatcaaaatttgcattaagaataaaagtatgctatgtataaataaataaatgcccagctgtagaaataaaagtctctttaatgttccaacctattctttagaatacttgtcctccaaaagttgagagaaaaattaactattctatctaattcagcctgtttatctttcaaaaccccaagatatcaccatctaagacaagagaagttcaaaatattcaatacatatgaagagaatgcattatttggtacagaagcaaactgcatgaaaagcagaagtgcctcttacacaggtgggctcaagggaattagtaaatacgagcagcattcataagaagatccttaccgctaaatttggatcgccaacagcataactgaagagcaaatgtgtaaaattttcttgtccagaatctgcaatttgaccaacatgactacatctattaatagcaaagtacccaagacctaagaaaccaacctaagcctcagatctataaaaaaaaaaattaagtcatggttgacattcatttaaatgcaattctagagtttcactatttttcttgtattagaagtcataattggtggggggttgaagaaaacagcaaaatgagacatgtacatcctgcgctcatatctgatgagacaaaatacaaggcttggtgcatatagaaagtgagttaattattaggaagttggtaaaaccccttgaggaataaataattttagttttcaggaagaaaaaacctcagatgcctacaaatatgaaaccacatgacataagttcatggcgtgcccggaagtaagttcagcaattgcttgtgtttccattaagaaggaaggaattctaaagggatgaattgatacaagggttgataggaaaattccagctcatgatcataccgtgagttttaagtgcaagaaagaacttctccgcaagcaactccagttgtagctttcccaatgatttaaagataatatctacacagtccactgaagagaattgtgtaatgtctacaatttttaatagctgcaaaagctccgcatctcgccctccttcatatagtgctaacaagtaattttctgcatcacaagttaaagccagtaaggtatctaaaaaaggcaacaatagcaagaaaggacccaaatgcacgacagaatttaaaagtaaaggataacatgtatcactattggaacagtttgtttaaacaaaactgtttcataaatcagaatggatatacaaggctgtgggaaaaccacaggtatcacagcaataaaatgtgatacatacataaacaaacaatatggcaaacattaaatatataacctcactctcttaataaactagagaatagaattcctttaaagcactttacattatgaagccaaaaggcaaccccaagccctaaatcaattattcaaagaaatctgtcaggcaggagtaaatatttcaataaactaaacgatacacaacagactcaaacacgacaccataatttccaacaatgtcatctacagaagtatagctcaatcctggatcagtaaaggaaatatcatatgaaggatctatcaagtattttattatagatcaattagtaaaggaaatatgtactaatactttgtcagaaaatataaatacgtaactaaaaaacctaattgcagagactggtgcctttccatagaagtaaagtcaaccttgaaccaaaaaaacaaaaagctagcctagaaagcagaaacacaaaccttgtaagctagacttggcttgaccttccttgctgacaatgtaatgacacagctcttgaatttttttttcattattgactttgatccatagcaacatctcataatagcctaacttagaaaatgaaatacaatttgcatctgtgataacttcacaaaagaaatgaaattcttcaaccatagccatgtcaattaaataagctagaaagggaccataagtttcctcttctagtggaaaacctttttccgtcattgatttaaaaaaacgaaaaaccctatggatctgttctagagcaacctcttcgtcagtggtgctcctagccttctctatgcagatcttaatcaatgaaatgtattcttttacaccagtttctcgtcccaacttaccaaaaatctcaacagcaatgtccgatcctactttatcagcacacattttaactaatgtattaaaacgaccaacctgggtgcatttataaacccacttttgctttctttcacgtactacttctttacgatgcactgatatgcggccatttgtaatagacggaaaccatggtatctctaattctctccctagcgacttttcaccaacaatttcttgatcaggtgaactttccacagcatcagctgcaaaatgagcaaaccaatgacatt

SEQ ID NO: 23309 - DNA, 1679 bp, Cannabis sativa
gataagcaacttgtttgaatctgagagtgtgagtttttgcaatggaattcctgtccaggtagaagccaaatgttggatatctgcctctgtaaccatcacttgaccttttgtagctacttctgttttctgaagctgagctcgggaaccagcatggtcaatcaagtctattgctttatcagggagaaatctatcactgaaagcaaatatttgaaatgaaaccacaaaacaaggaaacaaaaacatcagaaagccatccctacacttgaaaatgaaaaacaaattacctgatgtaccggtttgacaaacgagccgctgccactatcgcctcttgcgaatacttaacaccatggaaactctcatatttgttttgtaaaccattcagtatttcgattgtttcttcaatagatggttcaggtacttcaactgtttgaaaccttcttttcaaagctgagtctttttcaatatacttcctatattcatcctgagtagtagcaccaacacactgcaccaaccaatacaagattttgtatgtaatcctgaaacaaacatatatacatgtgcttaaaaccttaaaaatgacaaaccttaaggacacctcttgcaagagctggtttcaagatgttagcagcatcaagagctcctctttctcctccagctccaataagagtatgaagctcatcaatgaagaggattattctccctttgctactttcaacttcttgaacaatcttcaccaacctctcctcacagtcgccacgatatgtagcaccagcaacaagtctaccaatctccaaagaaaatacctgcatcatagcaattttctcaagaaaaatgacaactctaatgttttaactcccaaatgtataaactgtttataccttattgccctgaagtttatttggaacttgagcattaacaatggcctgagctaggccttctgcaattacagtcttcccaacaccagggtcaccaataaggcaagggttgttttttcttctcttacatagtatctccactacactttctacttgttgtttccttccaatcaaagggtctagcttacactgatttattaaatacaccaacttgttacatgctaaatattacaaatatcaagttagaatactgaaattcatttggggtttacctcttgggccattttggtcaaatctaaaccatattgctgaagagttggaacataaaattgctgctgtttgtaaccaagcttctccatttcacatacaagttgatatttgtgttgtgttttgtaaagatttatctggtatagtacttttatactatgatatttacataatactgtctcttgggatacattggtacctatttcgaagaggggcttttgtttatcatagtggttgagttcaaagacttttgcttatgtgacttgtggtgtttcagtattccaaacattaataaggaaataatgactgttgttatgctaataattgatcaagcattaataaggaaataatgactgttgttatgctaataattgagaaaacaaactcatttaaaccaaattgtgtcatatatgttcccaaatatcatttatttttcttttaaaacctaaaaataaaattacaagaaattaagattaaatttatcttaatatatagtttctttttcaaaaataaaacttcattcaaccaacaaacaaa

SEQ ID NO: 23310 - DNA, 4157 bp, Cannabis sativa
aactcaccatttaacaccaaatgcccacaatctgcaatacaccagtgactacaacatagatcaacaaatacacatgggggatggatcaggtgtgcctattcaaactgttggtcagtcctttttcaactctcccttgcacacaacaattagatttacaaaacttactccacgttcctcacattacaaagaatttattaagtgtttctcaatttgaacaagataataatgtgttttttgagtttcacccattttattgttgtgttaaggatctggcctctatgaagaccttgctggttgggaagcttgacaagggcctgtaccatttttactcaattcaacttgctcatctacccaaatctcaagctttattcccaactcaaccatcatctaccccatcctctatctctatctctactgctactaaatgtaataatacacaacttccttttcataatactcaattttctatttggcacaatagactaggacaccctagtgctaaaattgtacaatgtgccttaaaatcttgtaacatacagttgagtactaaaaatgaacaaagtggttctgatttgtgtccagcttgttgtttggggaaacatcacaaacttccccttcccatttcaaatactgtttttactgaaccattgcaattattacattctgacctatggggccatgctcctatcaattcttcaagtggctataggtattatattagcttcattgatgccttttctagacatacatggatatatatgcttagaacaaaaaatgaggcattacctacctttatcacctttaaaaatcaagttgaattaattggggtataaaatcaagcaaatccaatcggattggggtggggaatatcaagccttcaaaaacctattaaaagaacacggtatacttcatagagtttcttgcccacacacacatgaacaaaatggggtggctcaaaaaaaaaaaaaacataggcacatagttgaaagtggtttgactttacttgctcatgcttctttacctctcaaatattgggatgaagcttattatagaacagctgttttcttgattaatagaatgccaacccctcaactccaatacaagactcctttagaagtcttgttcaataccaaatccgattatcccatgctaagggtgtttggttgtctatgctatcccaacttgagactttataatcgtgttaaacttcagtatagatccataccttgtgtttttcttggatatagtttatcccataaaggttataaatgcctatccaaagatggtcggttgtacatctctcgagatgtcttatttgatgaaactatctttcccttctctcaagctgcctttatgcagcaatctacatcacccacacacactccaactcctaatacattactcaatctccacaacaatacacctaccactcatcctgaccaactagtaccatcacaaattccacaaccagctcccacatcttcctccttaccccaaaataacccatcacccatatcacaacctgctataccaaatgctccctcacctcccgaatcccctaccaactctacaccagtacaccaaccattaccatcatccactaccactactgaacaacccattataaatataccagctgctacaaccaccaatattcaccctatgcgtacacggtccaagtcaggcatctccaaaccaaaggttttaatggcatctctttatcctctttcattaaaatcagcattaaaagagagcaagtggtttgctgctatggggattgcattttatgctttggttaagaataatacatgggttcttgtcatcttgcctgctggaaaaacacctattggttgtaaatgggtgtatcgaatcaaagaaaatgaagatgggtctttgtctcggttcaaagcatcacttgtagcaaaagggtatcatcaacaagctgctttcgactttaatgaaactttcagtccggttataaaaccagtcactattcgggttgtcctcactatagctatctcaaaaggttggactatacgacaattggatgttgataatgcatttttaaatggtgatttacaagaggagatttacatgattcaacctccgggttttgaggatccccaatatcctgatagagtttgcaagttaaacaaagaaatctatggtttaaagcaagcccctcgggcatggtttgacaaactctccactgttttagttgggtttggctttgtctctgctaaaactgatcattctttatttatcaaattcacggctgccacagttctttatgtactagtgtatgtcgacggcatactaatcacaggcagtgatgataataccatgtccactcttgttttagctttaaacaaagctttttctttaaaagatcttggtactctatcatactttctgggaattaaagcaattcaccatgacactggcatacttttatcacagcagaaatatatacaagatctcctttgcaaagcccaattacaaggagttaagactcaaaattcacctatgaatggtggcctaaggctttctcactatggcagtgatccagttgaggatccaaccctatacaggtccattgtaggggctctacaatatgcttgcattaccagaccagacattgccttcagtgtaaataaggtctgccagttcatgcataatccacttcaatctcattgggtggctgtcaaacggatattgcggtacctagcagggacattagactatggtctacaactgaatcgggtttcatctcttcacattcaagcttattgtgatgcagattgggctgccgatctcgatgatcgaagatccacaactggctattgtgtgttcgttggtgaaaatttggtatcctggcaatcgaagaaataaaataccatttctcgatcctctactgaagccgaattcagaagcatggctgctgttgtctccgaaataacatggattcagtctctcatgtctgaactacatatgaacagcagcctcgccccatcagtttggtgtgacaatctcagctccataatgttagccgccaaccctgtgttacacgcccgtacgaagcacattgagatcgacctatattttgtgcgtgacaaagttcttaacaaggaaatttcagtctcacatgtaccaactgaacaccaaattgcagactgtctcactaaaccgatctccaacaatcgttttcctaagttgagagacaaactaagtgtcttgtgctcaagtacacttagtttgagggggcctgtcaaggataaagaagctgagctgtacaataacagttagaaaagttagaatattgttaggaaatctgttatttggttgtaactgttttctgtcttgcacctgctgctatataaacattgtaccgcccttttattcaatgaatgaattgcttctttcctttcttcttcttctttctttactttcttctttctctgttttatttattgtcttttaataatcttcacaaaatacaccctaaacatacacaactatagtggcaattaaaaattatgtgtttcacattttcaacatctaagccacaaatcggacaagcagtatcttgtcagatgttaaatttctgaaatctttctttagtctgtaatctatcaagcaattctaaccaaaaaataactttttgtttagaaatattaaaatctaccttttcacattctctctttcaggattaatagtcttatatccatgcctaaatggagtagcttcaactcacccaagcttttgattcttttaaaatttcacactgttttagaactgagaatgtaagtgcttgatgatatctgattgatattttctcaaaaaaaaaaaaaaaaaatagtgcagaaaagttctgagcaaaaacaaaaatgttataattaggattatttttgtacaagctttaattaaaatagagatattaaactctttagtttatttactatatatttctcagtaatttcaaaaccattctagctgtatagaaaaatcccacttatagtttattttcctataaagatttttgaataaattgtggctaaaatacactcaatatatttttgtgaaaattacaccaaatatggaattctatacaaaagtttgataaatatggcttttttaactttaccactcttatatgg

SEQ ID NO: 23311 - DNA, 3908 bp, Cannabis sativa
tactccactcattgccaattggttttgagatggaaccccatgattcatagctctcctagtttatgtagacgacattataatcattggtccgaacctttcaatgctgcacaagctacaagaatccctacaccaaaagttcaaactcaaggcccttggagacctcaaatactttctcagatttgagattgcttgtgccaaagaaggccggttcctttgccaaagaaaatacacccttcaattacttgaagactctggtttcattggctgcaaacctagtaaaacgccaatggatcctaaattgagactagagaatgaacatggtgaagctttggacaatccatcaagctttagacaacttgttgggaaactcctctatctcacattgtcaagaccgaatatcacatttgctgtcaacacccttagtcaatttatggcaaccccctgtacagcgcaccttcaagctgcccatcacctccttcgatacatcaaaggacaccccgggcaaggactcttatattctagaactttttcattgcatctacgaggattctccgattcagattgggcttcttgccccatcactagacgttccacgacagggttctgcatttccttgggagactgcctcatatcatgacgcacaaagaaacaacccactatatccaaaagctcaggagaagctgaataccgtgccttggctgccacaacaattgaagttacttggctgcagtatctcatgaatgatttccacatcccttaacctcatcctgcatttatttactgcgacaataactcagccatccatattgctaacaaccccacattttatgaacgaactaaacacatcgaactggactgccacttcatccgagataaaatcaacagtgacactgtcagactcattcctatttccaacactcttcagcttgcggacgccttcaccaagcccttgacatctccaatacttaacacacatatttccaagacgttcgtatttgacatacactctccatcttgaagggggggtattaaagtttacttagtgtggttacagtgcgtatattttactgctactgcttgtttgtttttttttttttttttatgttaagtttgttattttatctaacttcccaagttagtttaagtcggttttggtagtctttgtcggtttggttgtactgaggtccaagctataaaaggcttgcctctcctctgtttctaatcgaatggagtttgactctttcttttcaaaacattctttctttcttttctcaacaaagaattctctgtagataaagattttttgggtaagagtgtgagaggtaaaatactttgagagaactcatcagagaatcgatctcgtctgtatttgtacttgttcttaatcaataaagaggatatggtgatgtttcagaattagagtagagccatagatcacatcaatctattggatttaaaccaatatatatcttggtgttgatttctattgttttactgctttaattgtttcttgttttcatactcttttcatccgtattttcatctgttttgtgtgtgtaatctgttaatcttgttgttgctaattattgtttgattgtttaaagttttgttgatttgattctgcacctttagttgtaattttcccacaaatcagagcttggtaattgattacgattctttctgctgcaattcttgaagaaactttgaatgtcattaatggtaagattcgaattggagaaattcgatggaataggagactttacgctatagagagaaagtcttaaggaattctagtgcactagaaggtatccaaggttcttggagatgagaaactcttggccgagaaaaaactagtggaaaaagcataaatgaatgagatggcatactccatgatcatcactaaatcatttggttagcaaaagttagcaaagtaatttaaaaatcactatagcccgcataagctagtgggacgttacacataattagcaaacaccaaaacaatctctctgaaccaggtgtttaatttaaggaggaaccttcaacttccaaaaccttttgcaaaagtcaaaagcctcattctcactccttcttccagctctctcttggatatgttggttagtttattttacagttcattctctgaaaacctctctagtccacacatcaaggttctttatgaaacaaatttaggggactacaatgaataagactttgataccttttattaaacatatcagctatatacaatttttcaatcccaactttgtccacctaccatcatcaagataacaacagtagcattttgaagaccaggattaaatgtactaaaggattgatgttatcctgaaaccatggttccccaaagacatttatgttactactcctaccaatgtaccatctaacaccacttcttactatctcttgtgcctctcaaatactttaccaaacaaaattaggatcattacctaattaggcattgagataacgtctatttaagaaatataccttgcttttaaaagtttagtggaaaaaaaatcatgtccagtgagtaattggcttgtttcccaacatttctatattaaaatcttacagattctgaaatttcattccacccatactcttgtgcttacataacctatgaatacctttaccactagctagtagaagacgatttctactaaaacatggacattaccctctccattaattaaattgtcatatttgaattaatgtgttataatttgtgtgtttttactaatattttttttataatgatttaaaagtgattatttaattttttgtaacttatagtactttctcatataaggtgtgagaattgtaatatatcattataacataataaatatttcatttgaaaaattatagaatagaatttaccaagtgtgaataaattaaagattaattagaatgtttatcttctgaattttgacatgtattaataaatcatattccgtgaattttttagacagttaaaaattctctccgaactattaaaattattagactcaagaacttttgtccaattttactaatggaagcccgccatgaataaaagttcatgaggtataatttaatatatgtcaaaatttaagggcacaatttgataaatatcaaagtttgggggtacaatttaattcatggacaatcactgaattaataaaattaaacaaaacttcttgaattcaactatctcaatatagttcgaaaaaatatttaacaacttgaaaaatatgaaaaacataatttagtatatgtcaaaatttaagtggagaaaatattaattcgtctaaattatgtagatcaaaataagatttatagtaaaacaaaatgtatatagattagttatccgaaaagtgcatataaattgatacacttataataagatcttaaaccactagtagtatgctattataataataaattaagtttgacatgtaattaattattctaatttcctatattttttactactttgtagctgtagggaacatttgttttggtttttgtttgaagtgatgagtggctactttaaaacagcatttcgattcaaaggataaaaaacatactgacagaataaaccacgtggatattccttttatgtcaataaaatatgaagcagttaatctttttttctgtcaataatgcaaagcctttttaaagtgcacagtatgtacaacaagatttagattagaaggggtattaaagtagttatttagaatttgagaataaaatgaatgggtttcatctcaaaattaatcggcgatggaaggagtaatctattcatcttccatatcacaatttttttctagacattagcaatttgatactaaatctttaatatagttttaaaaagaaaagtagtcaggtttcaaaaaaaaaaaaaaaaa

SEQ ID NO: 23312 - DNA, 1436 bp, Cannabis sativa
tattttatagattatttataatttcttataattttgtaagatatcttaaataattataatattcatgattatgaaattaattagattaaaaaattatcctaaattctaaattagatgaaaatgcagcagtacactttacactttataattaattagctattttctataatttttattaaatttcttacatatcacaagggtaccaaacaccataaatgtttcgatatttattacattaacttatataagattcaatatttaattacacaaataacattattataatattacaatattacaattacacaaataataatattataatatttaatattcaaagctcttattctacccaacaaaaaaaaatagccaatcatattattccaccaacaaaaataaaataataaatatataaatatataaataaaaaaaaacattaatattattctcttttgatttctctctcttttctttatcttcaattcaacccttcagagcttcgacgctagtcttcgccggccacccacccacccacctccgactcttatctcctccactctctctttccccccaattcttatctccttaactttcacctcttagggtttttctcattcaattttggtttggtgatttctagcgtcgtcgatttcttctgtaatgggggttagggtttggatgagtgggatccttatgatgctcttatgggaaaccctcgcttcttctgccgaacccggcctttgctcttcaatttctgttgctgattcgatcttagagttacgagaatccaactgccctctttatcctgattccctttcatttggtttcaatggtgtcacagaggtactttgtttttttctcttttgttatctttttttatttgttgagttgattttcttttggaggtgggcttgaaattttgaatttgggatttggggattgttgaagctaattgggtttttctttaaatttgtttaatacttcaaattggaaagttttgaaaatacttacattgcatttgaaattagctatcatttgttgagttatgtctaattaaactatttgaggttaatctgatgatgtgttattctattttaacatatgaaagtgctttcaaagcttgttgttgttattgtttcttatctatagttagtttagtttagttgttgaacttgagaattgcagaagtgttacatgttttaaaggacttttgtctttataattatgtgtagggagatgaggtttcattgcaaagggccttgaatatggttcacaagaatagttatgattatgttgctgtacttttctatgcctcttggtgtcctttttcgaggacttttaggcgaactttctctatcctgtcttctctttatccttccataccacatttcgccattgaagaatcagctatcaggccaaggtttgcaaatgataca

SEQ ID NO: 23313 - DNA, 3981 bp, Cannabis sativa
attgtgaggttgctccctcgctttggaataaactttggagcagtaatgttttggagcaacataaggttctttggtggtgcattctctccagcgccctccctgtcaagtctatgattaggaaaagatttcacattgaggatgagagatgccctttgtgtggaagagatgaggaaactatggagcacttatttcttacttgtgatgtggctttctatgcctggcgatcttctcattggggtatttattcgatctgtgacaccggtatctgtatgtgggactgggtcaaattcatttgggacatgaaacacaaggggattgctgtggaggaagttttcctgtatgtgtctcttgtggtcgacaccatctggctcactcgaaatgagaaggtacataataatcttaccttagatgttaagaagtgtattgactttattcgattttcttttgcagatgtacatgctactattttcccttctcctgtcccttgcttgaaggagagctagtctcccactctcaggattagatcaaactgaattgcgatgttaaagtggggcttgatagcatgtgtatagcagctgtagccaggaaccatcttggtagggtagttcgggttcatacgtctagtcttgacttttctgatgcgctttattttctaatgtatcttctctaatattagcaggacttgtaattttattgcccataatgtagctaagtaggcgtttacccacaagatatttggtgacattccgctatctaccatcccgataaacatattatgtaatgaccgtgaagtctaactgttctatttatcaaattacgcttttctctttaaaaaaaaaataaaaaaaaaagacactgtagcaaaacaaccaaaaaaatatatattttatattataatgttcagttggagataaattatacactatatatagtatactagtgataactttctaaaccatttatttttgtttatgtatgctaaataagtctcatgatattttgatagcaaaaatgctgaaagtggtagaccaaattcttgactatgaacattagatagtcttgcccacacagcaagagaagcaagcaatacaattatcactacaagaaataaagaaataaacttaggtgggcataataaaaatacaaaatagatcatgagccccaaacctttagaagggatttcgtttcaaaagccttaattactactatggagccagatttaattgtcacttgtttcctatcttttgaaagagctgtctcaagagataacctaactgcaagtaacttggcttctaaagctcctatgaattgaatccacctccaaaccctttatgttcaatctcaattgaaatcttcagttccatagttttccttgaatcctatgttgtaagactattaacaaatattactatccaattagaagttaaaaatgtcattatcaacttaaattttaaagcttaatcttaaaattagcatggataaaatatataaatgcatagtataaattttaaaaaatatcacaagaaagcgaccagaggacataaatatatcaaataatagaaaattttaaaactacctgaatttcactctgaaagtgacatgttattacattattagagttcgaaataatatacaaaaggcaagatcttcacctttttcatgttggagctctttgcaacttctacgattttgaagcgtaattcttctatgcttctacaaaatgttggttattctaagtaaatcatgaagatatataaatagttttttcaatttttcagtagatctgtcatagctcaaaaacaaatagttcatgacccaatattattgtttagtgttaacaaaataaaatttctatagtaggaaagtaaaacaaaaatagtagaagtagcaatgtatataatttaggaaggaaaggacttatatataatatatataattttataaggcaagatcttaaaaagccaagacaacaataatgtaatcacataaattggaccaagtggaatcgtacttttacataagtagcagtattaatataatcaacttaagtattagaaaagtgtaattacatatgctttatagagatctacctatgaaaataaaagccaaacattaaatgaataaactcacttcttgtatgcaatatccataaacttgttccttcttttgaacaagtgattgttattatacttcctggattggggaagagccaatccagcccacaagcactagcttcatatcataccaaataagcaacctacaaaattaatacaaacttatagcatattgaccaatgtatattataagtgtcacattatgtataaatgtggatgtttgtaaatagatcattggcaatttgaacaaattcaatcacataggattttgaacaaaaaaaaatactaatttaaatttttacacatacataaatgtgaaagaggcagaacgatgcaactcaatcttccatttactactcttaaggaaagagctgaagattatattcaataataagcacaacaaaacaatgctgagtatgtatctattctattaagatgaataagagactaaaataattcataattttatgacatattactataataacttgtagtgtcgagaaataaattgttgataagaagaaaatttttatcagagacatagcaaatcaatatattatatagaattctgcaaatatatatatattatatagaattgtgaacaataaatggtttggatgaagaattctttagaaaattatgtttaagtggtcatgttcagcaatcacttatattaagaataagttacaaatttataaaaataaatttaaaatatgtacattcttaataaaattcttctctcttcaatcataatatacaatatcccaaaatctttgaggtaaatctttctagtttaattattttctcaatttttctttaaaatcaaaattttcatagtttattaatcaatttcttaatggaatagggatgaatgaataagttctcttgaatttggtggaattttttgcagattatatcaggaaaacaaagaatctaaagcaagaacaaactcagtgggacatttctacaaacacttgagtgaataaaaaaaatgtcaaagtacgaacataaattcattgaaagcgaatctaaaacaaagaaattgtaaataaaaacaaaaggaattagtgtgtactgtagatgaagaaagaatcttgaaaggggtcgtctttaactcccaacttctcaatgaacgacattactgttactggttggaaatgaggagcttcccatggatggagagccaaagctagtcaaaataatcaataacctaaataatctgaataagcctgaagtggcgaggattgatcatgaggtggtgaggactaagaatgacaacaagttaacaaaggaaattaaaatgttttttttttattaaataagaaaattgatttttaaatacaataaaatcccgtttcaaaaaaaaaaaaaacaataaaacattgtgaagaagttcaaataaagaataattaacaatttttccttctcaactttcaaaaatattaattttggtccctaaaatatatggcttgttaaaaatctcctaaactattatatttacaaaaatttagtccttctgttaagttctgtctcattattccatttaaatcaattagcaattttgccttataaactttgacaactattaaatcgtacctctcaaaataaaaatgaaaaagattcaataatttttaagtaaatcttagaaaattaatttagctattaagaaaaatcattttgaatgattaagaaaattaaaaaacaaattaaaattttaaactaattacgcgatataaaaaattatttatttttttattagaaaattaattaagacattaaaaatttaatttgtaaaaatatattaaaaactaattaaattttacaggaacaaatttgaatatattttttatcaaaaaatatagatttg

SEQ ID NO: 23314 - DNA, 2500 bp, Cannabis sativa
aattttattccattcctattcatattctcattctcattcttattcctatattttcattccttctaatcaaacgccacaaaaaattaaataatttactgtagtaaatatatgtttcaaataatccaatagatgggtgtatattatgttcttatacacatacggttaattatttagagctctgtctttatgcaatataatttagttagaatttctaaaaattagtgagatgtctcttgtaacatcatataaaaagtatttagaattaatatacagtactcattgtttttatttatatatacaagaaaattaataatctcccccgtatttacattatatattttatttactagcttatacatataaacattatacgtataaaattaattatttacatgttaaaacaattacctgagtagaagtgccaagaagaaagtgataacagggaggcaattagtggttgcagcagccagagtagcagaggtataaataagagcaatgccatatatatccaagcttaacgttatcctacaaaacaaaaaatatggccccaaaaatattaataattggatcgtatacattttggatcattctctttttttaaactacataatattagtcaaatattatatatagatatactcgaacactacactaaacactaatgtacaaatatactgtgtgtataataattacgtagtttcttcatgtttgggtatgtcatgactcgtgatattattgataataatataataaagtatgcgctattattccctttctttataatcctttgacagatatttattttcccctgatacatacacagtaccgttcatatattcaatttaagcacgtggtttaaaacttttcagcttatattcgaatttaagaaaggaagcaaaaatacaacagctacagtcgatcgaattaaatgcaacaaacatatatagatgattctgagagataaacaaagaaaaaactatatactattttacaaaaatggttgaattaacaacagaattagttgattaaaatcatttttgtacatacccaaataatgaaagaaggaaaatcttgcagaaggtacggaaaggtagcggcggtgcagttttcctgtaaaaaaacaaaacaaaaagggtttgtgttaatacacttagcagtgtagtaagtaatcaacgaatttgacagaaataatttaatatacaaaatgattctttatatgtataatataatacagaatccttaattggattttgagatgtaccagaaaaaatgtaaaacaaaaaaaaaaaagagtattaccattcgaggaggagagcaacggggactaagcaagcagtggctgctgcttgcctgtagaaaacgaagatgaagttgttcatgcctccatcgaaagccgccttggagagcaagttcatcccagcatagatggcttgtatcagaattacagccaaatatgttttcttcattttaatatttatatatataccaatgacttatatatgagcttgtgctgagttttagggcaactaattatatcacttgataatgaattgataatagatggtctataattagatgtatatataatatatgctctctctttctttctctttgtctgtgtatatgaatgtatatatttactgattatatagagagagagagagaggcactctataatagagaaacctttgaaagtttgatattattagcttgtgaaaattaaaatttcttaatcggtgataggtcgactatgaagaggactcgttaagaagagacatgtgtggtgagaaaagggagctactttattgtaagacgggaccaccaaaaaagttgttaataaattagatttagaacgtatacatatctgtaaggattgcttgtccaaatatcaagcaagcagtgtttaagaaactaccttgctattatgctatatatggcctaaggattaatcttgagagttacatactagtatgagaaatggtaaatgatactagtagtacctatagtacattcctatgtaaaatattatcattggtctaactaagtatcacgtctcatatattttaatataatagtttttagaacacattcagattgtcctaggcaacattgatatctatagcaatactctataatttatagtagcaacactactttcctccctatgagtaggccgggacatctatatttttgaccgtttaagaaattataaattattttttatatgacactctttattatagttatagtattttattcttttttttgttaaaaaaaattatcaataaattatgttataaaaaatatagttcaaagatttagtttcatatatatgtatttgttttttttaaacacacgtgcagctaaatgtttaaatttgttttggatgatgtaaataattttaaatttttcaaatacacaatcataaataaaatttcacttataatttttataagtgctaaaaataaatatatttcttactaatgaagataaaagtgat

SEQ ID NO: 23315 - DNA, 3152 bp, Cannabis sativa
  modified_base (42)..(48): a, c, t, g, unknown or other
tattgatattgaataaaatggattacattgaaatagagtttnnnnnnnggcataaaacccaacactaacatcctatgaactattatacaacaaacctcccaaatatgaccatttgaggtcctttggctacttggcttatggttccaccttagtctcaaaaagacacaaatttactcctcatagtcgtgcctccattttcattggatatccttatgttatgaaagcctacaccttgttggatatcgaaaacaacaccatttatcaatctagagatgttatattccatgaaagcatatttcctttttttttcacaaaaaccgaatactgatgttgaattctgttttccacaaatagtccttccctcacatcacaacatacaatccaatcaacatatgccacccgatccaatgcacaaacagatgacagcaaatcctgtcaataaacattgtgttatcccacgacccatacactaggaaaaccccactgtcaatacaccagatcaatcaaaaaagtctctatctaatataaaggctccaattaccattcaacctgcttctattgagcatacacaacagaccaaacatggtcggatcatcaagaaaccctctcgcttggatgcttgtgtgtgtcacacaacctccactgcgcatcccattgaaccctttctctcttatatcaaactccatcctgaatttagagctgctgtgttagcagcctactctgaaatcgagcctcaaagctatgctgaggcctctcaattcattcattggctcaaagccatggacaccgagactcaagccctggaaaaaaacaaaacttggataataaccaaactaccaccaggacaaaaggccatcggatgcaaatgggtatacaaagtcaaatataccaaagaaggagctggtgatagattcaaagctcggttagtcgccaaaggcttcaaccaaagacaaggtattgactattcccaaacatttgaacccgtagcaaagttcaacacattaaaaaatttgttagcacttgctgccatgaataattggaatattcaccaattagacatcaacaatgcatttcttcatggtgatctccatgaagaagtatacatgaaactcccaccgggctacaaagctccaccaaattctgtttatctcttaaaaaagagcatttatggcttgaaacaagcctctcgacattggtactccaaacttagtaccacccttctcgaggatggcttccaccaatccttatatgataattctctcttcattaagagaaccaatactatgctccttcttgtcctcatctacattgatgacattattgttgcaagcaacaatgacaaggctattgcccacttcaaagttttcttggacaataaatttaaacttaaagatattggcagccttcgtttcttttttggactcgaaattgctcgaacaacaaaaggcatatccgtttctcaatccccttttactcttcagctcttgaaagatacagggcacttaggagcgaaacctgcctcttctccaatggagtataatctaaaacttagcaaagataaaggggctctcctacctgaccccactacttaccgtagcctaattggtaaattaatctatcttaccataactaggccggacatcacctatgcggtaaaccacctaagccaattcctccaacaaccacgagtacctcaccttcaagcaactaacagaatcctacaatacctcaaaagcactcctggacagggactatttttccttacaaatacctccccaaccatttcagcatatgctgaaaccagcttatcagcatccaatgttcaaatttcattttttgctgatgccgattggggcagttgttaagataccaggcgctctatttcaggatattgtgtgttccttggccaatcactcgtctcgtggaagtccaaaaaacagtaggttgtatctcggtcatccgctaaagccgagtatcgtgcaatggcaaatgccacctccgaagtaacatggatccttgctctcctcaaagacattggcatctctcccaagttcacgccacattatactgtgacaacactgctgcaatgcacattagtgagaatctcgtctaccatgaacgcaccaaacatgtggagatcgactgccacttcatacgagaaaaagttcagcaaggatcactcaagcttcttcatgtctcttcccaacagaatcttgccgacgtctttaccaaagctttgctaccttcatccttctccaatattgtgtccaagttgggtgtcatcaatatctacactccaactttaggggggctattaaattgtaattagctaagttagttaaaagtttttatttaataataagctaccagattcctttctttttttcctttctctctcgtgtgtagcttctggctggtgctatggcgaaaacccgtgcgagacaggggaagcagaaatctgagatcaagaaacctaagaagagaggccctacttccacggcggatgtgcgtaaaactaagacaatggatgcagtcctaggtattgagcctatcgatttctctaaaggtgaagatgagggcgaagaagagaggctgagatcgcaggaggatctggttcaaccggttttgtccccaaagtcatccctgcaagcgatacagaggcaggaagatgttagcagggattttgcatcctttttgagtgcaaacaagcaatgttcagtcagtgtgcggcaaggtaattctgtaacccctcccatattatgttctggttctgtggtgagaaatctaaagtcatcttttatgcaatctaagaatgctagtaaagtcaagatcactttagaagaagatattgaagatgaggttcagttctggaaatcctctatagtatgctatgttcttggggctaatcccccattatcagtcattgaaggtttcattaggaggatatggaaggataaggttgatagagtaggatccctgtcttatggtgtttttttggtgcgatttgaatcggttgcaattagggatgaaatattgaatggtggatatgttttctttaacaatagacctatagtgatgaaagcttgggatccggatgtcaatttcaaaaaggaagacataagatcagtcccaatttgggttcaattacctga

SEQ ID NO: 23316 - DNA, 7276 bp, Cannabis sativa
  modified_base (2300)..(2300): a, c, t, g, unknown or other
ctctaggtattttgaagaatctcttacatttgtcacacttcctaacatagtctattgagtcttctatcattgttggccgaaagtatctttgtatcaagatcttcttttagaggctttgcccactaacatgattgccacaaaatccctcatgtaccttcaccatgaggagtttggattcttctttcgtgacacacctcagaagtggcattaaaaagattcttctatttattactccatccatgaagacgaagtgattttcttttatcacaagtctcttagcttcattccggttagttggaagaatatcttgcttaaagtattgcataattggtgtcatctatgatagagtatcgtcgatcattgggattaggcaatgaaccttcattaatgctccagttagagaggtattcgagggaaagtacactaacagtgtcagaatctttatactagccagtttagctagtgagtttgcatttttattctcctcacacggtatttgtgggattgagtagtgtttgagctgggctaataaatctttagattttcttatgaatgcgatcatatttgaccctcgggcttgatactcaccaagaatctgattaacaactatttgtgaatcactgtagatctcaagtgactttgtaatatgccgaaaaaaatataatgatattaaattgagcatattttattaaatatgtagttaagtgggcattagagtaggattataatcctacttaagctaattacgagttaattagtgaaatacgattaaagaaacaaataaagcgtactttattaattacgaagattttatcggactatgaggtattgtggataccatttttgaaataaaatatttttgggttcggtggccgtgggaactcgacggagtggtcagaaatgtcatgacaataagagatgaattaaattggaattagaattataccggactagagtagaatttttaagttatcaatttggtgggattaattagaatgaccaaaatatccctagggtagattttaggctttaaatttagtcttttcctaaggttgggattttgtctttatgtgatttatatataggttgaaaagaataaagtaacttagtttagattacctaagtatctatctttagaagaaaaacctaaaaaactaagaataattgcataacaccattactcttcttctcctccttcaaaacctagaaagccagctgctgcaagtgatttttctttgagttttggctgagttaatcaaggattaatatcttctaggctatgaggtaagctcttcactcttttgtctttgacttttttaaggtttaaaatgagttttgaatggggattcttgtgatttcggggctgtgaagtaagtctaggaccagagctttttctagggttaattttagtgttgtgtaggttctaattggatgaatttcatggctgattaatttggaattaggaactttagcttataaactcaattatggttctaacatggtgatttgggtgttgtagtgaatttctatgaattgatgatttaaatgtattatttttgtggtattaaactgttgtggagtgtttaagtaggtatgaaagaattttggatcagtttcggaggagaaaacctaaggttttcttgcctgccaaaaccggtcgaccgattgctactggtatggtagaaccggatgaccgattggcctgtaggggaaaatctcggtttttttttagttaggtttttggctcgggatgtttttctgagcttggtttacgaaattttgaacctgtggagagttagaattttctcagttatgaattaggctttgttttgaggattagataagttgttaatcgagtttagttatcgcgacatatgacccggaattgtcgagcatggtttcactcagatcggcccgcacacccaatattggtttgaggtaagaaaagctttaggcactgctaagcatgttggtaagaaacaattattactgtttgtgactcgattatgatcgaggtaatgatgagaaatgattattatcgtttttgacatgattatgatcaaggtaattatgaggaacgattattatcatttgtgactcgattatgattgatgtaacgattattatcgttagtgactcggttatgaccaagaaaatgataaagatacgatcattaccattaatgaaatgaattattactcccttgaaggtgcaaataggttttttacttatcgagtactttatcgggaaacgatagtgacatacgtagctcgtggataacgagtggtaaggatgctttntgaagcattaaagtaggattgtctaataaggtaattaattgattatgtgattatgtactaagtaaatatctttttattacgatgataatgttgttgactatgattttcttataatgtgtaatatatgtgtttgtatagacgttaaattacatatgtatgttgaatatgtaatgaatcatgagtatgtatattatgtcatattgtgattacttttgtattacatcgtgacttagtagcttttcttgctaagtctttgtgactcacgggtgcttcatggtgcatgtatggaggataggaactgtgttcgaccatgattcagaggtctcccaacgaagtacatatcagtcgtggtgtcatggcttccaagaaatagggtcaaccctttggctatgtttgaaaatgtaaccttacttttgtaatagcatttttgagacttgttgtaaaagaatttataaacagaggattcccacattaaggtggtattttgtatgaaagttttattttaatttaatcaaaaaagttttaattaaaccacacatttcctaaactaatagattagttagaaataagtttgtaaaagcacacacatagcgtctgtgtgagtcaaggcgttacagactcgactttgattgttagtgctaatcgtagtccttctaggagtgcctcatgctctgcttcattgttggtttcagtaaaatcgaactgcattgcactgtgagttcaaaatccctttgcagtaactaagatgagtctagcaccaaaactgtgctcgtttgaagagccatctacgtatagtttctaggttggtccactgtccctctgagctgcagtctcaagtgtgcagacctcgtcttcacaaatcatgagattgtctttgtcgaggccagtacattcagtaatgaagtctactagtgcttgtcctttgattgttgtttgaggatggtaggtgatctcaaactgacctagtttagttgcccacttgagtaggtgccctgattcttcttgcatcatctaaacttacctatgtggttggtcagttagtaccataactgtgagagcttagaagtatgaccttagctttctagaggccaggacaaattagtaagctacattctcaatgggaggataccttgactccactctgatgagacacttcctgatgtagtacataggatgttgtaccccttcttattcatgcaccagagcatcactggctgcatgcttggtgattgccaaataaatttatagttcttcaccatctattgggttggataggatggaagagcatggaaggcttgctcacattgatcagtccattcaaaccccttgttgcttcttttaagttaattaaagaagggaacacacttgtcggttgacttagagatgaatctaatgagtgcaacaattcatccggttaggctttacatgtcttttatctgcgacagtgacttcatgtcttgtaaggcctttatcttctcaggattcgcttcaatacctcttgatttgataataaatttgagaaatgtttttgactggacgctgaaagcacattttagagggttgagcttcattcaatattcctgtaggatgttaaagcattcctctaggtcattgatgtggtcttcagatcttttcgacttaattagcacatcatcgacatagacttccatattgtttcaaatttggttgaggagtgtacggttcactagtctttgataagtgcacctgtattcttaagtccgaaaggcattactttgtaacaataaaatctgatattagtttggaaactagtatgctctaatatattaagtttatacaaagctaaacaagactcgtgtgaatatttatctcggaaatgagaatcgggtcaatttttaaagacctgaacctatgagacactcaagaaataagtgagatctgaacaaatattgttatttcatagagacattggacataccactgacggatgtcgccaattaaaagatgagatcaaaggacggatttcccaatgctatttaaggttgtacgtaagaaatagagggaatgaacaaaacctaccaaacaaacagaatcaaaaccaaggtgtacaacctcccccaaattgagggggaggatatcttggttaatactagaggatcgcatctcgcaggaaacaacaatagttccctaaagaggtatataaatcaagttaagaaccaacaatcagactttgcaccagagctcctcaagcgagcgaagcctgaggaactaccaataatctccattgatgaacatgcagtacatgtgtagtttccacatttagacccctaggttattacagtctagctcgcaaataaaagaataaaaagggttctcatcgacaacgggtgttctatcaatattctttacaaagaaacactaaagaagatgggtttggaagaggcaaatttagatcatgcgtggtgaacttacgtcgcttcacgggggaattcgtctgagccttggcaccatttaactcccactcactatgcgagagccgccactatcagcgacccaaatgatagatatcccttcgatatacaacatgctaatgggtcatcctgcactaatatgactaggggtagtaagcttaataaagcgaatgtccttgaaattccaactcatcctggagtctagatagtgaaaggtgaccaactgttggccagacagttctatagtgtcaaatcaaagaatcgaagggaaacccactagctaatggtaattttgatagaggagaatgaggaatacgagatggaagacttggatcctaggatccaagctgagtacaactcactaaaacgaacagaagagttggaagaaataaatttagacccaaatgacccaactaaatgtgttaacattgagaaggatttgggggaagaactaaaatagaaattaatcacattttgaaggcaaaccaagatcagtttgcttggagccactcagacatggtcgacatcgacccaaatataatttttcaccatatcaacattgatacctcgtatcctttgaagcatcagaagaggcatcccttggatcccgagcgacaaaatactttgaaaggagaagttaacaaatttttaaccgacaacttcataagagaagaattttatccctcatggatctcaaatactgttctcgtcttgaaaccaaataagacatggagaacctacgtagacttttttgacttgaataaaacttgttcgaaggacagttttctattgccatggattgacaaattggttggtgcgatagaagaacatgagctgatgacctttatagatgcatattttggatataaccagattaagatgtacattccaaatcaagaacacacaagcattgttacaaatatagggttgtattgttacaaggtcatgccattcagactcaaaaatgctggagcaacatatcaatgtctcatgaatggtatattcaagaactagataggtcagaatttggaactgtatgtatatgccatattggtaaaatcaatcaagagtgaggaccatgcagaagaccttgtagagtgcttgcaatattaaaaaagttcaatatgaagctaaatcctaaaaaatgttcatttggtgtgtcgtcgagaaagttccttggttttattataaatgtaataggaattgaggctcactctgagaaaataaaggcattgctcaaaatgccttctccaagaaaaccaaaggagctcaaatctttgactggaataatggtagcctaaagtagatatatctcaaaatcaatcgataaatgtctcccattctaaaatgttttgcgaggcaacaaaaaattcaagtggaatgaataatacaagtaggccttatcaaaagacatctttcaatgccaccagtaatggaaaaaccaataattggagaactgttgtacatttacttagccatctaaaaaaataccattagtgcagtattagtgcgagaagagggaaaatacaagcaacaagtttattatataagtaaacggttactaggagaagaatcgaggtaccatccacttgagaaactctcacttagcttggtacatgccttgagaaaattacgagcctattttaaaccgcaccccatcaatgtaaggacttaccaacctctgtgacaaatattatcaaaacctgatgcctcaaaaagattgattaaatggtcaatcgattttggggcagtttgaaataacatacaatcctcgacttgctatcaaaggtcaagccttagccgacttcttggtagaaggagtaaacttaggagaagactctaaaacaagaacagattaagaaaggtggaaattgttcgtagatggtgcattgaatgagagcaacttaggggcaagtgttataatggcatcacctaaaaaatttcattttcacaatgcactaaggttctaatttaatgccacgaatactgaggcagagtatgaggccttgtttgcaggactctggatcgctgaagctttaaaaggtaaatcggttcaatgttttagcgattcacaattgatcgtgaatcaagtattggatgaatacccagaaaaaggtaccaagatgacaaaaaatttagaggatgttcggaagaacatggaaaagtttgattactttaaaatcaagcatattccaagagaataaaactctaatgttgatgccttagaaaaatttgcatcacaatttgagttagataaattgaatcttgttccagtagaagtattaagcaagccaagtatctacaaagctgaaaagcaagacatggaaatgatatacgcgagttccacatggatgactcccattgttaagtacttggtaaaaggagaagttctagcagacaaaggtgaggcacacaaactcttatattcaatttcgagatacacgcttgttgatggaaaaatttatagaagatggtattccatgcctttactgcgatgtgtattcccatcaaaagcttttaaaataa

SEQ ID NO: 23317 - DNA, 3972 bp, Cannabis sativa
  modified_base (92)..(93): a, c, t, g, unknown or other
  modified_base (1060)..(1062): a, c, t, g, unknown or other
gttgacatccaatgcctaggttgacatatgaggtcaacctcgacgttgggtgagtgtgagaacgtcctagggatgtattttttgatgcctanntgatattttgacatcacttagtccatttttgtgttttggtaaagttggtcaccggttttcggagatgttgttctgcgaaaatgagagactcgaaactctttattttcgagtgggcttcccatgttagaattgagaaatgcaaagttatgaatttgacttttttgacttcatgactcttatttattgtgaaaaattagatggacgatcgagaaagaatcataatcagataagcagaacccagcgcaccagaccatttgtcaacttgggcatttgataaatcaaattacattatgctcaaatttacttactattttccatgtataatcatactggaagtttgctagaaacatttaagcaaactcaaatcagtactcttgctgtaatagatattctattggactattagttgcgggaggatttcaaggagagcttgtttgcaaggaaaattctatttgagatttctttggtttagagtttgcatactgttagagagtctcacgttgttaatgtgtggaaagataatagaatatataaaaggaataggctactccttccattgccaattggttttgagatgcaaccccattcaccttatgataaaatagctaccatcttgagggggatgttagagagttccacattgccaattaattttgagatggaactccattcaccttatcccaaattctgacacataccgatttgaatgctctgttacttgtgcagggttttgaagcagaagcccttttgtccataaacaataagaagaagaagagaagatgcagcagagaaaatcaacatttggaaggcctactggaacggatggttccgatttctcctaccgcatggtcgttgaatctcgtgagtttcatctactatttttcaatcctttttgttctatctcattagacccttagaagccccagactttgcctctaatgtaagcttttattattattattattannnttattattattattatttatttgagtttgaattttaggttatcaaagagtagctgaaggaaagtcacgtttctctaagctaatttttgttcaggtatatcagaatagcttgcttgtaatatctgctaatggctcttattttttcattactgaaatttcattaagtagctgcctaattctactctgcgtggtatgtgtattagattttataaaccattcatttctgtaagtttatggaacaattttgttctgcttaaaactcaggtcttgttaatgaggaatggggtgtctatgtaaattctggttttctcagttgttcgagcaagcgtttaagaaattttaaatagatttaaatcaataatcaatattgctatttaaaattctattttccctgacaatatagattagctatcaactgaaaataaaataaattaattaattaaaaaagtggttgattgaattaaccgttatacacagtcgtcctcaggacatttttatacttataatttacacattttgaactgtaaagcagaacccatcaatctgtgtcaatgcttattgctccttcatattttggataaatgcatcaattggctatcttgtttttttttttcgctgggaataacttatttttttttcatgtctacaaatagttttcattatctactgcaggctattatccaaattataggagcgttgtatgctgttctacggacatcttgggagggaggacccaataggatcgctatttcatctactgctgtttgtttgatttctctatttattggggatttaggttgtcagttgttcctgtaatttatcttgttctcgttttcaatttatcgttacatgtttaactattgtttttactaaaatatttttttttccaaaacttgtgtcaaaggacgaaggcgtagtcgtgcaaatctgttgagattttacatggttgcatcatctatcgcactaatcgtatccatttattgtgttgctaaggacaatctcacactacaggtaaggtggttctataattttaaatcttttttttttatccttaagagtagaacaattcttaaagagatatttagaaaatgtaagaacatctacaatgtatacagtaaagaaacaaggatctgtagaagtgagcagtgagcttatagtaaccaaatgaggacagtaatagtataacaccaggcaaaactatataggtatgggaactgtatatagcactctgcttgagctgcccttaagttgtgtaatttgaaagagctaatcacaacaaagtaattaattagtattaggaactccattctacattctgatgattattaaaaccttcatttttagtatctaaagtgctattctggagctcactaatggttattatgtgattacttgctaggttcttcaagatttaagtaactgggaaaggcataagtttgaacttctcgagatctctcatgctatacttggtaagtctctgtttccttgtgtttttttttctttttttttttgcttctaattttatatctttatggtcatggtataatattttaaatttactttttgcaggattctcgatccaaatatttagcgtttgtacggcagtttctctcatccgaaacatgtctcctcccaaaaaggcttcttaagtacttctatcctttatattgtcacattgcatttatctcatgtttttatgaaaggaaaaaacgaacagcaattttttcttcactgttgatctttcccatatatatttgtgatgtagatattctagttcatcaaaaatttgatttccatatttttgtatgtggacttagaaaatgtttctctctgatcatgttttatgtatggagagaattttcactcatctttttcttctggatatcgatgtagatgaatcttcaaaaagttcactgctagtcagatatgagttgggcagtttcttttccttaccagcttaactttttttaaaattttttttgagcttttagcataattgcgcaattttgtattgtcagttagcagatgtataattttcagattattataacttcatggtgtatcaatgaccaagtataaaattgatattaatgcttacctatttatttaaatatacatgtattataatttcccaaacaagctcaaaacaaatttgagctcgtgtcttgtggctcatgtggatgccaaattccgatcgattacattctgatgatttagttgagtacatgagtgagattgtttttgaaacttagggagtttttcaaaaggatgagtgggtgtaggaatgtcagtcgggccgggccactaagtcattacgtttaatcaagtcatttgctttgttatatattcatccttgcatccttggtttctctcatttattttggaaatactaatgagacaaatgtctcgttttctttctaacactaggatcatgctgcagcctatgcatgtagtggtctctgacttgtagcagccaagccattacggcatagtttctgagcaggtgactatatgcctacaaaatgtcaagcttttctcaaagtgtcaacaactatctagctcgtgctaggcgtggggacttttaattatgtcacgagccctttgtttttggtcttcttgatctccttcaagcctaatgcactgctatcccccatagacgtcctttaagttaatattggatgtaccttccttgtaaatgtgtcatgctagcataggagtcattgagaaattacctgatcgtttttggaaaaaccttttcctgcttctcttgatgacatctagttcatcccttcaaagggacccaagggcctaaaatcaaacgggattccatatcaacccgcaatagtccttttcttcgtttattctccttttatatcttttgtcattcactttgaaattttctctcgtgtct

SEQ ID NO: 23318 - DNA, 2103 bp, Cannabis sativa
aagaggagtggcggaaggagatgaagaagaggtgactggactaggtgaagggtcgataatggaagtggaagggctttgatcttgatcttgatcttgatcatgattaccatggacgtggttgaggttaaaggtccttaccagactcaccattcttcctcttcttccatatctgctgctacttcttccatctctgctaaaagagacacccatgtcagaagaagaagaagaagaagaagaagaaagaagaagccctcctttctcctttctagtgggaaagcgtgcgttttaggggacctatactatgatgacatgggtgggtgacaatttccaacgacaccgtttttgctaaaaatcaaattaaaaaagagaaagattaccattttaccactgatggtgtacggagaatcaataattttgcaaaataatccttaccaagaaaaaaatgaattttcttcaatattatacctaaaattaatttcacttacaaaaatacatttaagaaaagtatttacacaaataccaatatgtcacgtcaacataaataccaaaatctaaagtaattaccaaaaataaaataaaatctcgctttaaaaaatttcagtattttgcaagttttttctttttttttttaaataataaccttttggttacttttgatgtagataatatatcaattagttactttttattaaaaaaaaattgattcaagatattttttttctcctatacatttggttgcttattttgatcagtcaactttaaaattaatttatatatataataattttcataatgtaactaattctattatgtttaagtccactccatgtcgactccccgctgccactcggagtgaaatcttcgaagaaggggccaaataagttagccaccttggaggaggttatgaagggccctgtcatctataagaagtttgcatgttgttccaacggttcggaggctgacgaactgcactcaatgttgacctacgcccatcaattggagaagattatcactgtcgtggggatcaaaccctccagttctggggtttatcatcaccttcccagggatgaggagacgccaaaccacaactataatggtttccgggcatggagtcaaactcatctgatgtctggagccatgctccccctccaggactatttcatcgacttccttgcttttgtcggactttcaccctaccgattgattctgcaagcttatcgcctgttatcgggcttgtttattttttaggtagccaggaacttggctccgcccattcctgccgaaatcttatacttttacgaacttctttcagtccccaagaagggagacaaatttaaagatggtttttataaacttcaggcccatccggccattgagactctggtatcctttaacttctaaaagaatgtaaaggagtaccgccatagatttttcttctcctctgggttcaaagcatttgagcgcctagacctgttaacggactaggtcaggattcccccccatgcaccgtaccgcccccactcaactattcttgaaccacgcgcaagtgtttgccgattacaggaaggaagacttgaacgtgggagacctggtcacgacaggtaattgtaataggggcaagttgatcttagtgagtcaatcagtggatgacttcaacttgtccaaggtcctctgtcccaacgtccagaatcctgggagtgagaaggcgctcagggaaaatattatcttgtttgcggaggatggatacaacaagtacagatacaaaagggagcaggagctcgtattctctcaggcgcaagctacctccagaagggtctcctaggaggaggcacagaaagagaaaactctggtccgacccaaatttccattcccagttcctaactttggatcccccgatgcaagtacctccggagcctgtaagtctcctttgaacattcacttcgttccttctgtccaagactacactgacttaagcccagtggaatttgataacagattatatagtttgaataagagtctgaataagactttgcattgcatttgtttcaggatcgttaagtagtatcataataaataaagttaagaccactttatttttttata

SEQ ID NO: 23319 - DNA, 5195 bp, Cannabis sativa
gactcataaacacttcttcttctagatctccattaagagatgcattttttacatctaactggtgtaggggccaattagagttgactgctagagataataacacacaaatagaagcaaatgtttctttataatctattccatgtgtttgagtaaatcccttagccacaagcctagctttgtatctctcaatactttcatcagaattatattttattgtaaatacccacttacatcctacaattttcttctcgtcaggtgacatcataatctcccaactatcattctttcttaaagcattcatttcctcaaacacaaacattgctagcctccatttcggatcatctagtgcttcctgaatatttctaggcacaaccagttcagaaattttaatagtaaattctttataggattgtgataggtgatcataggatatgtatttggaaataggatgtttggtacaggcacgagtctttttctaagagcaataggaagattaactacttcaagatttcctggcgcttactttggggtaggcttaggatcagaatttgaatttaaaataggagtagaagatgaagaattacctggaatatttgaagaaccattgtctagggctggcaattgactaggcacagacatgataacatgatctctaactcttttagtgacattcttccttgaataaaccacaggtttaaggttgctacggtttttaattaatcgtagcatttcttcatctgacaaaccaatttcaaatttaacaattataggattaatctcctaaatatcagtgtcaaaagtcttaggtaaaggttcaaccgtcttccaaaaatttgattccattaaattctccccctgaattaaattttgtaaaaaaaaaatgagggatattttccacaaaaacacatccatagttatataaacacgtttattaataggattaaagcatttatatcccttttcattcggaggataccccaaaaaaatacattttcagctctaggatctaacttagacctagaccttttaggaatgtggacataagaagtacaataaaaaaatttcaaaggtaaatcagagtgaatcctagaatctggaaagaatttttgaaactttgcaatggagtaagataattcaaaatttttgtaggcatcctatatcaaataagatgcaataagaataacatcatcccataaatatttaggaattctcatataaaacatcatagcacgagctatttctaataaatgtctattttttcgttcagctatacaattttgttcatgtgtatctggacaagtagactgatgcaaaatacctttttcggtcaaaaaatttccaagaattttattaaagtattcaattccataatcagttcgtaagatgctgatttttgtttaaaactaagtttcaactattttgtaaaaagctaaaaaaatctactccacttcattttttttctttcatcaaatagacccaacaaagacgagtatggtcgtctataaaagttacaaaaccatttttttctagaattagtggtgactttagattgtccccaaacatcactatgaaaaagataaaaaggtttggaagaatgatacatagttttaatataagatttacgttggcttttggccaataaatagctttcacattaaaaagacaaaggattcaacttttaaacaaagtgggaaacaagtgttttaaatataaaaaactatgatgacctagcctataatgccaaatcattatttgatcataaacagaagaagaattgatgttactaaccccttaagaaatttattcttagaaatattatcttcaaaataatacagaccatttatcatcctagcactgccaatcgtctttcccgaactctggtcctgaaaaagacaataagattcatggaagattacacaacaattagaatcccttgataatttactcacaaatagaagattacaggttagattaggaacatgaagaacaaatttaagatctattctttcagataatcttataagaaattttcctacaataggtgagaaattaccatctgcaatcctaactttttttatcacatgaacaaggtatataggagtcaaacaaattagaagaatttgtcatatgatcaaaagctccagaatcaattacccaatgagaataatttggaaagaaacaatttaaagcatttatttctttacttgattgtgcaacagaaacattaagaatacccgatgaggacaaagtggattttagcaatgcatgaagttgagccatctgctccttaatgaaaggactagcctcgacttcatttctagtagggttgcgactatttctttctgcttgctcttccaatttgctagttttccataaattctccaacagttttctcgagtatggcgaggtttattatagaaattacaccaaacatggggtttctaatcaggttttggcagatgtggagtgttcttactgtagcctcctccaacagcaaaggatgatccttcaatagtagtgccaccaatccttttatcgagtataacactcctcctactctcctctcttctaacctcagaaaaaacttcgccaatagaaggtaagggttgcgttccaataattctcccccttacctcatcaaactcaacagtgagaccagccaagaatttataaatcttagttttctcaattgttttcttatggtgtttgtcatcttccataaatttccattcataggtatcgaagagatccaattcttgccatattcacttcaatgaattaaaatacttcataatgctatccttgccttactttattagtccaagtttaagagtcaatttgaatacttgagagtggtttttgagatcaaaatacatctcaataacattatcccatagttcctttgttgtaggatagcacatataattcgagatgatatcctcctccatggaattaacaagccatgccataatcgtagaattttcagcatcccaagtgtcgtaaattggatcttcctctgctggagccttcttctcaccattcaaataccacatcattcatcgacctctcatatacaccttaaccgatttataccatctcaaaaagtcgtcaccattcaagtgaatagtggtgatttagacagagtgggattcagtagtggtagatttgattggaataatagtagtctcagagggattgatttttgtggtggctaactcgctactttcagacatggtggaattggattagataaaggtaggctgggattagggtttagggttgtgttttggctctgataccaagtcaacaaagagggtaatttttgtatattatttctcagaaaaatacatgtatttaacatgtacaagaatcccttttaagggaaataaaatcaaataataacagaataaaactcttaactataccctaaaatatgcaacaataaattacaataactacacaagaatattcctaaaaataaaatgattttcctatattagtactaatagattaattaatcattaaagtccaagataatattaaaaacattactaaagtaaaacactaaaaatagacatcataatgatactaaaaatgtgtttcgaagatccttgttataaaagttttagaaaagtactacatgcaacgacaattaaaaatacaaatccaagatatatagcaaatacagcacaaaataacttctagtaacttggcacacaggccagtagggtcaatatgtacattgctggagaagactgtcacctcttggctgctctaactttttcttgcccttacttgcaccatagagaacctgtgagtcaaaaagactcagcaagaaaagtaacaaagaagaatacatgaaataacttattatccatttcactattataataagattaaacaataacattcaagagtgggtaatataaccaaccatatgcattgaaataaaaatgatcatatattgcatttcctaatcaggcaagcctctttcataatttggcctcatacataatgtcactacatcaccaaatcaggtgagcccgtgccacaacttgacactaatgtatcacatcacctaatcagacgagcccgtgccatagcctggcactcacatggcactgtcgtccatgcctaattagacattggcgacaggaagaaccctaacaacaacttcaatttagagtcatgactttattgcgattgcctcacaggaacaacctaaacaccagtatccatacatcacattgcctaaataggcaagcccatgccatagcgtggtatccatatatcacatcacttaatcaggtgagcttttatatcacattgtctaatcaggcaagcatgtgccatacctcgtacctatatatcacatcacataatcaggtgagcttgtatatcacattcacattgtcattgcttaactagaaaattgataatttcgaaacttgtcatgccatgtctcttttcaaatctttctttcactcactactccaaaaatgagtttcactgacacactataagtgacactaaaaaattttagtgacccttcagtgcgcgtcactaatgtaggtgactggaagagtaatatatggtgacccttcagtatgagtcactaaaatattttagagtctctccgtacgcgtcactataccttttaagagtcccacttggctaaactctacaaataatagcaacatgcaatgggcgtcactatatttattatttcttttttaaaaaaattatttttctcacattaatcgaaggtcatcaatgcataaatatatatttttaattactacactcaaaaaattagaaaaataataaaaattacaattccttttaatcttaaatagaaaaaataaaaaaaactaagtattagttcacaaagcaataaattccaataacacaattacaatttattttatttccatacataatcagtgtaaatcactatgataaaaaataaaaacaaacaaacaatcacaaatctaaaacttacagataaaaagaaaacctaaaaaaattgatgcacattgagtaaattctaaaagaaatatgaatatgtgaatctagcacattgagccctagccgccactactccgatgaaccataagcccgaactgcctgtgaagcccgaatccaccaaacacgttgagaaacgtcaaatttgaaaaacaaagagagagagagag

SEQ ID NO: 23320 - DNA, 2411 bp, Cannabis sativa
atatcataataataataataattagttaattaaaggcatatggtacattacaaaaagtaataatcaaaattaattaattgtgcactacatcaatattttatcatgcataaagttataaatactaattaccatccaaaaagaaaatccatgtatcttattgcagctgctttatcatcttctgtgtctgttaatggttccataaactccccaacaacaacaatgccaatttctcctccttgtattttctacaacaatatattaaaaatgaatattttactataatgattgaaaaattaatgtttactatattaattttttttttttttcaattttaatatttttaatttaataatcaaattaattaaaattttaaaagaaaagtaattatctagatagattttttttagggtaccattttggaccatgtgttttgcaaaaattaccaattggatcctctattttgttaaatgacaaaatagatcatgtattttttaaaatggtaaaaataaaactctgagcttaatttttgacaatttttttttaatataacaaacttgaagataatttttaacacgaatagatacagaaaacgtaaacagttttgtcatattacttttagatcggattattattaaattttattttgacgaaaaatcagttcagggcccattttgtcatttaacaaaacagaggatttaattagtgacttttgcaaaacacagagtccaaaattgtatttactttttttttttataataaattattttaaaaataattttccaaaagaacatgtgtagcttacttggtacttggccttgtagagctttgcagctgcagcatgagcaaggataaagttatggcttacaatgtaaggttctgtggatgagttaccaactgccggacatgggccgacaggcggcggtagcgaacatcttcccggtgcaccttttcccaagtcatatcccagtgcaaccacaaatggttcattaattgtaatccaatgttttactctgtctccatatgttttgaacaaaagttcactatagtccttaaaatcatctctgcaataaaataataataacatgaattatgattcaataaaacactaattaacatcataagtgaggctgcttacacaattgggcgacccaaaaagccaccatacttgtcttcaagagcttgtggtgtgtcaaaatgtaaaattgtgacaaatggtttcatgcctacaaacaatcaaaaccataattatatggtgttttaattagtaatgctattcaaaataagaaaagaaatttgtatacaaatataaccctcataccatttgctattacttcattgatcaaattgttgtagaagtcaataccctcttgatttattccaccacatagtgaaccctcttgaacaagtgaaagaaagttttccaaacttagtacaaacaaatttttatttatgattaaatcatattgtttggatatataaataacttactaggcaaaatccttgaccaagaaattgaaaatctgtaagaatcgactcccagatcctttaagagctttatatcttcctgtaagaacagggcatataattattaatacatcattaattcaagagtaatgtataataatactatatataatagtggtttaagttctctacaaaccttgtatcttctgtatgaatcagttgctattaaagaattatttccatccttaatattacctgatcaaaattaataaacagtattgtattatataatttggataagaaattaactttgaactaattaattagtcataattctattgaaaattaaccaggggttgcagcataggtgtcccatatacttggtcctctcccaccttcatttcctgagccttcaatctatcatataatatataattaatatataagttcatatacaaattacaagtaaatatcattttagactctgtattttacaaaagttatagataagatattctgttttgttaaatgacaaaatagaccttatattttttgaaatagtctaaataggaccttgaattaatttttgtcaaaataaaacttaataataattcaatccagaggtgttatgataaaactgtggttaaattttctatatttgtttatgttagaaattatcttcaatttggttatattaaaaaaaaattatcgaaaattaaactcacagtcctattgtactatttttgaaaatacaaggtctattttgttatttaataaaataaatggtctaattaataacttttacaaaacacaagatccaaaatattatttacccaaatatatatacatacaagaaaactaaaaatgaaaatgaagtgagatgaatacttgttgtgctgatgtagcggctccaaacataaaattacatggaaaatcagatctcttga

SEQ ID NO: 23321 - DNA, 4429 bp, Cannabis sativa
cttttaaataaaaaagattttaacgtaactaatatagatatactataatgtttaaataatttgcttctaattctaaaaaaataaaaaaaaattaatgattttaaaatgaggacatttactaacatagtgttataatttaaggtcatttgttatatttttttaaaatgaggacataaactaacatagtcctatgatttggggccatttactacaatttcccaaaattctacttgataacgtagacacacgtggtataaagaaaacaactttggaccccacatctcgaatatggtagtgttatttatatgtggccacaattctagtgcctaggtgagcataaggggcgcttaggtaggcacttaaatcatgtagagttatttttagtatcgtccttcaaacagtccaagaaaacaatttaaacaactatgacatagtacatgaaagacatgccacaatcaagtctcgagccccaaaactaattttagaatagaacttatctcgggaactcctaggtaggtatccatgcccaggctaacatcatgtcatcctgggtacacaacaacaaggttttaggttttcacgaactttttcaattcttcaaatccatcaataaacgatgtgtatacataagattttacaacgactacctaggtggggcacaaacccatagtagccaacaggttgactgtgtgcaatgatcagtaggtgcccatgtcacttgagtaatatttttgaacaaatcatctctgattccaataaaattggatttgcgtgtgcactttctaccgagtagatcataagacattagaaagacagaattcagatactttcaacatggactcgatgcccaagttgacttgtgccctattaacggcgtcctgattaacatatagtagacatgcctattttctagcgtcaatattataaaattatagtttttatttatatacatcattatattattttttgaataagtgtttgtatatatacatataatattgaacgtagtttgagaaaattatgttaaaaaaacactgtaacaatttgttaaatacaaagcagtagttttgcatttgtcaaacaattaagccgtggaaaactattatattagtacaaagtttaagattttatgaaagtgatatcacatttcttataaaattttagcatagaatattatatcctgtaaaattacatcaagaaaatgtttggggcaatgaatcaaatgcaacaaagagaaatttgcgattaattaaaagcaataatgtccaaaaaaatatatttcagatgacaaaaccctacaagtatgacataggataaaaatcctttttcataaaatattaatcttaaatagaggtcaaaatgttaattcctattttgtaatttttattaagaaacaatgtaattaaaatgtcaaaatcatggagtaagagaactaataatttgactaaataatgcactaaactaaagcataattgccgccggcgctaacaacttcattgagtctttcttaaaaattgttctattttaatttcaatatcgtacattagaaaataatagtatttaaattcaatatttatgtgatgtataatggctcacatgttcattattttttaaagacatcaaaaaataatattttttttttaatagtgatctatttttattctcacctcaattcgtctaacttcaaatataaagaagtggaaattatataaaatatgagaaaacttttgtgtcttacaaaaaagtgtcatttttttattattaaatttattaaagtattttttaagctttacatttttatgagatttttttctcttatatttgtaatgtttagctttcaaaagatatgtaatttttttttcttctaaacaattagtttctgaatatttatgagtgttgacgtaaaaatttagacattgatctctgagctacattcgcttgctagattagcgagaataaattattcattaagtatgcatatgagagagacatgaaatttatagtagttcactccctatatcacgacagtaaatgaactacgtctacttcgaattttatttctcatgagatggataacaaacaaatagctataagtctagatgttctaatttttaaagggagaaagtagagagagatgctctgaccttatggatacttttccaaacttagaaaatgagttagtggagctctcctttgatagaggaatgaggtcctattaaatgataacaaattaatccaaaaatatggaaaaatttattgaggctattttttaccatagatgatgatctaacagtgaaattgactccagaattagatcgtcaattttcagagcttggtcactttttcaagacccactttaggtaagttgtagcttaaatttgtaactcccttggcttgaaatttggagtcaataactacagaattgtgattgaagtgtgagctatgacttgatatagcattgaagtagctttgaaacgcaagttgaattgcatcaatcagatcgttattgagtgagttatggctattttacaagaagttgttgtcggcttagcgcccaagttgacatcccaacacccaggttggcatgttatgtcaaccatgtcaacttggatgcaggatgtgtaggaaaacatgttagagatgtagtttttggtggctaagtaatatttggacatcacttagtccatttttgtattctagcgaagctggtcaccagttcttggagatgttgttgttttgcaaaaacgggagcctcgaaactatctgattcctaagtaattcaccttgtcggaaaagtaaaaatataaagttacaaatttgactcttctaacttcatgactcccaattattgtgaaaaactagaggaatggttcagacggaatcaaaattggataagaaaaacccaacacactcggccatacgtcaacatgggtgctattatgaaggtcccaggatgtcgttttgatacttcaaggttttggggcttgacgatgagttattctaccttatttttcaccattttcgagagaatgcttggagcagtattaattttaactgatcaaaactagcgcaccagattcattgtcaacctaggcattgggctcagttttgaagcccttgaaattgttgttttctcccacattttacatgtatcttcattatttctaatgatggaaaaaataccaaaaaatcattttcttagaaaacttatgtgaaataacccaggtttacaatatgtaaccctgggcgctaggcccagtgttaggtgtcaacttgggcgttgggtcaagtttcaagccatcttgaagttctgtttggtccacagaaagagttgaatctaaattttttatgaaaataaagaatatgcttggaagactttttttttttaaaaaaaaaaaaaaaactccttgaaatttccccaggttaacaaatggcaatttgggagatgggtgagcaccaggtgtcaacctaggcgttggtccactgttctggcacccaagatgggttgtttcttcccgaaaagcacttatttccacatttttaatgaagtcaaagaagatgcatgagttatattttttatatgatgcttagaagtggcctaggttggtagattgtcaatatgggcactaggtgcccgggcaccgggtgtttggggtgctcaaaatgaaatttctttgattctaattatgatgcctcaaatatagttttggtatgtcaagctcatgtcctaatgaaaattttgacacatttttactaagatagtcttggaactaaaaccataggtgccccggttgatttctgtggtgcagtttcgtgtattttcagctctcagggcctggtctttgaagcttcatgtcttcatggtacataatactgaaagatagtgagttgcaaacaacttatcagaatgtcaatacacatttcagagttcccagagtcaaccgtggtgcagggctagggaccgctcctaggtcaaccgctatgacttcagactactcaactccgcgatgttttattttttgccacatgaaaaatattgatgtacatgtcaccaaaaaaattctttgtgttaaaaatttccctccaagtcaagttcacacttgtgtggggttgacttgatgacgtgaacatttctcgtttctctcaaaactactagattggcatcaattttgacaatctcagacaattgtttctgttctataagaattcccaatataattaggacttcaaattctcttgctctttgtgtttgggaaatttcaaaaattattaagtgatggaaaagaggaaaactcaacatttttcacttatcttttaggctaattaggttttttgcccagtgaattttgacatgtaccaactcatgtcccctgaacttttaaggtcgttaaaaatgccccctcagatattgagattgttagatttaagg

SEQ ID NO: 23322 - DNA, 2252 bp, Cannabis sativa
ctcgccgttctaggtcgaatactcgcacttgtcgtttctctgaaaattctcttttgtattaatcaaataatatattttggtgttgcgaaattcactcgacaacataatgtagtagtcatctcgtgtcatcactacgatataagagtactgcaagatgaagcaaaataacacttagtattttttcctctcaaaacggataagaaggataactcatattcaacgagaaactactcatattcaacggataagaagcataaccgtttaaaggataaagacaaaaagcagttgggaagttattagatattatcccatgtgtaaataaatgaaacatggggaatgtccacgtttcatcaatagttataaatgaatcgatcccaataagaataattgccagcctatacacttataaataggggcagactttatgggaaaagggatggtaaaatatagagagaaaattttgctatttattatactgatatttatactctgtattcaaaagatattcctaacaatacagacttgtggagtatgtagatttaactacaaaaccacgtaaaatatctggtgtttattattattattaaactctgtagtgtatttattgtaaaaaaatgctatatatttggttaatgaaaatctacattaatagtgatgaattcaaaaaacacaatccatagataaagaaacaacatacctgatattgataatggagatgtttagctgatcgtcgttggatctggctggggaagttgatcgcacctttcacgaagacaagatgctagaacgatgaacaaatcaatctctgcatcaaaatccagactcgcgccgtaaaagttctaatcactgagggttgatgatgtgtgaactcttgtgccctaatcctcaaaaacaaaggaagatggaagtctatagcattttccagattgaaaaagaagactctattttgaattcagtttgtagttctggaaactgcagaaaaggttatgatcttcgaagggttgaaatttgaaaaatgaaaaaaagtggtaattggaagttataagaggtatttatacccaaaaggcaatcaacgtgaaaggatacagaagaccatgatcccacttccagaaacacaagtcttcatccaatggtcggggagtccaacaatctacgtgtatccttgcaaataatgttcctaagaaccaagacgtagatcaatgatgaaaatgctctttttttttatttttgtgctaaaaaatgaacaaccgtaaaaaatatagtaattttttgaaagcaactcctcgatagtcgtgccctatcactcacgcgcgacttacacgtggacatatcatcatcacacatgaaagcttccttctgcgggtgagaagtattcaaaataccataatttcattccttaatttccacatgtccaaattaagagagtgatgcaagcttccaccacatccacatcattctggaagcttggggggtaaatttatctgtatttccagcattagacatgtggactctaggttagcacccaagacccgtcagtgggaccctcaacaatgttaaagtgggccaagcccacctagacgtgtccttctaggaacgtatcttggttctgcactcgcaaatcttttttccttcagcaaaccataccgagaagacatgtccagtaccacaagaccggagagatgagacaatgcgttcccgaaagacccttctggtttcccttttattcctgcacacaaataagcaaactctaattgtcatgtcgcaacagagtatcgtattaagattaagggggaaacttcttataacaaatagtatacaattaattcagattaattacccataatcagtgtacgcggtgttgatcagatcaacccaaatttggtctgcctagtaagtagactgtcttctccatgggctggacttcacgagaaagcccaagggtattatttattgtaaactccctaatagagggaaagggaacacctaatataattctcaaactactataaataccccacagatcctatagattaggggttgatcgctctcttgcaaactttgttcaggcaaacttgagaatatacatattctttgtattctctaaggcatttacaagtaaaagacttacaaaataatactgactcgtggactaaagctagttaacactccaaccacgtaaaaaaatatttgtctatttttactcattctcttttgattgttgggatttatgccctaaaagcaagtaataaaat

SEQ ID NO: 23323 - DNA, 2815 bp, Cannabis sativa
tcagtaatgaaagtttttatatatgtgtgtgtgtattttttattaaataataataaaaaagtttatacatggatgtgaagaaaagcggaccattttggcagttttttttttacgtttgtaaaagttcttggagtatgctctttatattgtttggtggattattaatagtttagtaaaagatgattattttattgtttattttgatttttttattaactatttattttggtttgttgatatgtgaaatgaacttacgcacatggtgggggccatatttatatataagttttgattgtttactttatatatttatttatttatttgtgtgtaaattgttttgactgccttaaagacactcaacaatattgacttaagaatttctatttctttttcttttaaccaatatacttgttaaacaaataaaggtggcaatactgatgttgaaccagacttggaacttaaggatactcaatgcattggcaccaaacaagcagtccaagaaacttttgaaagtcagattgatagtgaacaattcaatatatttgatgagtggtgggatagtggactggtgactcaaaaaactattgagaaagatagagtggaaaaccaccccagtggaaaatgccaatggtgagactagtacaacacttgaagaagagtttacatttgaagaagaagaatttgtacaggatgtagaagctgagaaagagattggtctacactctgatccaggaagatggtggggcgcaataacagactttggccaccaagttgttgacgatggagattctgatagtgtatcttctaaggaggacatgcgtagcttagacagtgattgtgactctgatgaacctgcacaaaagactaaactagaatttaatcctgaagctagatttgagggattcaagttcttacccgaaatggagtttgcatccgtcaccatccttagaaatacaataaaagaatacttcatacagattaatagggaatatgtgttagtagtcaatgattcacgtagggtgagagtgaagtgtaagggtgagggttgtgagtggatgatgtttgcatcggtgcatggtggcagagatagtttcactttcaaggtgaagacgcttaatgaggatcacacttgcggtttagtgtttaacaatattcacgccaactcaacttggcttgtgaaacactttattgacaatttcagattaaatccaagcatgacatatgctggattccaagagattacttcaaaaaccaagtttgctcgtgtgtcaaggtggtcattttatagggctaaaaccaaggctagaaagatattgcaaggatctattggtaaacaattttccattcttgatgactactgtaaaatgttgttgtccaccaatcctggttccacagcaaagattttaactaccatgattgatggcaagagaatatttcaaagagtttacatatgtcttaaggcttgcaaagatggttggataagagggtgtagacctttaattgggcttgatgggtgttttttgaaaggttattgtaaaggaatgttattggctgctgtaggtgttgatggagacaactctatgtttcccatagcttatgctgtagttgagaaagaaaatactgaggtttggaaatggtttatggagttgttgaaggttgatcttctaattgaagacactaagaagattacaatgatgagtgatcgacggaaaggtttggagattgcatctggtgaagtgttcaatggaagtgaggagaggttttgtgttagacacctccattcaaactttaagaaggattatctaggtcttctacttaagcaattattatgggcagcagctcgtagtaccagttgcctgagtttgatagagtaatgaaagaactgaaaaaatgcaaatgaaggggcttacaattggttatcaggtaaaacaccattagagtggacaaagtcacatatgtcagagtacccaaaatgtgatatgttacttaataatttatgtgaaagcttcaacggagccatcattgatgctagagacaagccaattattacattgttggagaaaataagattttggcttatgtctcgcttttacaacaagaagcaagcagtgaataagtggactaaaccagtgggcaaaggcatcttaaaaatcttggagaaaaaatattaagttgcaaggaattggttggtgacagctgctgagaattataaatttaaggtgacaatttttagtgggagaacattatcagtatacttggagatgagagtttgcacatgtagaaggtaccaactttctggcattccatgtgggcatgcagtggcatgcatttggttcatgggaaagagtgtaactgactatatacatgcatactacaaaaaggaatttgtaatgcgtgcttatgagggaagtgttaatcccatgccatcccctgataactggtcaaacacaggactcaatcctatttatccaccacctgagatcaagattccaggcagacctaaaaaatccagaaaaagagaacttgatgaaccaccaactgggacaactaaagtaaaaagatatggacaagtgaagacctgtagctattgcaagcagaaaggtcacagaatagaaacttgcaataatcaaaaattggttaaggtgagatttttatgcaataaatatttgtgcttaataatataatataaaatttaattgtttgaacatactgttgttcttttttaataaatcgtcaaattgataaatgtaaattacgtaatgatttgtgcagcaaccaaacaagaacagacctggtcgtccaacatctactaatc

SEQ ID NO: 23324 - DNA, 2440 bp, Cannabis sativa
aagtacaattatccctatatatatatatatgatattagataacatttttaatttatccttatatatgtttgtgcaaaagaaaattgagtgggatctatcatattttttgttttctcttaaaattaaaaaaataaagtgaaatacaaaaattaaaagatttttacacaatagttttcatattaataataaagattaatatagtaatgttacaataaataaaccaatttccttatttcattcattgcaaccattaggaagaaaatattaattaatattcctcaaattttctatttctatatcttcttccttcctacataagacgactatatatacgttgacattgtacgtaaaatataattatattatcatatcaattaataattaagatatgtattcaattatatatatttatatacataaagcatgaaacgttgttgcattgcatttgcatatatacaaattaattcaggacccacatgcatgtacacctataatatatgtatatatatatagacatatatagaatgaaaagaattagcagtagtattgaaaataatcgaattattaagaccatgatgaggagaaagaattataatcctttattaatcttgatattagttgcaataataagttgtagttgcatggctcaaaacgacactattccagtgaaagttggtgtcattttggacatggaaactcagattggtaagatttggttaagttgtattgaattgggtctctcagatttttatggctctcatcccaattttaagacaagattgattctcaatattagagattctaaagaagatgtcgtcactgcagcttcccaaggtacgtacctaataataacatattaatttttttttatgtatatttagattattttgatatatagataaaaaagaaaaaaaataaagaaaagctgttatgtaattagtcttaattatcatcaatttttttttttttttttaaatttttgtcttgtaatcgttctgcgactttcatatagttcataattaaccttgccaaactccttctttctctctaaggcaagagtttatgtaagtttttggacttgaattttgtttcattcattaaaaaaaaaaaaattataccatcaagttgatttgagcctaatgacatataattcttaattaattagaccctaaaacaattaaacaaatatactaatcttatctaatttggagggacgaaggcagaagaatattgttttgagggggctaatatatatattctttacaaatcatcatgaaaaaaaaaaaaaaaaagttctagcatgcatgtactgtttttattgataggtatattaattgggtatttaagcaagtatttttgaccatttttagttgagtattgaagcagtaatgtaatatagtatatatttatattattaattaaacttatataaatttaagattatatatatagagagagaaaatattatagattcgcaaaaaaattcttatctgtaggacacaaacttattagttgagattttttttttttcttatgatggtttttttttttttttttgcaaacatatatattacaccttctttaaagtttttagatattcttaataattttgagtgttaaagataaaaataaaaataagctcacctataataaattgtttgaactttggtttggtcactgtcaattatttgaattttttttttgaaaattgggaaaggacctactaccactagagatgcacatttttccaatggaaatgggccctgtggggacccgccctaatggggcggggatttcctgtctaggtggggaacaaagcggggatgagaataattattttttatccccgaatgttaaacaggacggggacggggatcacactccccgtcccgacggagatcgatccgtttagtattttattttatatttctaataatattttatatttttttaatttatgtttgtattttttagtatattagtattttttttttatgaattttaagttgtattttaaataataattagttattgaataacaattaatgtgtaatattttaatttttttatagtttaatatttttatatatttaaatttttctcataaactttatttttttattagaggattccccgttctgtccctggccccattagagaatttcccgccccatccccgatggggaataaacggggatggggatttaaattattaacggggatgggatggggagagcactccctgccaatttctcgctccgtgtgcatccctaactatgactatacaatttaaaactaattaaattgtttttgaaaaaaaaaaccataatattttaattgtctcgattatagttgcactaaaatctatgtgcatgtttggcaacttaactaaaaaatattttttttttgtttttaaaaataaaaaattattttttgaaaa

SEQ ID NO: 23325 - DNA, 3859 bp, Cannabis sativa
gtaggaagagcatcatggtatacatccgccagataaaatgtttgattttcaaaggtagctttatattccagatcaactttcaccatttttttgattaattgtaattgagggtgagggctcaaattggcgtagaatatcatatgtatgatggtaaccagaatttactgtataggttccatgttaggtgaaagaccaatagagccgatgaatagcttggcaaacatcgttgggaaagatagattgagtctgagagacatgtcattctccattagctgttataaggctggacatgttcacgtcgagggtgtttggtgtactgaggtaggtaatttttttgaatctcgaaatccaggcatccttaaagatagaaattaagttaccattacccactatattgcgcagacccaataagaggaacttggaagaatactgggggaaacatgaattttgggacagtagatttttatttgtgccaatcgggtgcaagggtgtgtggtgggtatgtcattgtttgatgagttagtcttttcccatcctacatcatctttgaatgtaaattaggatccaaatgttacatttcttttatattttataacaaattaggtaaacaattttttactaggtcctctaattaataaactacacccgtcaacctccgtctcatcccaaccctttaagatatatttcaactttccctttttaataatattaagaagtaaaataatcatatatctttattattgggtctaattagttatgaaaatatgatcatagatagccaatcaactacatataattataagactgatcttcattgctaactaatgtccttttcttaatattagtttctagctaatatgattttagccacattcacaagaaactatgatcactcccaccatctcatggggatttgatccattaatcattgtgagcaatgaggaaagcattatgtaagtgaaaaacaattattcatcacaggagtgtacgtataatctatcttccaaaaataaaaatagaataggctaatccatatttgtttgcatattggtaccatcataactaaataactaaagggctagctagtatatataaataaatctctctctctctctctatatatatatatttatataattagtcatcgatccaatttttcctttgaacctttctctttttcagtaagtctgaaagcaaagttagagccagtctggcgaatatacatctttaatttgttgaattactcatcttaaaaattaaaacaatatgaggtagtcgataggcctcgtgcttgtgactaaacaagccaattctctcctgactgaagctttaactcaatactctttatactaaacaattatatgaaatcaaccacttgaggctagctcaagtggccataggagagtgcgtgtgtgtggcgtgtgtgtgggaggtcatgggttcgagtcccaaattatttattgtgtaatatataaacgcttgaatcaaaaaaaaaaaagaaaaaaaacaattatatgaaatcttcaaggatattcctaccacaatttaatcattgatacgagtataaaaaacagagacaactcgtcctaaaagaagataaagttacatttaaagagatgggaaaaggaaaaaataaaattctctaaagtccaaaaatgtatatctttattttaggtacaaaagataaaaagaaagtagtcctttttatcagtgtataagctaaagagaacaattatgattatggttaggaacagacttaaatgggttggatccaccatagacatcactagccttttgggatcttataaattttattaaacttataataatgaatcatggccattttcttgtctcaaagtttgtaaaaatagaataccttttattttttatatgtccccacagatcttggctactgggttccacaaaatagctcaaaatcttttgaggcttgagggctattttcctagaagaaaaaatatactaaatttttaaataaataaaaaaatattttttgcttactgatcatactttatcgttgtaccaacaattttgtttttgtacatattaaatttttaattgaactaatttatctttatgttatatgttgattacaagaaaggtatatattgatctcatgagttaggaaggtgcttataagttggagctttttagttggaccaccatggttacatccctatcttataaaccatacatatatttgtataaagcaaaatcatcactgtcaagtattaaaaaaataaaaaaaatcatcactgccatgctatatagtttatttcttttgttttttggaccagtgctgctattaagttaatgtctcttataaaggactagaggaaaagaaatcagtgtattggatcagttttggcaacaaataaattgatacttaactattggaatttatattgaaaatcatcattaataagtttaattaaaaactaatatacacaatagactctctttatgttagattagattaacatagactacatcactcaagaataaaaataaaatgagaaaattgcaagacgtgacagttgaactctcttctatctaataatcattttgaccagtgcacttgctgagttcacctgatatatatgataacatttattattgaaacaatcgcacttatagccctaactaaattttgcatcttaaatttcttctcaggacattgttatatattaatgtatacgtatttacaattgctgaccaagtcaaaggccttgccttttgtttttcgagttattatgtacacatataatggaccattataaatatgcgcagactgttccttattcaatgtctacaatacatacatttatatatatatatatagatactgatcactatttattttcatgccaatgtgttaaattcattcactactcctgatctatgaatctgatacttgatgaatagaataaattagtcaaacatggcatagcattgaatttataaaatgcgttttactcaactcacaagtttgcaatggacttatttagatttcgttaatttcttacatattttatagggatcttcaagtcgatccaattcaatctgcacgattcaatccattctaatctataaattgtgggtgggactgaattggaaaattcaaaatctgcacttgtgcagattaaattaatgttgattgaaatgtaaaagtaaccaatcttatccaatcctcacatatttataaaatttttaaaaaattatacataaaattaatattttaatgtaaagaaaaaaataatttaaaagtctaatacatataatacaaaaatatttcaaaacttaatagatcaaatatatattctattcttatatataatttttttctatacatacaatttaaaacaaaataaaatatttctttagacatacatttttcttctttcattgaatttgttatttgtcattatatttattttaatttattgttggagatataaaataaaaacaattattttattttgtggcaagttatgtgaaaaaaatatattttttcataaatattaaataatttgatattgaaaagtaaccaatctaaaataaccgatctaatccacactttcatggattggattggattgaatttgagctatcatgtggattaaattagatccaaaatataaaatccacacttagtgcagatttgatgcactatgaacaaaatagtgcggattggattgaatgaacacccctaaattattttattagatcactttcttggttcgttttattgtatacattacaaaaaattgttacttttagtgacaaccttttagagtcacaacataaactttttgtgactaaatgtgactttaagtcacaa

SEQ ID NO: 23326 - DNA, 1363 bp, Cannabis sativa
agtgtaatatggctttccacttatgacgctcatctccctgcgttattttccccgttacgagaatagggattcgtatgtgggactaggtgaagtttttatggagccttaaaagtagggacataaatacagatgaggtgttcctttatgcctccattgtaattgacacgatttggcgggtccaaaacgacaaggtacataataatggttcagataatgtgaatcaatgtatggactttatttctcactcttaagcatattacagaaattctcttattcctacattatccccgacccccttgctgcttggaaacctccccccaagactggatcaaattaaattgtgatgttaaagttggaggggagcaaatgtgcatatttgttgttgctagagactacctgagcaaggtgatttgggtttttacgaccaaaatagagttttctgatgctctttgtggggaagctgttgcgatttccttggtgcttgaggtagcaaaggacaaaggtcatcagtttatcctagtcgaaagcaattctaagatagtgatcaatactctcagcggcattgaaccccgatagaaaattgaaaactattctcttttctgtgacagaatcgttccttctttcatttactgattattatgttttatgattagatcttgtaactttttggctcataacgtatagtttaatggacttttacccacaaccactatgggtgttattacgttactactattcttatgaacatttgttgtaacaaccgtgaggtctattgttttatttaggcttgaatgtatcttttcaaaaaaaaaaataataattttgaggcattgtatagaaaataatgtaaataaaatataaggtcatttgttgtatactattaaaatagaagcccaaacaaataagaccaccaattaataggtatagtggctgtgcggtcatgttgataatctgtctctctctatgtgtcagttgtctcatcccttaatggtccctagcaagagatatagctggcccatttccatggcttatgtccgtggttccccctacaccatgatcctgaccctttctatctgtctctctccctattacacaaaaataaatatatgtatatgtatatatcagctgattaatgttcgttttcatgtatttattcccatctgaacctaaagattaaatgattttggtcaaaattctcaacttaattagatgcaaaatatggaattaatattgtacctatcctttatgaaccaccacaattcttgcataaatttttatgattaaacatatctattctatataaagtgtgcctatataactaaaattcttagtttttgagaaatttatgggtgacttttaattt

SEQ ID NO: 23327 - DNA, 5517 bp, Cannabis sativa
ccatagtggcagtagattattacaaaaagtggacggaggtcgaacccatgaagaccataactgccaagaaagccttggacattgtcataaaaaaaaacattgtatgttgatacgggctgcctcacaaaatagtctcagataatggaaaataattaaactatgatgaattcacagatttctgtgaccaacatagagtcatcaaaagtttctctgcaatcgtaaggccacaagaaaatggacaagcagaagctgttaataaaatactaaaggtcaccctaaagaaaaagttgttggcctgtaaaaatgactggcttgaggaactgccacgcgtgttatgggtctaccggaccactacaagaaccacaaccgaacactcccaattctcaatggtgtacggatgtgaagtaatggtcccggttaaagctataatcccatcccacataagagccacctatgatctgggaacaaattaagccctgctgcaagaagcgctagatctagaagatgagctctgagaggattctcaaatacgcatggaagcataccaaaagaaggtggcaaaataatttaactccaaggtcaaaatcaagaaattttccattggtgatctagtcctaaggagggtcttttcggcctcccaagagccaggagttggggtacttgggccgaatttggaaggcccatacgagattgacgatgaaataggctctgggacttataaacacaaaaggatagatggatctgcaatacctagagcttggaatgctgacgatattcgcaagtactataaatagttaggagttcagaaattacattcttctttattctgtaagttaacctgtgacagactaaatatgcgtgttatgccatatagatttaagctaagtgacccaaaaaagtctttttcatgtcagttagaggggtactaaggcataaaatacgcgcagcaacaggccagataaaaaaagagagagaagcaaaatagatataaacttacaataaaaattgtccaaaatgtaaataataaaaggcctggggatgggccataatagtctccccttacctaaaataaagagtaaatgcaagaaataaaaagtgtcttaagtagggaggaagtatgggaaatgtaaagaaaacagaaagactatagctttggtcaaggtactctggaagaatagtaaggtagaagaagccaccttggaactagaggccggcatgagggctcaatacccagatttattcatgttagattttgaggtctaaatccatttaatggggggataattttaatgaccgaaagttagatcatggattagtaaagacaattagcattagttatggacattttataattatctatgactttatatttgttgtgggtcctatttttagaaataggaattagagttatgatttctcaatttcagagattttattaaactttaagagtattatctatgcttaatgagaattgtgcaatttttatgattttttttttgttgacgatggaaaatgtgatagatggtcattagagtcacatgagtaagtttagaaccttgttcttagcgggacaaacttttgagatatttagaatgctgtgtttaagcgatgttatggttttagaccattttatccctaagctcataattacttaagtttgaaggaagaaggacattttgggaatttcgctattaagtttaggtggatgattagttgtgtgatagctggccccttgtgttttcagcctaagctattgtagtataatggattaataaaaaagattagagaaagagaagaagcaattagaacctctccctttctctttctcttttcgaactaacaaggaactaaggaattagggttcaattcagtttgttgtggttgattcttgctgggaaattagtagcttttggaaggaggaaagtgaggtatggccctaaattcttcttgttagttttctagtagagttgtttttgttctagcatgtaaattttttaattaaggtttgttttatgggtttaatttaagttgattagagttgatttgaggttgtcttgatcttgattcttgtgttgagtaagtttgagttcaagaactcaaacttggctcaacaatggcatattgagtttttgtgcattttggctgctgttttttgttagtatatgctattggatgttggtacaggtgttctggaaagtttgatgaagtttggaattgatttgagggagtttcgaacttatttgtggaatttggtatgaaccggtttaccgattctagaggtattgtagaactgattaacgggatcaagggcaggattcccaaaaaaatccattttgtcaattcatgttattttcagagccatagttatttcctctataattaggatattttcatgttaattatcgatagcaaaacttgtagttgtgagtttagattctcggattaggttttggcctgttatttacctatttgcgtaaatgtgacatagggcatccatccaacacgtgattatctattagattggctagcacacttgaattcagaaacaaagtaagattagcatagaaaatatatgaatatgtgtatgtgtgatatatgtgttttatttatgatttgtgcactaccaatactagtacggtataggtattgagtgcattggtatagtgtatgatgtctagagagtacagtacggtgttacccacactagtaaggatatgtacagagtgtatgtggtataacacttaggggtactcgaggtatggagtaaaccctaccaacactcgtatagtagcagtacgtagtgtatgtggtataatactcgtacctcaataaagaacattctcacttatctgataagccttgtcaataggtgtacgggtacctagttacaagtcggaaatatattgtatacaatgtgcttttcttactgagtctgttgactcagaaatattatttccgtgtgtaggtaaaggaaaggtaaaagctgaacaggagtgagctccgagctcgagtgatgattgtacatgttgagacagggcgacctagagtgttggtctcaggacaacttgggctgtattttgtagtttttgtgcaactcgtttgtaaaagtattttgataaagattgtaaaagtttaaacacgggatcctaatttatgtaaatatatatatacatgtttataaagtttaataatttaaatcaaaaatttattttggcacaatttttgaggaaaaccctttgattagcaaaggtggtacgttaattaaaaaatcactgtgtcgcacttaagtatcagggcgctacactaggcctctcttctccttacgtttttagaaagtattctttggtttgaacatacaaaatgatgagttttttttttttgtgtatgaattagggtttggttttttttttttttttgtgtttctacagtttgtaattgataatttaagcttgttaggtttttttttaggggctggttgtgttgttgagcaagtttgagttcaagaactcaagcatgcctaaataatggtgaattgtgaaatttttggttatatttggttttattgcttggatttggtttatattgatgatactaggggttctgaagcttagattccagtttggggttgttttgagcatgttttgaggttctttgtttttctatagtgaaaagaagcaggtcgtttctatagaaacggcctaccgtttttactggtgtaaaacccaaaaaaaaaagcctactatttttatagaaatagcctgccatttttgaggcagtttcccctttttctcgtgtttcctcgatactacttagggttttaccatgctatttattgatgtggaaatttttagtttcgagtttagattgccgaaaaggtttagaaagttgtttacccattttacatgattgggacatatagcctccgttcagtaagtgatttttccattcaagttgactggcacgctttaattcagaaacgaggtaagagtagcatagaatatatatatatagatgtatatgtgtatgcatgttatatgcatgttgttatatgactcatatgctaccaacacaagcgtggtagcggtattgagtgcatgtggtacaatatattaattttaagagtataatccagtgttaccaatactagtacagttgggtacatagtgcatatggtacatcacttagtggtactcggagtacggttcaaaccctaccagcactattacagtagcaatacgtaatgcatgtggtacagaggtcgtgccttagttacgaacgttcttaatcattttttaagctttgtggatatgtgtatgggcgcctaaatataagtcggtagtatattgtatgttatatacttttcttattgagtctgtcaactcacagttattgcttgcatgtgtaggtaaaggaaaggctaaggctgagcagcaatgagtctagagctcaaagatgattgtacatgtcataatggtgtgacctggagagtgcagtcttgggacaacttaggcttattttttagtcgctgtgtgacatggctgtaagttttattttgaatatgtaagcaagtttaaaagcgggatcccgacttagttctatgattatatagttatagttattaaagtttaatattattcaaaaagttttaattatcacaatttttaggaaaaccctttgattagtaaagaaatgcataataatcaaaagatcactatagtgtgcctaatcattagggtgttacaatttcactaaagcacacatttacccttcaggctctaactcctttaaatatctcttttgggagttttgtgtgcttcccgcaatgtgtggccctctagaaatggtggcaacatgacatcaaaaaaaagcggagctaaacctagtggatgtggattatctggtcctagagcgaaaacttttactgcagcatgtgctggcagagcatgtagggtcagaagctgtgttctgggagcttgagggagacctaccccttgtggatgattttatagttccttgttgtcccaaaatgaaaagtttttcatggaccatcccctgtaaaggattgataatcaggattcggatccactggcctaggtttccagctctgactagcattttaatttcatattttaagtagtcgcactctttggtggtgtgccccacgtctctgtgatattcacacctcttattttgatctcttttttgttttcctccttaggacatcctcaaaggctttcggtaatggaccatgttggaggttgcattatatacgctttctcgagtatcaaccaaaattgtgtactcagaaaatttgggctcatactctttccttggtttcattggagcatcattcttattcttacttcttccgcgtagcttgctcctggaatggcttacacttctttttgcaacttacgtatgttgcttcaagtgtttgggagcgatactacatcaagtctataccgctccatacctagagaaatgggtttgtgtgggtgctgttggaaattattttac

SEQ ID NO: 23328 - DNA, 2899 bp, Cannabis sativa
ttgttcatgacatgcataaaaagcattttatttcttgtgcttagaaaaagtatcttaatgaatccatagttatgtaagtctaaatgaatgctttgatttgtgtccaataatctcaaagcttcatcttaatggataatctttcgtttgaaaatgatcaatattggtggagacagcctaagtaagaagcaaagtacttcaccaatcatatggcatcgacagaattttgtttctttaaaataaaattttcaatattattcattttgtttcatacttggttgcaactttttattacttatacctattatatcaatgcattattctattttaagaattctactttatacttgaaatattttgggttataaaaatagcaaaaatgaaagtaaaaccaagagcctatatagataaggattgtatgttaagttcaaaagataaaaaggttcaaaaatggcatgaaattcatctgagaaaaattctaatagtatttatttgtatcattcttgggacaaatttctgttccccaaggaaaaaatatttacaataaggcattgtgtctgcccaaaaaataatgtaacaataaggtttgttagtggttatcatctgttggtgtctaagctcataagcttaggagcttaagtgagaaataagattgatgaaggcatcttctgtgcatggaattgtaagaactcccattggatgaccgaatccgaattcttcttcagcttgacttagaaagtgttggaatgaaggttggttcaagtatgccacagggatcacaaacctcttcattctgctctcatcatctacataaactgccacaaagccttttggaatatcttttgttcttgaaaaaggcctctgaatgagttgcttggcatgaactaagctagcaaagcgaaaccccattattgtaataataagagtgtgtttgaagaaaggtgggtagagattatcagaaagacttggtaagtgtgagtttgaggacttgggatggttagtgatatcattcataggtgtatttataaccaatactctttgataggatgttcacataaatgaatggtcaaggaaaaaacagagaaaatttgcttagatggggtctagtgaggtatgctccttgtgtaatcacatggtattgtctaacaagtcaccatggactgtaattagatgttttaggcatatcaaaggtgagacccaactttgaaatgaaacaaaataccccaatatcatatgtatatttcaaaccccattacaacaactttgaggacaattgaccataatatgtcttaggcatgtctcatatccaagtgatcacatattcatataaaaattataaaataaagatgtggatatagtcctgcctttgtagcttgtttctcttgataggcttattttctatgtatgacttcctagacagtgccatgtgaacttcaaatgcctatgtcccttgaaaatcccaaaactaaatccacctcctttcatagccattcatctatatatacaaccacactaccacacaccttaatcatcaactctccatctcaacaactacaaccaaatctctttctgttgtgagaaactctcatacattccctaatacatagcactggtagattgttgctagcatgttgtttaaattgcccggtattctcaatgccaagaagaatcttcgtaggtctctttcggtgcttaaagaaggaggtttgaagagtggttcggttccaaaagggtacattgcagtgtatgttggaggagaggatgaggagaagaaaagacatgtagtacctgtttggtacttgaatgagccttcttttcaacaactactaaacatggcagagcaagatttcggttatgagcatcccatgggaggacttaccattccctgcagagagcaaatcttcattgatctcacttctcacttgaattgattattgtaaatcatagaactaacataatttagtacagaaacagttttgtagatcatatacttttaacatgaaaaggaaattgtttgattacttttgaaagatacatttatatatacagaaatttctcattttagtctacatgtttttctttcattgaaaattaaaatgggatagttagaaagatttatgtcttcatctcatactttgttatattttgcttaattacactgccattttctatcaaataatatctcttgtagctgttccatataccatcttcaaaacccattgacctttatctgataacaacttaaaataatttttcttttgttgatatgaacttagactaattagttactcactctagaaatacaaaggatccatccttaagaagactcaacattttagactgaataagtgagtaagctcatcaaattttgaatgttatttttcatttgatgatcatagatccagttcagatccatgataataagctccacaaataatgacacaaatttaaattaatgtttctttaaatagtttgtattttaattcttaagtcaaagaccaaataatatacaattttgagtaaagaggctaaacatatagctttgttctaatgacagatacactcaattgcttagtactttaatgttaattaaactatgtatatcgctgattaaacatattccatgtcaagaatttaatttgcactacaatattttggttttaaaaatgccaaaaaagaatgaagaccaagggtgtacaaggattcgatattagaatcttaataaaaaaaaggttctaatcacataaaattcatgtaagaaaatttcttaatatcattcttggggacaacattatttgttaaatcccaagaaaaaaaaatatttacaagaaatataggcattgtttgcctaaaaaattgttaacattaaatttggttagctgttgttatcatctattggtgt

SEQ ID NO: 23329 - DNA, 3142 bp, Cannabis sativa
ctagtttgagcgtcataaaagaagcgtggtcgagcaaggatcctaatgagaataatcctactttgatgagtaagttagtgaaaactcaaaatgccctcagatggtggagtaagaatgtttttggggattgcgatttccgaatcaaacaaatggaacttgagctccaaactcttcaatccaaagaagcaaatgaggtggatgagattacagagcgaaggattcaagattctataatggaattgtggtctcgtaaagaatctatgtggaagcaacgatcgagggaactctggctcagtcaaggggatagaaattcttctttctttcacgcctctactatggttagaaggaagaggaatcacatttggaatcttaaaaattcgagagggcaactgtgtaccagggaaagtgaaatgggaagtatcctgaatgattattttatggagctattctcttccaagggtgaggttccctgcaccggtttggatgagttaatttctccatctgtctctatggaggataataccatgctttcggccatcccggactttgaggagattaagtcccatgtctttcttatgcatcccctcaaagctccaggacccgatggattttctgggtgttttttccgaaagtgttgggatctagtgggcaacgatgtggtaagcagcgtccaaagtttctttcgcacggggatcatgagttcgggtttgaaccacactttcatttgtctcattcctaagtgtttcaaccctgacagtgtggatcggttccggcccatagccctgtgcaattttgtttacaagatcattgctcgtatcttggcgcaaagactcagggtggttatggactccttgatagctcctacccaatcggctttcctcccaggaaggtggatagcggaatcatcgatcctaacccaggagattgtggaggtcattaaaaagaaaaaagggaaaggtggtcttttggcgctaaagatggacatgaacaaggcctacgatcgtatggaatggtttttccttgagaaagtccttcaactattcggtttcagccccataattacaaagttacttatgagctgtgtcacttctgtgacctattccatcctccttaatggcaagcctttacgtaaatttgtaccggcaagaggacttcgtcagggggatccgctttcgccttacttatttttgctgtgcaatgaagccctttctcgtttaatctatcatgagcaatataagagttctatacatggtattcgggttgcccgcaacgcgcctgaggtgtcccatcttatgtttgctgacgatactatactattctgtagggctaacacctctgaagtagaaacacttgtgcggtgcattaaaaaatatgaagattggtctggccaagtgtggagtaagcagaaatcgagccttcttgtctcaaagaactgcaatccgaaagtgaaagcggccattcaaaggattttgggagttgggaacatccaatctaatgatcgtcacttgggcaatcctttcttatttggccgaagcaaaagaagggacttcagttttatcaaaacaaggatgtgtgaaagaatggaagggtggaggcttaaacacttatcaaagattggtaggatgactttcattaactctgtagccttatccatgccctcttactctatgtccactttcaaactcccaaggctctcctgcaaggaacttgattccctagttagaagattttggtggactggttcggttgacaccaatcgcttccttgctgttaaatcttggaatactttgtgtcaacccaaacaaagaggaggtctcggatttcggcgctttgaggatataaataactctttacttgctaaactagcatggcagctggcctctagagataatcgtccctggtgtcttgctttaaaagccaaatatttcccgagggaatctttttggagtgtggagggaaaaaattcagatagtttcgtttggaaagggattttaaatgctagagaatgtgtggcccatggttcttgctcaatcattgtgaatggtgaaagtatagatatttggtggcaaccctggatcccttggatgaattaccaagaattcagggctgtcatggaggctgttagaaacatcgcacctggtttaacttgtgtggcagaccttatgtatcgcagaacgagaagttggaattgtggttatctccggtttctttttgggaatgagttgggtgaccagatagggaaaattcagattgtcaagcatggagatgaggacttcttgatctggaaaaattctagagcaggtactttctctgttaaaggtgcctattgggatgcacaatcgcatagattcggagaaggtaatatcttgtggagttggatttggaatggtaaggtccatccccgtcttagcatgatgctctggcgtgtctgtgccaatgtattgcctactggggacatcttcagcccgactgtcagcaacgattgctgcttttgtgggtttactcgtgagagtcctatccacctttttgctagatgctccttcgcctcagccctgtggttcggttgtcctttccctgttcgaatagatagcattcaagataacaatattgttggtttgctggttaatttgtgtaatggagttgaagaggagttaaggtgcaaaatgctcagttgttttgcgatcttgtttgatacaatctggaacacgaggaacagaattgctcatgagagaaatttctcctggagtgtcgatcaagcccgaagagaaattcataagcgcttctctgaattctctactgctgtagtgtcttcctcttcggaccctggtgaagtttctatccctgctgtgtgtatccccatcagaaccaacatggtgattgttgtggatggatccttctccaatggtagtttcggatgtgcagctctggccctttgcaacgactctgtcgactggttttttcgctcctctttcggtgtgtgcgtcaatgctctggctgctgaattggaggctattcggctcggcttcagctgggctaaggacacaggctgggacagagttaccatcgcctcagattccttggtgttggtcaaggctttcaatgacttgaagcctccggattggcagctctctgcccagttttt

SEQ ID NO: 23330 - DNA, 2026 bp, Cannabis sativa
cagaaaataaaaatcactgtccaataatcgacataaaaatctatagcaaaaaaaaaatgatatgatgaataaaattaaaaataagatctaagctttggaagatttggggtttgggcaagaattgagaagcaaagggattttattttctctttcttagctactattcattggctccaactttgtaaagcttacttatccaatcctatacaaggagttgccacaccaaacaccagattaggattacttaatccaatcctgctcaccaaacaagacctaaaagaatacaaagttcacagacaaacaaattgtacatttccatagggagcaccaccacctcgttcaacttccaaacaatgaaaaatgtaagagtattttcttcgtatacagtatagtttgtacagaaaaaaaacatatgaagcacaagacgtgccctgtcggccaaattatggtccgatctcagggaaaagtattatttggcactaggcaagtcaacaaataaagaccgaaacaaatttagattttttttttaatttttttggaagaaaaacatttagctttatcagttaccagatctcctcaaatatgctaaaatccccaacccagcaactagtgcagcaccagctgcaacagaactgtatgcagacgcccaagctgactcggcatgagcataatccaaatctcctgagccagaaattgtctgacgatcttgtgttcctgaatagtctaaatgtagcttcaaacccttcaaagttcataactagatgtcaggtttcattatctttacagcaagttaactaacttctactatgaccgaactgtatggaacaagagttggaaaaatcaataataccttccaaccagcttgccttgcatgatccacagctgctgtaagatcattatctgatgccagtataactttatcgtggtcttcatcttcatactacacaggtagctcattgattagtaaaatgtaactgcataaagtgttcgagatagtaagggaagtttatagaataacactggttgatgatataccatgatctgaggcaggttgtggcggtcgatgtcttcacctaccctctgaattatagaggttataaggtctgtcaagctccgaatatctgcatccaagaaacaacgtcaatatcaaagaccttgtcccaaaagctgaaaatgcacaagggtctcatgtgtgtaataaaagaatgtagatattgtcatttgaatttggctttaagggttaagaatatgaataacataccacaagtaaatctatgcattcggcccttcttatcttgaattttaaatgcaaaagtattagacagtcctgatagagtatagggaaaaggtctccctgtttctgttccgtcagaagcaagtttcaaggaattttcactgtgatgataatagaacaagttaatatccaaatatatgaatgtaggggggcaacacaagaataaaaggttggcatagcttccattgaatgttagataaagttataagcaaaccttctagtttcttcgtcatcatcattggaggccatggcagaatcccaaaacttctgcatcatagtgcttgcagcctcattgttcactccagcagtacttccaacctatatataaaatatgagataagtacgtaaaaccaaaatacttgataccaatgaaaattgtttccacatgttactgcaacacaaaattgtttccattcagaaaccataagcagattcttatgtccctgctattttcttcgtaatgtaccactgtagaaattactagaagactaatactgagctagattaactatcccagttatggcagcttatacaattacaagaaaaacagtttattttactctggagcttataagcccattacataatcatcaaataaccctctagatggttaagcccttgcaacaagagaggtgaaacagattcatatttaaatgagatctcttgatagatgagttttatttcttttagcagccagcatgactgcattgcattaagactgatctatacaaa

SEQ ID NO: 23331 - DNA, 2764 bp, Cannabis sativa
aaaatggagttttatttagggcatataacctaacacaacatgccttcacgaccaatcttactacaagagatctgaccgtcgatttggtttgtggccgctctatcatgcagtgcgtagagataatgactggtaccatctcgacgtacaatacgtgtcacccaaaggtctttcctttaaaaatcaccctcttgaatggtcgttgggcaataagcaagtatggtggcgtgcatgcatcgaactattgcctaatgtgggggacaaaaacttacgttgtaccaaaaaaaacattgtcatcactttagtggtctgacaagtacgggatgaccttttgcaacactgcatgggagtaaaacccattctgaatctttttgctacttgtatgggcgtaaatgaggaagaccattttgcaagtttcttctgagtctagaaggaacacctttctttccgcactcggaaggaaaaagtaaccgagcctccacgtgcccttgccttgtgaaggatgtacctttcgggaagccccttatagaagccaaggcagaaggctctaatcagctaaggattaactcgactttcttcaatggattctacgtgtcacttttgcaaaaatttggataacacaagtcaataccaaacatagcttgtattaaatatactgatacaataaaacataatacaatacaatactatacaatacagtgtaccaaaatgagcctttaaaattaatgttattaccatatctcacttgtacacatcattaatattgttttcagtaaatttgttttgtaaataaaacaaatcaaacaatgattgataagtgctaatttttaaacataagtaaattactttttataagttaattaagtgaattattagttatcatttacagttatatagtttatttaatttttaactaattaatcatttctaatttttttaacaaaattaattacttatatttaactaagaataattagtaattttgccctctgaatttttgacaatattgattttggctcctaaaatatacggcttgttaagaattccctttgaacttttacatatacggaaatttagtctttctgtaaggtttcgtcccattattccatttaaatgctcacatgtctttgtaaattccctaaactttgataattatcaaatcgtatccccccaaaataaaaatgagaaagattcaatattttttttagtaaatcttaaaaaattaatgtatatctcaagaaaaaaaatgttttgaatgattgagaaaattaaaaataaattaaaattttaaaatgaattaagcgatttaaaaaattatttagtttttattaaaaaattcatttagatattaaaaaaaatattgaaattcaatttttttgtaaaaactaagggtgcgtttggtaacacttttttaattagttttttgtttttaaaataagaaaagtgaaaatattttccgaaatcaagttctataaaactttttttatttttcattttttaattattaaaaataaaaaaaaaaatcattttctgatttttttaaacaatttttcaatcaatattttaaactccgactccaacttagaccttagaaactgaacccagacccattcccggacttggacccacccccggtcccgaccttagactcggcctcagacccgaattaaataaaattatcaaataaaaatgaaaaatgaaatttacagaacgcattttttattttatttttttgttttcaaaattgaaaaacaaaagtggttataaaacacatttgtttttcaaaaataaaaatttaacttttatttttatgatgaaaaaatttaaaaacaaaagtgttaccaaacgctgcttatatttatgggaataaacttcagtatatttgatttttctcaaaaaaaatgtagatttatttaagtaaacataatatatttttattttaatttatcattttttttaaaataattttatatttttatttattttctttatttgttaagatatgagtttatgaatataaataagtttgattttttctttaaaaaatcttagtttatttaaattatttattagattcttaataattttggcttgattttttaagatatgtgtttataaataaaataaagtttgacaatgtatattttttgggactaatttaatttttttttaagtaaaattaatattttttttaattattaatttatatatagtttaggttttttaataatttttattatttttttttagaattaatagaatattaaaattgcttaaaaaatagaatattatagtttttacaattatttttttaataaaatagggtaaaattttgtattggtcaaagctcagggataaaaatgctaatttttaacggtaagataacagaaccttacagaaagagcataattatgtaactgttatattttagggagaatttttaataaaccgtatattttagtgagcaaaattaagtagtgtcaaaagttcaggggtaaaaatagagtaaaagaaatcaattaattaaattaaataaagtagaataaaaaattaaaggctaattagaatttttgccccctgaactttgacatgtaccacatcatgccctctgaacttttaaggtcgttaaaaatgttccctaaactattaagattgttggatttaaggacttttgtctaattttattcaagtttactatttgagtgattgtttatgtactaaaacatgctccccagagtttgacatctaccaaaacacgcccctcgaa

SEQ ID NO: 23332 - DNA, 9048 bp, Cannabis sativa
ttcgtcaacgatgaaagccgctgagagacgacttactggttaaggttgaggaattatgttcaacatgtgatcaatttaaaataacataattttcttatcaatcctcaattttattaatatcgtgatgcttaataaataagccggtgaaattaaccatacggcatacactacttaatagataagttagtgtcactaaatatgcttaaaaaattaagccaacaaaatattattaattgtcattaggcaattaaacttaaaagataataatcacaacaagatatgaactacatgcttttaatttaatcattctcaaaaatataattgaaagcataaacatccaataataaaaaattattggcccacaaattaaaccaatgagttcataacattaataagaaaactacatataaatataatcccaaatgatagaacaagaaactcccactaacctaaaagaacaaaagattataaaatacccatatcaacaacatgtttattaaataatatgacacgtaatcctttggttagagaatctgctaacattgacttggtcttacaatagtctatcacaatgtctcatttcttaaccaagtctctaacagtgagatattttattttcatatgtttggaagcattactgatctcgttattctttgaaaagaaaacaacagtattattatcacaatagattagtataggagagaaaatagagtaaactagttgtatctctaaaatcaaattctttaagcataatacatgcaaagatgccctatataacatgcgacaaactcaatatacatagtagatgatgatattaaattctattttaacactatttcaagaaatagttgcactagccaaagtgaaaatataacgagaagttgactttaaattatctacacaaccactgaaatctgaatctgaataaccaacaactcgaagattttcgacaagcttttacacaagcataaaattattcgttttttgcaaatatctcataattttcttggctgcaacccaatgatcaagtccacgatcagataaatactctcaagaacatcgactataaaagcaatgtcaagtatagtgcaaacatgagtatacatcaaactctctactacacttgcatatgggatgttcttcattacttctctatccaaatcgttcttaggacgttgttgcttaataaatttgtcccattttaggaacaaaactaacctcacataaatttatgttgaaccttgagcacaagagtaatgtaaacttcttgagataagccaagaacttttcaatttttgtcacgataaatctcaatctctaaaataaaagatgtctttctaagatccttcatatcaaagttggtagacaaaaaaatttggtctcatttagaaatgaaaaatttctgctggcaagtaaaatgtcgtccacataaagaacaagaaaaatataacgacttccactaatcttcataatattacactggtcaaacttgttctcgacgaaccaaacgatgtcacagccttatcaaacttcaagtaccactggcgagatgcctgtttgagaccataaatagatcgtttcaatttgctaaccaaattgtcattttcattttcaagccttcatgttgtgacatatagacttgctctctcaattctatattcaaaaaaataattttaacatctatttaatgcaattctaaaacaaattttaattaaagtcataataattctgaatgaatctttagtagaaataggcgagaaagttacagtgtaatcaatacattctctgtgagtaaagtcttttgccactaaacgtgttttatacctttcaatatgtctcatttttatccttttgagttcttaaaatccactttcaacctattggtttaaaaccattaggtaatagaaataactcacatacatcatttttttccattgactcaatctcatcacaatagcttctatctattttgaagaatgtggactattaagtgattcattataagtacttcatcatattctcattccaaggtaaataaaattatcatattctcattctccaaggtaaataaaattatcatcacaccttgttgacttcttttgtctctaagatctccttagaggaagtacttctggagtagcctctatttgttaatcatcattttgaatgacatcttccacaactggaatttctcctataacagaaccctcatcaacaatgagacattcttcaacaataggcccctcatcaataataggccctcatcatcaccaaattctaaaaatgatagccttttgagtgcattggataatcaataaaataacaacgaactgttcttggatctaactttttcaaattaggatcataaatccttacttaagtgggacaactttatacatgaagatgattcaaactagattttcgtgagtgcttcaccccatatgaactctagcatatttgagctactcattatgcttctaaccatgtccatgagattgtgattttcattttcgcaatgtcattttgctcaagtgaactaggcatagtgtattgagcagttataccattttcttgtaactactcaacaaaaggccccatatgttgtccagatgctatataacgaccataatattctcctccatgatctgaatgaaaactttgatgactcttcctaattgtttcttaacctcatttcgaaagattttaagtttatcaagagcatcagatttttctttaatcaagtaggtgaatccatattgaaaaaattatctatgagaattataaatacttagttttgcataacgtagtggaataaagtccacgaatttcagtgtggataatttctaataaagatagactacggataacagtcttctttcttattttagctaattttccacgaatacaatcagcagaagtatcccaaccagaatcatcaagatgagaaagaattttagctcgaagtaatcaatcaactctttctttggaaatatgacccaatcttttgtgctataacaataaggatatttttttaatataagatctcttacattaaaagaggaatctaagggagccaatgacaacttgtaaatactattagaataaaaacaatttccaataattcgggagtcaaacataatctcaacattatgattggaaaagaatattcttgtttaactaaaaacagaagcgaaagtaaagtcctcttaaaagtaggaacataaaaggtattgatcaaggcaatcttaactaaaaactgtaattcaagaataaatgtgctaacataagtagcgtcaactccaacataactgcacactttaagttttaactccctctcacttgacttcttgatatcctttagccccttgttgtgcttgcttcttttcataatttatcatttgtcgggtttgagttgagaaacatagtgaggatttattcttcttttacaaattactttccttaactataaactaagaaattaggtcattaacgcttcatgctttattataaatgttatagattatcttgataaagctaaaaaaaggcaggatgcgcatgaagagcacgataaataaagtgagagtgaggaagagaaatattataatttttcaacttggattgaacattcataatattcaaaataaaatctcgcatcctttaatttatcatactcaatggttgtcattccatccataagatgtacagcttcagtgttttcaataaaaagttctttaacatttgtagtgtctgacaaatcactcaataaatgttcaaaaattaaacattttaatgaaacaaataatctgactttttttattgtgcatgaagagttttctatacaacaatattgtatccgtatgatcttgaagactattagggacggtttggtatgatataaaccttttacatgagcatatttggtagaagtttccttattcttgataataagattaacttctattggagtaatcttaaatgcttccaaataaaagtgaattgtaaaaattcacaatcttaataccataaattgtaacttttcacaacattttattatattcctttatttatccaaaaaaatataatccaattaatcatgttctccactttattattctaattaacagattattttgaacacttcatataccaacacccccttagtgccctttcgaataaaaatacatgaacttattaaaattcaaacatcaaatcaaagtcacctctttttttatatttttacattgtcttgtctagttgaaacccctagtttatctcaaagcaaaaaaacactactcacaataattaatcaatcatagagctaagtttaattctaaaccctttacacgacttagaaataaggtaaaaaccttcacttcatcttccatggcatcatgatgatgatcttctactgctactaaataataaacataaatcactacattatgtccacattaatggtaactcatcatcaataaggttagtgaatcttggcagtcatctgaagatcactctgattctgacattatcttatataacgcattcaggttttataacaagaaccaagccaacccataagagattctgctgccttcctccccaaataaacattaatcccatctaaaataataatttatatatataaaaaaaaaacatgaacgcaaatgaactccacctcaatcctacaactacataaactaccgactaactgtgaattaacaacggcagctccaacgtgtctactatcaatttgcagagctaaacaacccctttttttaagaggaaatgaacagaagaaaatgtttaacctttcgtgccacttcttcgtcgcttcttacctgtcttggcctcaccttcctgagccttggaaggattcggggacttgcctttagtaatctctgctggtttacctgaatcagaggagctctccttaccatcatcatcaacctcttttatcttcgatgaaccagacttcactttcccagtaccattggcactggacttcccaccactttgactggttttctccttggaaacagtagctgttttgggtgtcgccaactttgactttccagatttctgaatttcttgcttggacttggtggacggcgtgctgctttcgtccttggatttggtagtctttggtgtctgagaatcatgattcttagacttggttgatgattttgatgcaacattggctgatttggtactagcactttttggtgtatgatccttagatttgccaccacccaccgcatccgacttgccaacagatttggaatcatctttggatttgccatcagctttattgccacgtccagattttggcgtgaccttggatttgctggatgaagcacctccacccctggacaatataatgaaggatgttagcaacaaaataaacgaaatcaaagaaaaactgggtaacatatacacctactttttgggtgaagactcgatctttttacgtttagaaggctcatccgcatttgtcttcactttcttctttaggggactgcttatgttgacaaaagaaatcaatgaggaaaattatataatccaagggaatatcagtaaaatttccctattaaaataaacattttaattgaaattaaattgtaatattaagcttgaagcctcttagagcataaacaagtaaagacagctgaaggaaatgatggcaaaaactagttaagaagaatattctcgaaaataaagacttgacaagcttttaaagatgagacatgtgataggaagagacactatggttattgattgaagatcatctctcctttttgacaaggacaatcttcaggcttgagattgagatggtaatttcatcaattttctaattctaaatagagtgtagtcaattaaaagttaaatgcaaggcaacgaaatataaaccatcctaaacagcatgtgtctgtctatcgttgcaatctcaaacacttagtgaaaattataaattcagaatgactggaggaaaattctaattgacattcaacaaagagtaaaccaaagcaacaatcaagcctgaacaggaaaattctaacacgtctttgttttggaaatggggttcctttacaacgatctggatgtattttccacagttatgttgtttaatgtagctaactatctgaatgtcaaaaaaatcaagccttaaaaagtaatagtataggcaatcttattatcaaatgcaacaactgtacaaatgctaaacgtcaatttcagatcataacagtttaataactcttctaatcacaatgtctcttgacttttaaaagcattttcataagaaaagagggaacattgtggcgatttgaagcgaccgcggaggaacatacacagataacagtaataatggtaaaatcagagctgaaaaactacattaataacaacttacatttcattggaagcatcaggacttgcttgttcagctttaccttcctggaaagagaatgaagcttcatggatcttaacagcaaggatactataagaataggatatacaaaacaggaagtcacttacctcattggacacagaatcaccttcgatgaaattccacttttcttccttgagatttaatacttcctcatcaccatcataatacataacctataaaaatttaatcaagttgcttcagcaactaaagagtaacacacatcaaaaaaaaacaacctcaggaataatttaatacacgcatctcaccttatgcttctttgctacgggatcaaaagatgcaatataacccttatagtacctgtacattatttaaaaaaagaaatgataataagaaaatcccttgtctgggcagatttgaggttgtaacaggaataagcctattaatcacatacaatgaatatttgtatcttttattaaataataataaaacaattgttgatttagacaagaaatttcaaatttaagtgtttagaaaaaccacaaatgtatgtggaaacaaagttgttgaaactgagaattccttagcaatacattatatcaccaatacttacaattgatcatccggccaccaaactctaaccttcataccaacccaatcctcatcataacctttattgccggactcctgatagggaccaaacaacaaaaaagatgttggaaaacctacaagtctcgatggacaaatacatggcattctgaagtctgcatttgaaacctaatactataatactagttctttgtttatgatatcagaaaattatacagataaataaaatataaaagtactaaaacatacctttgctttgcctggagtacgttttctcttagaatttgtcttcgtggtctcctcaatcttctgttcatcttttgttgatttccccaatgactttggtgaagcaatagtatcctacacaattcattacagcaaaagcaagttatgaattatattgttagaaatacaaaataaataatataataaaacagaaatagcatcatcacttagaacagatgcaaagtgtctaaagctaataataacgtactttgctatcatctttaatagaagctttttttccatccttctcagaaagagcttttccccgaaccctcttcttcttatcctccgcatgctttgctgaggatccttcttcctttttactgcctccatctactttcttagctaactgcctcaaaggctttgtctctgagtcacttgtatttccactttccttcttggatacattagcctctgctaaagctttattctcattagaagtagcagctggcacctttttcccggaacgcctgtttgtctttacctcagaatcacttgtcccatcagctacctttttggaggtatcatcggcagatggagcagcttccttatctgaattatccttcttcttctgtcgcccagactttttggaacgactttcatcagtaagtttcacacttggagatgtagtagcaacattggcagattcactctccaatgccttgggtgatgaaagcttaacatcagacaccttatcattttctgaaagcactgcagtctcatcaactggaccctgatgtggtgaatcgcgaagatcctcactctgttcttcctggtctggaagtttctctgtttccttctcattgtcagcactttcctttgcattgtctgcactttccttcctattgtctgtactttccttctcattttctgcacttaggttctcactttctgcattttgattctcattttctgcacttttctcctcattatctgcacttttcttatcattttctgaacttctcttctcattatctgcacttttcttctcgttttctgaacttttcttttcacgatctgcacttttcttctcgttatctgcatttttcttctcattttctgcacttttcttctcattatcagcactttccttctcgttcaaaacatgaggactttctgaaggagtagattttgcagacgaactagtatctctcccaactttcttattgctctgctctagcttctcttctgtatctgctgccttctcagtgttcgaagtatcagtgtcaacattgtttggtgcatccaaatccttggtactctcgatttgctgatcatcctcttgcttcttcagggagctagaatcagtcaaagagtcatctcccgcagtctgggtgataccattactcaatgcagactgaggagatctatccacagaaattacagcttgttctaatgatgctgcttctgttgttcccgctttatcctcctgtataagaaactaagttgggtaagacttattttaagttaatctcaaagcttcagtagatactcaacaaagagaaatcagtaaaatttatatcatataaattaaagggattatttcacaaaaacataaaaacaattaaaaaaaattacaaaaatacagtttcacggaattttaaacatttttacgatttttttgattaaatttacaaaaaatcaggtctttttctgttgtaatcttgttaatttgttgttgattttttattatctgtatgttattttgatgttattttcatgttacttttatgcagttttcttgttgattttat

SEQ ID NO: 23333 - DNA, 2296 bp, Cannabis sativa
tgtagcagcaaaagaataaatgctaaattgtttctacctgattattgcagcttagacattaggcattttcaatgatatgaaatctgtaaagcctctctcttgtctttaatctcccctggacagcaagccataagacaaaactgtgtttgggagtatttaacctaccccaaacgagcttactccactgctttctctcttgagtaggacataaaatcttataccctgcaacaatttgataaggcattcccctgaactgctgcatatctgttgaggagcaaacttggtttttcaaagccaccagctgcctccaatactagctcccttggcttggactagtatagctccaccattctttgttcttgaggtagacactatggatccattgtacccataagttctcctctttctttgcaatggcccatacatacttgatcatggctgcttaattccattccttcattcttttgaagcctaatcccccctctgtttttggtttacacacatgatcccatgctattgctccaactccttggaacatatgttttcccttccacaaaaaagctctgcaaatagcttcaatatcatagattactttcttaggcagtatcattacctgactcctatatggatggattgtgagtaatactgaatttatcagcactacccaagcaacaaaggacagatgccttgaactccaaactctgatgcaatttgtcatcttctctaccagtaaagagcactccttgcttgatatcttccttgcatatacaggcaccccaagataagtgaaagggatcttttggagagaaaatcctgaagcagccaagatcctattgacttcattcataggaacattactgcaatatattgcagatttagatgcattaggaaagagtcgagatatgtgataaaatagctttagcccttgtagcatataaatgacacttctgaaatatccattggaaaataacaatacatcatcaggaaagctgagatgaattgagcttcaaatccttgcatctctcatggaaatgaaattcaattttttttccccaattttcttcattattctagtgagatattccatccctagaacagaaaccagcagggacatggggtccccttgcctgaatcccctctgtgaggcaaagaagcaatgcatttctccattgaacatcaaggagaatttgggagtttcgatacaaatcataatcaggtcaataatcttccttgggaaattcaaagcctccaacacctcttctatgaattcccactctattgtatcataagctttctgtagatcaagcttgatcatacagttatctctttttgatttcctcccataatgtctaatcaagtcctggcatatcataatattatgtccaatataccttcccatcacaaaccctccctggttttgagcaacaatggtaggaagaatatgctttagtctagagcaaataagttttgttgctactttgtagatcacatggcagcaggcaatggctctaaaatccttgactatattgggacaattggttttgggaatccaggttatgacagtggagtttatttccttcaacaacttccctgtgttcaaaaataaaactacagcttcataaacctcattcccaacaacatcccaattgtcatgatagaagtagcttgaaaacccatctgcaccaggaactttaatgccaggtatctcaaagattgcatctttgacatcctcaatggtctaggaaagtagcagagaatcaacttgttagggagttaaagtagggcccatctgcatcaccttggcctgcacatgccttcgatcttgcattttggatcccagcaggtcattatagtatgccagaaaagcttcagttatttttgttggatcatttactcttgtgccatctgctcgttcaatggagaatatactgttttgtctcctccttcctttgatacttgcatggaaaatagcagaatttttatcccccttctatatccatgcaagcttttctttttgttggagcattgagttataatcttactacttctgtatcaaaatctgtctgacttcagctttttttttatgtagggttgcattgagagactcctgccttatattgttctgcaagttttccaattctgcttttcctctaagtgtgtctgcttgcaaattagaataaccttccttatttattactttaaacacttttttcaactccttgagctttgaaaccagctgaaatattttggtgttgggttttatgccgtaaataaaactctttacaatctgattagt

SEQ ID NO: 23334 - DNA, 1791 bp, Cannabis sativa
  modified_base (46)..(47): a, c, t, g, unknown or other
ccacaattaaataaattcataaataattataaaataacagaaattnntgctaattgccttttctaatccaatttactaaggcggtcattacaccgcgtctcgcccttgttcagacacgatcacgctcgagtgatcaccctgcaggcgctgagtgagatgttgcagttgatcgataaaactcggtctaggaggctgcaaggctctcatttacgcgcgcggaatggctaccagcagccttcctcgacaacccttattttttgacccaaagattgatttttgggtgattttttctcccaattttaattttttctcttcaaaaccccaaatttcaaaataaaatattaaatttaaaatttaaacttgaatatcataatttaaaattaagaatatttaattttttaatagtttattattaatttttttgatattttgaggtttaaatttaaaaactgattatttgtttaaattattgccagattttaatattttattaatttctttaatatttatatattatttaattataaagttattagatgttaacacaaattttcgttaactaaatttaagcctatttcgtgatgtatttgcacaaaaataatattaataaaaggaaaagaaataacataaagcttttttacgtggttctgcaattaaaattctgcatagtccactagtctatcttattagatttttgatacaaaactagggctttttccttaaaggatttttcgtccctttttcagtgtatcttgctcctctttttagtcacataggaaggcagttaatcacaatcaaactgatatcccaaaataataatctccttaaattatgggatttgattacgtcccacgtaaaataaatgcaattattatttgaaaatcacagagatatgatttattcgcttttaccaggtcaatgcgtacgtggattaagtacgctgtaaagtgtattgtgctggaacatctcgctgggaacataacattccatctgacaatcgcagttcttggtgacaaggtgaacttcagcagtcaacatcatttgaatgttagcttctttctgagagagctaactcgacggagcagtgggtatcattgaaagatttttggagctgattagtgaaactaccatgagtatgccttcctatagcgagatggatgcctcgctattcgctgttgaggttcattcaactattatgcttagtttgtataatgtatattatacgataactcttttaacagtcaacatgtctcgtctacatctcttcatacgtaatgaggttgatgcctcactttgtacttctaacgtagaatagtttcttgtcaacgagcgagacaatagtttgtatatccttatctcacttaagactttacagtcagcaagttgtaaatatactctatcatctctgcattcaatgagttattacattttaatatcttctaatataattatcattatatttgttgattcttattttcccagtttgacacgtgtccttctcttaagtgccagctaaatttcgggtataacaatagccctttaaaaagttctttttactaaaatatactttttaaatgattagagagggtatattagtcataattccttttgaaaaaatgcatgtcctcttatttttgcaattttgttgttttgaggtatatcagcatttaatgaccatcttttccacttctttttcaaattctacctgttggatcaattgtctccttgatctaacggaagttaacccaagagtataaaatgagaaaaggaacatgttggaatttattttac

SEQ ID NO: 23335 - DNA, 2522 bp, Cannabis sativa
gtgaagactggaggtcctgcgatttttagaggaagaagaagaagaggatgatgatgatggggaggagacttggggcttggcttgaaaagaacaaccccaacccagaacgaaactgagtcgattattgatagacttgttggaggagaaatctgaggaacaagagaagggtctgaatggggaaacagacatagtttgacccactccccatgaattggccaccgccatacctaaatatctctcactcactcactctctttgggtctgggagtcggagctgtgtgtttcagagtcgcaccaacttatgtggtgtcctgtggaaatcagatgaagatgataatggttaatataatgttgatggcgatggctatgttgggttggatggataaaatcgcccaactaaatacgtactctatgtcttttttttttttttttctaaagagagagagagagaaattataattaattcagcatgtaactaaatgtccttgttaataaatgacttctttaattttgttttttttttttttggaagaaagacgtactcaagtaaataaatggcggtcattacataaaatatttgtcgaaatggaagttaaccagataaccccaaacctcttgtgggtaaaagcccatttagtcacattatgagcggcataattacaatccttgctaatataagagaaaatacaactagaaaacaaatgagagtaactattacaaaatgtgacatagtttccaataccccagtgagactccttcccattgagcatattgataactaccctcgagtcgctctccacaattacaaacttggcaccaatatccttagcactcgaaatggccaaacaacaagccgccgcttctccacacagagcatcagagaaatcaacaaaggacgtcttgacctaaaccactctaccaaggtggttcctggcaacaattgaggagcacatgctatcaagcccaactctaacatcgcaattaaacttgatccaatcttgaggtggaggagaccagctcaccgtcgaataaaggctaggtaaagggaaaactgtagcatgtaaatctgcatagaaaatacaaatatagtaaatacacttcttcacatcaacaatatagttattatgtactttgtcatttcgagtgcgccagatgatatcaaccacaacagacgcatatgggaaaacctcatccgcattaatccccttgtgtttaagatcccaaatgaatttgacccagtcccaaatacggattttggtgtcacggaccggataaataccctaaggagaaggctgccagccatggaacacatcacaagttaagaaaaaggtgttctaaagattcatcctccttcccacacaatgggcaactcgcatcctcaatacaaaatctttcctggatcacagatctgacagggagggcactagagagaatacaccaccacataatcttatggcgctccaacactttactgttccacagcttattccagagagtgggagcaacctcacagaagggagatctttccaaagcctgggtaagataggcagatttgcaagagaagcgcctgctactttcaaaggtccacacccactggtgtttaccggtgccagagggggcaccaccttttaaaattgcagatttattctcacgatcgaaaaggttttcaacttgtggatatcccaaccaccttcgttcgaaaaaagctcagcaacacttctgttgtccatgacgggagaaccatttggcctagggaggaaattacgcatacgaggaatccaaggttctccccatatacgcgtgtccctaccatcagccacccgcttacaagcatctttctttaaaatggacttagacttaacaatatttttctaaaaccaagaatcagactccttataactacagttaaagaactcctttcttttaaggtattttgctgctagaatcctacaacagaaagactgacttccgttaagtatgttccacccccacttagccatcaaggcatgattcatttctcttgttttcctaaagccgagacccccccgagatttgggaagacaaagtttgtcccaagcttttaggtaaagtctgtggttgtctttctcaaagccccaccaaaagtcacgcactaaactgtcaattttgcttgcaagacggttggagagtttagtggtttgcatagcatacaataacatcgacaagcccacaaatttgattagggtagcccggcccgctttggacaaagttttcgctttccacccttgtaacttagaagtaagattgtccaggatgaagttaaaatctgcatccttttgtcttgatctgaacaggggaaggcccaaatacttaacatttccttcaggagaaccaatttccaaaacctccctgatctcacgtttcaaaccagtggaagtatttttactaaagaagatggaagttttgagtttgttgacttattggccagaccaagaacagaacctctctaggcactgccagtaacctttgacttcatccaaatt

SEQ ID NO: 23336 - DNA, 1834 bp, Cannabis sativa
gacttgattctgttgtcattgatcagtatgagacatactacttggttgcttgatactatttatctccaaaagagcagctgacacctagtctttccaactaaaagtgtagtcactaatatctcatcatatgattagattgatcctcttcatcaattttgatatctacacttaataattgagttatgcacttactaaatctatttatatgatccctacaatcatctccttcaataattttaaactcatataattgcttcctcaaatataatctatttgtttggaattttcatatacaaagtttttctaactttttccattactcaaatggacatatttcattcaatacaatatactttaattcaagagccaaacttaagagcatagtgtttacccttttgcttgaaactccccccaatcttcatcagtcatactctcatgcttgaacctccccccaatttcattcaatacaatatactttaattaattcatgtcctatgccaacaatttttaatctttttgtagtgcctctccacgattgcacatggtagttgtctttgtagcatccctgaacttgattcgaagcaaccatcactgtcccttctctaggatgtctagtattctcacgaagaagagcaacccagtctcaacttcgtctcagcctactgatacgctctaggaaaataactagctgaacgacatcttggtccaatattctgaccatctcggcccttccttatgcctaaaacatcactaggagcagaatattcacgcaacaccttgacgtctcatagcaaggtcagccttcaaaccatctgagtaataatggcctcattttttgcgtgactgtgtgcctcatgcacactcttgttccttgaaaaactctgactgagtcatctatgcattgaggctctctagctaagacactcgcactatccataggttctcattatgttaaaagaaatcctaacaccgtcgctcacctagtaactcatgaccaaggtagcatgtgtggccagatgcaaataccaagatgacgtgccaatacctctagtcatgacccattcgatattgttcaaaaaatctccctcatggaccaaggagtctcatatgtccacagtccaatcctcaaggctacatgcctccatgcatgtcaggaggtcctcgagataagccactaaactagtagcatatgttagatctttgactttttctaccatggtgcatctatcccatgcacgcatgaaaattttcccataaatgactacttgtgtcatctcgtgttaagactcatggccaaggtgaaccataacatctctcagaggtttaggccacgttccatgcaagtgacatactagaaagccaaaggaaacatattggctaatctctaacggcatctttagacgtactaccaggtcggcctgatagtgtttgtgggcatttaactcatggagacatgtgagtcctcttgtggtccttatatgtctgccctactagttctagtgactagtattagctcacttagcaccaaggtgccatgagatggtagagagctcacaccaggttctcccccttaagaagcattatatgtatttagccttctatcgaaaatatatataatttttactctatagacatatgatcatcaacatatatcgattcttagagtttctcgaatttgattgtatcattgtatttctagacccaaataaatggcaaacaccaagtctcgtcttaatccaagcattatttaagatatttacaaaaataccacgattatacaaataatgcattataatgtcaccaacttgcacaccaacatgcactgtcacttcac

SEQ ID NO: 23337 - DNA, 6971 bp, Cannabis sativa
gtgtctgggtctgggtctgggaccgagactggggtcaggtcttgggtcccagtcccaatcctaggtcccaattctggttctaattttgagtttgggtccctaatctagttctaggtcctgggtcaaggtctgagtctccaatctcagtctgggtcctgtgtttgggtcttggtctaagtctgtgtctgggttccagtttgtgtcttgcatcctgatttgagttttgatttagatctaggtttgggtcctagtcagattctagttcagggattcaaacttagactcagactcgaacccaggtctagggtacggggctaggtcttggtcagggtttgggtctgagtccaggtctgggtccaagtctaggtctgggtttgagttcgggtatgggtcccaaatccaaacactgtttacgggtcaggtccaagccccaggtccagatctggatcacggtcttgtgtcccagtctagttaaactttgggtcccaagtcatggtctgggtcctaggaaatggtttgggtttggggtcgggttctaggtcagggtttgggtccaggtcccccatccaggtctgattcctaagtctcggtctgagtcccgaacccgatcaaagtttaagtcttggtccgagtctggtttcaggttttgatctcagtctcggtccagatctaggtacgagtctaggtctaggttcgggttcgagtgccgagttccgattcacgtctgggttctgaggcctaggtgcaggttccccatcaagttctgggtcctaggtcctggcgcaagtcttgatccgtgtttgggtctaggtctgggtatcgatcccggtctaggtccgggtccgtgttcggttccatgtctagatccggttttgggtccaggtccaattcctgttctagggtcctgattctggttcttgttctgattttgggtctcgggtctaactctaggtttgggtcgtgggtgaagatcaagatcccaatcttgggtcccagtctcgtttcgattcggatcttgagtcacgggctgtgtccatgtctgggttcgggtttgggactgagattgggctcggggtttgggtcccagtccaaatcctgggtcccgattcttgctctaattttgagtttgggtccccaatgtaggtttgggtcctgggtccaggtctaagtctccaatcctgatccagctctgagtccaagtccgtgtctgggttcgggttcgagttcgtgtcccgagtcccgatttgagttttaattggggtccgcgtcccagtccgggtctgggtctgggtgtcctcgtcagattctagttcccattctcaaacccaaactcgaactaggacccaagtaactacagggtcaaagttagggtctgggtctgggtttgagtccgggaatgggtcccacatccaaacactaactacaggtaaggtccaagccatgggtccaaatgtggatcacggtctctggtcccaatctagttccactttgggtcctaggtcccggtctaggtttggggtcaggtcttggttctcggtcccagttctcatgcccgtgtctcgggtccaggtcccccatacaggttcgagtcctaggtctcagtccgagtccaggacccggtcggggttcaagtgttgggccgagtcttggtttgggttctgatcttggtctggttctagatcttggtttgagtctaggtcaaggtttgggtccgagtccagagttctgatctgggtttggattttgaggcccgagtctaagtatccaatccaggtccgggtcctaggtcctaccccttgtccatgttcgggtttaggtccttgtcctagcttttatttcgattcaatgtctaggtttgggtttgggtctaagtctcggtcggggtctgagtcttggtccgagtctgggtccaggtctgggtcctgcgtttgggttcgcgtcctgggtgcaggtcaaggtctaggtcatggccagggtctcagtccggatccaggtcctgagttttgatcccgattcgggtctgggtctggcttcgagtccaggttcgtatctggatccctatctaggtctgagtctaggtctggtatcgggtcccaatctaggtctgagtttgggtcttgtatcgagtcccaatctaggtctcggtctgatttttgctccgggtctcgatcccactctgggtacactactgtgtttctgggcccatgttaaagtcttgatttgcgtcagtggctaggttcgagttcaattctaggtctgggtccgggtccaggtcctggtcacggtcctagtcttgttcaagggtcctagtctggcgatttttattcaggttccagtgttgggtcccaagtctagctcaagtttcgagtttgggtcctggtcttggttcgggtcctagtcagagtccctaatctggatccctatcacgtgtctcggtctggttctggttaaggtcctgggtcttaggttagagtttcggttcgggaccgagagttgggagcggttctaggtcttgaccccagttttgtgtcgtctggttccatgtttacgtttgagtttgggtccaggttcagaaccgaatcgaggtctgggttgggatctgggtccaagtcccaatttaggtctaggtctgggtttgagtctagttcttggcccaattacagttccatgtctaggtccaggtccgattacgattccaggtccaggtccaaaccttaattccggtcctgtttctgggtctcggtctacttctagtttttgttcaaattttgtggcacagggtacgggtttgggtcaaggtttgggtctgggactgggttcgggtttggctctgattcaggtcctaatctgggttagggtctgggctgggtatcaaatggagacaccgagtacgggttttgtccaatcctcgagtccagatgcggatcccgaactaggatcgcggtttggtttcaattcgtgtactaggtctagttccaattctgttgcccaggtccaatcctaattctgggtcaaggtctaggttctggtatgggttttggtcccagtataggttcaggtttggatcctagtcgcggttcaggttcaggtctcgatttggatttttatatttgtttaggttcgggtcagggtcctggtcctggtcctagtcctaggttgattctagttccatttgcgattctgagatcgagtttgggtttgagttcggtttggggttcgagtattagtctgagtttggattctggtccagatttcggtcaaggtccggatcaggctttaggtgtgggatagggtcttgggtttgggtccaacttcagctccgagtcctaggttttgatctttgtctgtgtcggggtttagttctgggtctatgtcctaggttctgatcccgcggtctgggttcgagttcgagtgtctcggtgcaggtctaggtttgggtcagattctaggtctggctctgagtttgagtcccaggtttgggtctaattttggattagggtccgggttcgagttttgtcctgctatgggttcgtgtctaggttcctatccttgtttgggtccgggggaggtttcgggtctgggtctaggtccgacttcagtttcctgggtccaggcaggtcatggtttgggttcgagtctcggatttagatctgggtctgagtgttgggcctaggtcagttgtcttggtcccccatcacagactggttcctaggtgcttgtctgggtcctggttggggttcgggtccaaagtcatggttttagtccagatcccagtctgggttcaggttcgggtctttgtcagggtcttgatcctagtctgggtcgcgagtctcaggtcccaactagggttcaggaccaggttaggtcaaagtcccagtctaggtcgtggtccaagtttgggtcccaagtctcaagtcccaatccttatcaaggtctcggtccaggttctggccaagtttgtgttgtcgtttgggttcgatactggtctcaagtctgggtccttgtcaaagttctagttctgattccgagtccgggttcagttttgggtctggatctggatccaagttggggtcggggtccgactcttagtctgagtccgggtacgggtttttcggatctcggtttgggttaaggtctgagttggggtccaggttcgggtccttggtctgggtcccagattcgggttttgttctatgtctgggtctgggtcaaggtcccgtgtttcgatcccgatttgtgtttgggtctgggtcggtattctggtctgggtctcagttcgtgtccatatcaaggtctgaatccaagtttaggtcaggatcgtcgttttagtccgagatcgagtcccgagttctagggctggattctggtctagttctcggtcccagtgcaggtctaggtcctgctcacagtcccagtcctattctagggtcttggtcacgttctcgttcaagtgtttttcggtgtttctcgggtcccccaagttcttctaggtccaggtcctggtctagcttcagctccttgtctaagttccaaatcaagacatcgagtattggtcttgtccaagccccggttctcttatcgcgaacaagatctggatcctaatcacgggtccctgtctggtttcggttcatgtcccatgtctcgatctgggtttgggtctaggttctagaccgagactaggttccagttcttggtctcgatcccagttttgggtcccgagtatcgttcaatgttcgtgtcagagttccggtatagattcgggtcttcagtcccggttcgtgtttggattcaggtgctggacccaatcccatagtgggtctatgtccgagtttggatcctggttctgttccaattttgggtctgggtctaggtcttggttctggtcctgtatttgggtcccgattatattctagtttcggttctagtttcaagtcacagggtacaggttcgattcgagtttgggtccgagtctgggtttggtcctgatttgggtctagagcgaggttcaagtcaaggtcccagtcctgttcctgttccgagatctcggtccgattccagttcaagtttcggttttggttcccgagtgcgggtctgggtcatggtatgtgtgtgggtcttagtttgagttcgagtttggattcgggttcaggtttaagtcctagatccagacaccgactacaggtcgggtccaagcatcgagtcccagatccccggtccggaggtgggtcctaggtccaggttggggtctggggtcgggtcccagatcccgatcctagtattgaggcccaatttttggtcctagttcggggcccaattcctaggtctgggtcccccatctatgttcgggtcttaggtcccggtctgggtcaaagttcgtgttccagttcaggttcgggtccagtcctagtccaggtcctagttaggggtcgggtacgagttgcggtcctagtcccagtttatgtccaaggtcgtagtctagttcttgggtcctgggtttggcctcagtttttgggtctgggtctgggtccaggcgcagtctcagtcttggtttaggtcccagtcacaggtcaccggtctgggtccaagtcccggtatgggttttggtttgagtttgggtttaggtttgggtcctgttatagtccaatgtctaggttctagtcccagtccttgttcgattccggttccgggtcttggatcgggttggccctgaaccttggacacgatctcaaacctagacttaaacctagacatggatctggatacgaacctggactcgaacccaaacctggatcgatacccagaccgagatcgaaacttgggacccggatccggaccgagacccagacccaaacctacacccgtactcggacccaaaccaagacccagaccggttccataattggacccagacccaactttggactcggaccaagattcagacaacgaagcagacccaaacgtgaaaaaaaacccggacacgaattcgatattggaactgcgactatgacccgacccaaacatggacccggacctagatgggggacatggactcgggcctccggacctaggacctggatctggactcgaactctagactcgaacccaaatctggacccagaccgagatcgaaaactcgaacccaaactcggactacgacttgaaccccgactgggtcctagacccagacaaggacctaggacccagacctggatggagaacctggacccgagacccaggcttcagaacaggcaccgagacctaggacctaacctcgaacacgggccctaaacaaggacccagactaggacttggaacccaaagtggaactagagtgggacgcgagactaggaccctaatctggaccccgggtttggactcgacccataatcgatgtttggatctgggacccatacccggagtcaaacccagacccggactcggacccaaacccggacccaggcccaaacctgtactatgtgacccgaaagtggaagcagaacatgaagcgaaccaggacccagtaacaagaccaagggactagtacccgatctcggtcccagaacttgaatctgacttggaaccagacccacacccagaccgggatgcggacccgaataaaaactcggatcgggaggactcaagacacgaacccaaacccagacacaaacttggacccagacccaaatgcaggaccaagatcgagattggagactcagacctagacctaggtccctgacctcgattggggacccaaacccaaaatttgaactagaatcaggacccaagactaggactgggactcaagactcgaccatggtctcggtccttgacatgaacccagacacggacacgaacatgtccgggacccaagatctgaatcagacttgaacccaaacaaggacctatacctagaccaggacttggacccagacccacacccgaaccttaaatcgtaccctgtgacccaaaat

SEQ ID NO: 23338 - DNA, 1884 bp, Cannabis sativa
agagagagagagagagacagagacagagacagagagagagagtgtagtgagaaaaggttgattttaggtttttctaacattaaccttaattaaaatccttatttaatttgactatttcaataaaatcaaaacctaatgctcatatatgacaaagaaagccttggcaaaaagacctttttgcccctcttaacttaatttaaaggttaataactcccaagggtaatttggtcatttccaaactccaaaaattttctgatacttccaatacctaacaatgataccccactacaaaaaacattctaaacaatataaaacgtgactctctaatggctcaacgtaacattccactgataccgagcttaaaatacagaaaataagaaattcatatatatgacataaatagcataatctgaaactatataaatctccacaaatacataaatcatgattagtaacttaatttcataattaaaccctaattattaaataattcatcatattaaaattaggtagtcttggtgaagtaatacgggaggaagaattcaagaccaaatggtatgatcaaacttgatctaaggaaggcttataatactttagagtgggatttttttggaagaaatgcttgcagccttgaactttccgaacaaatttattcagctcatcatggtttgtgtccgtacccccaagtttagtatcatgattaatggagcaattcacaagttctttgaagcaaagcaagggctccatcaaggatatctaatgtctgccttattgtttgttcttggtatggaatacttattaggaattctttcccgagtggggctcatggcagatttcaagtatcatgataggtgctctgaactaaaattgaatcacctctgctttgtggacgatgtacttttgttttgtcatggtgacttcaagtccatctacttcatgttacaaggtctcaagctattttcagctatttcgggtttatttcccaatgacctgaaatctacattatactgtagtggaatggaggaaggagaagtacagagaatattagatgcctcaagtttcagcaaaagtgatttaccattcaaatttctaggcattccgatatgtgctcgaagactttcagctttagaatgtgaaggcttgataaagaaaatggttttaaagattcggatatggggaacaaggaagctatattttgctggaagggtaacattgattaactcagtccttctttccatacattcatattgggcacaaataatgattttgccaaatatggtgttgaagaagataaatgccatttgtagagcttttttatggaaaggagaagctaaagcaaattttcctggttatgttgcttgggacaagatgtgcaattccaaatctgaaggaggcttggggttcagacatactttgcattggaatactgccgctttgggcaaatatgtgtgggcaattgcttcaaaacaagataatttatgggttcggtggatccatagagtctatataaaaggggttgattggtggagttaaaaaattcctgtaaatggaagctgacattggcgacaaatagcccaaatcaaagagaaatacaaagcaatgctgaacttttaacaatttactacaggatcttatagcatccaaaaaggattcatagctttaaacccggaagttaataaagtaccatggcatcgagacgtttggagccgctataatatacctaagcacaactttattacctagctggcagtccaaaattgtctacaaaccagagacaggttagtatcctttcaaatctgccaagattcagcatgtttattgtgtggtttagccatggaatcgatgagccatctgttctttaagtgtacatttagcagccattgt

SEQ ID NO: 23339 - DNA, 2461 bp, Cannabis sativa
  modified_base (618)..(620): a, c, t, g, unknown or other
tattatcaacaaaatgggaattctgatattgcttgcaattttggtggaactgctgttttaaccaaacataacccaagtaagctaatcttacctttttctttttgttattataattagatccaacgagatttactttttggggtttttattagatctatttttcaggtggttttctttaagtatataaataaagaaagaaaggagtatactatacttgtttgaacaattcttttgttttacttagaaaagtagttttttgatgatttcattaaaaaagaaagaaaaaaaaattactctcccacttataaaaaaaaatatgcaagaaagtgatatcttgttactttccatgaacatgaacaacttaataagatacacttaatgtttttttcctcaggtgaatactaaataataattagaatatcatgaccttcggatctaactttgttctctcctcattgaataaaagaaatatatcattattaagcattactacaagcaccagtggtgcttagtatctctagacatgttgccttactatgaggcacctataggccatggtgtctagcaccacgataaagtatcgccttataattagttagcgattttttataatatttnnnaaagtaaaataagtaggacccgatattaagttacactaatagcgatattacacttcataagagtgttaggtattgcgggtgtcctttagcatttttttacattaaactatataagacccaatacttattgaaccaatagcgatattgatatataagagggtgttagttacttctgatatcttttggcatttctcttttagtaatattatgttaagttataaataatgatttatcaaataaatgaggagaaagtgaaaaataactttttatttatatatttatacacacaaacactgatttagctttattatcaaatattacaggttatggaaaatgcaactatgcaggaccagggtatgttaatttttttttttttttgtcatgttaattgttttattttgaattatttttccttttttttttttgggtatatattataaaaagagattaatgaatgatgatgtgtttttcagatctgtaagctcaacctcagcaccctcacttttcattttgaagaactctcagagctttgtttggtggaaaattgcagggacacttctcttgcttttgtattttggaagataacatcctttggttatatatgccacttaggaaaaaagaacccaaaaaaaaaaaacaaatatgtatggatccaagcatatgatctgggtcattattagagattattatgatttttgtatttgggatttgctaacttattccttttataatacctttgctttaggtttaggaatctaatttaaatatagctattatatatgtctttgcaaatctcatctcaccttttcttttgttattttattttagtattattatctagtgctttattttgtgaagggattgtaataatgcaactctttctcctccttttatacattaatatatataggtaatagatttagtcctccttttaatacaaacagatgtagtaaagttttgccataataaatctagattatattattattaaattttattttgacaaaaaattagtttagtgtactatttagtactattttgaaaaatacatgattcaatttgtcatttattaaaacaaaaagtccaattaataatttttacaaaacacagtatctaaaatagtatataccttactcaaaaaaaaaaatagtatatacctggataataaatatcactaactagaagacactaaggtgttcatctgatttaatccataatattttgctcataatgtatccaatttaaactaagttcgggtttcatattttgaattagttactttttaatattgaactatttaatatttattaatattatttttttacataactgccaataaaataaaataaattattattatttcatgttagtaaattcaaagtaaaaaaaaaaattgtatatataaagaaatatttaattttattttagactatatttttcttataaataaaaataaaatatacatttgatctattatattttaaaatatatttattttatatatattagatttttaaattattatttttatattaaaatattatttaaaaatatatataaatatatcagttgcctatttttatatatcaataaatattcaatttgtacaagtataaattttaaacttgtgccaatattcccattttgtggatttgatattttataaacaccactagatcttgtagcaattagggttgtacaaaaaaaatcgtaaaccgcccaaaccgattaatcctcccaaactaaatcgaaaaaatcgataaaaattacaaaccgaaataacccgaaaaaattacaaaccgcccaatctgttaattgagcgggttgaaaataggtccaac

SEQ ID NO: 23340 - DNA, 5835 bp, Cannabis sativa
  modified_base (928)..(935): a, c, t, g, unknown or other
  modified_base (4639)..(4639): a, c, t, g, unknown or other
ttcacagagcagcgaatacctcccgctctcggcagtggaaggataacgggccggttctacctgggtccaccatggttcgctgggccgaccttaataggaccatttcttttttgttttttctcccatttcttttttgtattttttcattttaccaacattttcacaaatcaatatttctgactcccttttgtaagttaattaaaaaagaaaatagttctaaccaagttaattctacctatataatcataatattcattggaaaataagtcttttttttcacatatatgattactagaaagataattacaattaaaaatcaaacgagaaagaaattttctaactaagcgaatttatttttgataacaaatgtaaattacaaaagtcaagatacattttcagaaacacatgtatatgattaatttcaaaaataaaaaatcactcttagtatgaaaactcatttaatgaataatgtatgtacaacaatagtatgtatatgtaagaaaaagcaccacactattcttcaacatgaaaatcaaccccatccaatttgtacagtccaacaaaaagtggatatgaaagtatctaaaacaaaatagaaatagaacatgtatcacttaggggtgtttccggttcaggtggtgcggtttttaattattttttcaaaccaatccgcatatgtagttttttcaatttctcaaaccgcactcgtactgcgaaactaaaaaactacgaaaatcacaccgcaaaaaatggtgcggtacggtttatgtggtttttgcagtttgaactatcattaaataattaaactatcacaaatacaacaaagtttaagcaatacttgtcaaaaataccataagacttgaaaataaacatgaaaaaaaaaaagtttcaagtttcaacatgagcattcacatattggacctaaatnnnnnnnnaaattggtatttttataatatgtggtgcagaacggtttgaaacgaatattaaaaattccaaactgcaaaccgcgcagtttagaaaaaattcaaaccgcaaccgcactgcaaaaaattttaaaccacatttttattgcagtgtggtgtggtgtggtgcggacggtttaaacggtttgatgaacactctagtatcacagtaaatcaaatcaaattgaccatgcatcaattaatacaaaataaatatataatagcaaaaaaaaaaataattgtttgaacatattatcttttaagaaaacaaataaataaacggagtaataaattaaataacttataaagttttgtctatttatttggtaagagtatcaattttactccttttgtaaattattttagataatggtatacattataattttataattatattaggtatccttcttgttttctaaatttttttaataatttatagtgtcaatcttacatacaatcttattttattttaagcgtgcaattaattattttaaattttattttcgacaccataatatatccaaattatcttgaaaacagacaaaatatatactataactataacatatattatgtatatatatatatatataataccaatctaattttttaaaatacaaaaaataaaaaatactcctacaatagaaacaaaagtgatatcccacaattaatatataaaagaaaattatacatttgcaaataagcgatacgttttggcgtcaaggcttatttgtctaactgcagccactgcagcaatgacccccaaagctgagaaaacaactgcaattaagagattaagccaaaaaacaaagctttttttagaaggcttaaatgtcaagttgaagaacacaacgggtaatatgaagtcaagtggcatgaaaccaaatgccccaatcaaagcattgatgtccccgaaaaatgggagcatagccgatatggtggtcgctatcactactgatagcgaccgagtaattagtcttgggataacatttcgagcagcaaactctctactcgatgaatccccgaacactctctcaagaacttcatttgtaggctgcaaataaacctgtttatgccataaaaaaattaattaatatgttcctcataataatttttcatatttaaatgagtaaatactatttttgagcttatgttttgcaaaagttaccaattagacgctctgttttgttaaatgacaaaatagatcctgtattttttaaaattttacaaataggaccctgaactgattttttgtcaaaataaaaccaaataataatctgatctagagatgttatgacaaacctggttatattttttgtatctattcttattagaaaaagttagtcatattataaaataaaattgttgaaaattgaactcaaagttctatttttaccattttaaaaaatatagggtccattttatcatttaacaaaacagagagtccaatttgtaatttttacaaaacgtagagtttaaaatagtatttcccctatttaaattgttggattaattttttcattatccacttaatcaaaaaatgaccaaaaaaagttcgagttaccactccaacagctgataattgcattatggtgaagatgttggtcatgagaatgaaccattttgggaccaatggcttggccccatctaagaaattggtgaggattaggccctcagctcggttgccaaatgcccaataaccactgatagcaacactaaaaaaggtcacaatcaccactgtgtagcaaatacatagccctttgaacatttttcccttaactggtggtgctaatgttgcctgtcaaacaaattgttttattaggatacatttttccctttgatattacaatgatgctccttaacaattctctacatataatgttaaatttatgtcaaacctgaatttctgggatgataccatttccatatgttgtggaaatgatagcaatggcattgaagattccaaaaattttgttctctgtatcacctttgagagaataatcttttggctcctttgatgtttttcctaaacaataccaaaaatttccaaattcattagtttaataaatttcactagtgaggctaataataataagaagaagaagatataatcattattaccaatatgaatggaacctgcagcagcacaagcactataggcaaggcacaaaaccaaagagactaagttgatgtgtcttaaagaatgaaaagatgggatttgagccaaaatcaacatgaagcacccaaatatgatcacaaattcaaatagcttcatttccccatttgggtttgataacaagtaaattgtctgtccatttacaaaaaatgaaaataaattgatgtgatgatgtgaaaatgacaaattttttttttattgaaactcacaattcgagtcatgtgactgcacgaaattgatcggaaccctactaaaggctactactactcagtgatgtgttttaaccaattctgtgcagccacgtgaatcgagatgtgagttttgattgggaccaaagactttttattaggtaccttcatgcattgacctcctagaagagtagagccaacaacagcaccatagcaaaccataaattgaatagggccaacataataacgaccccatttaggccctgccatgacatatatatataataataatttgttagcaaaattactctattttttcatcacgaataataataacttcatctaattaactttgtttctcataataatctcatattctagttacttgaaattttaaattagtttatgtacaaatcactaaacaaatttctgtagtaaattcttctaagagattgttctggtaaattttttatttattttggtatctagaaaagttttttaatttagttttttttttctgattgcatatgttgtagttatttaaaactatttgtaaatttttataaaattttgaatagtttacagttattgaaaataatgtataaataattacttaccacaattataagaaaaaacaatcgcacatgtaacaaaatatgtaaattttattttcggtattgtaaattattcaaaattttctaaaaaatttataggtagtcctaaataactataacttacacgatcacgaaataaaaaattagcctaaaaaattctcctaaatagtgaaatagataggaggtttaccgaaacacctctttaagagagcatactatagatttaccctaaaaatatagactatgatgaaaagaaaaagggtttttacaccacatattgaaatttccaacttttttttcttttctattgtgcggtgatttttttttttcaaaaatattgtgtactctgcttagttttcactgttgtttaatgttactttttagttgttcgactgttgtttttgattgttatgttttgttactttgcaattacaaaaaaaagaccatttttagtgacaagtttttagccacaataaaaaaattacttgtgactaatatagtatttagatacaagttatcactaatttagtttagtcacaacaagtatcgtgactaaaaatatatttaatcacaacaaattgtgattttggtggccaatacttttagccacggtctttttagtcacaatgtaggaataataatttataattagttataacttttttactttcagtcacaagttttgttgtgactaanagtaagattttttgtagtggttgttttataaaaagtagtggtttttgtaaaaatttctgtatggtagtaaaattataaatttttatccaaactagtattttttataaaaactccagaagaatattacacaaaaaaaaaacaaaaaacatggcataaacatttttatgagaaaaatagtcactatttctaataaaaaaaaaacataatctataaatattttatatttttttggttaattaaaaaaaaagtaagcattaattgatgacgtgaaaagatgtgggcccaaagatgggccgtaaatggactgggcttactgaaaccccaagtccactggtcagcactgcgtactggttggtattggtctgggcaaaagttattatcactcgtatccaactgactttcatttatttatttgaaatcgactttcatttatttcacaccaccaaaatcaatagtatttccttttaaattaataataataataataataataaagaaaaagaaaaaattgaatgatacatatttttaatcttgtgtttaggaaattagatagatctaaataattccttaaacctaattttagttaaactattattgtttttaggttttttttatgggattataacaaactacatatacgtatataagttttttaatagaaactaaatttattatttttctcaccaatttcagtttcagtaataatcaaataaattaaagtgggtcaacatgaacacgatacgattttttattggtcgagttaagattaagaaaattaaacagaaatcaaaaataaattaatacacctaatacaaaatataaaaataaatcacataaaatataataacaataacacattttgtaacccttatatcttagagcaatgctcctctaatttatgtggtagtggtggtgccaatactaataaacacactatatgatgagtaacctgacaagtggctattcaatgatggtgaggtattaaaagctatttaatagagcagaagaccaagtgaagtaaagacatggttttagggagatttctagggagatatatataataatatatagtcatacacgttactctttagtgttataaatattgggatatgattttgttttgtaatggattttcacagaatgtatttcgtggtacattagatgagtttcagggtacattaaatgagtgtcagggt

SEQ ID NO: 23341 - DNA, 2508 bp, Cannabis sativa
ttgtaaaaaaaccacaaaaacaacgttagtaaattgacaataggtaagaaaaatttcaaagaaaatcctaaagtgctgaaggaattaatgttatttttcagactctgaaaaagagaaaatcaaaacgttcgaaaccgatcattgaagattcaaactgtgatttcgaacttgatgatgaagattttgagatacccaaagtgctgaaggtatttatgttatttttcagttgttttagatttttttttccacttttactgtaggtattttgagtttttttttctctgatttatgtcttttgctcattttaattttttattattgttatgttgttcgtattttttgtttcttattctatgtatgtatatatatatatatttatgttttctaactgtttattttgtagttgttctgacttgttcttttgagttagtttttttgttttttttaaaaagctgaatatacgttaacttaaatcaattatttattgcccttctcatctccatcatctttaaaattttcttaagcttttttttttttttttcagtttttttttcttcatttgtttgaaaaattgatccaaatttttttaattgtgattattattacttcttgctcttctcatttccatcatctttaaaattttcttcagtttcttaagcttctttttcaattttttattttttttgtttgtgcaagttcaatgtaagatatcaatttggtttttttttcatcactctttgattttcttaaattgtatatgttttgttgttctgtatgtgttattggtgtttagcattatatacttaatttttatgttttttagttaaactgaattattttttaatgtgtttaggttaagaaaaaaatttccaagctgaaggttttctctcgtgatgttatggaagtttctactgacaaaaaagtcttgaggttattattatttttttttgtgtgtgattttatttggttattatgtttttataattttagtgttatttaatagttgttttagttgatttttatattattattttatgattaaaatcttaaatactgacgttttgactgaaataatagttattttctgactgttatgtaattgattggtgttctaacagtatctgctgagaataatgacatttcttttattttgacctaaacacaatataaaagaataaaaatagaatagcgtcatcccaatatcaatatgtaaagatatataagttacccattttaatatgtaaagatatagaatatgatgtatgacttagtatacgcgtttaataaacggtcttcactcgtagattagatccttaattaattatttaaatcatataaagtggctctccttatatgatttactctcttaatatctcttatcgatcgtcattgtatagctactttatagttaggctcaaaactcaaaaggttactaaagttttgcaacatttatatttatatataattaaatactatgatactctatctttgtaaaaattatcgatggtacctctattttattataattaaataattcagattttagtatttttttttttttaaaaatgaaataaaaaaaatatattgagttcaatttttgtcatataaatttgaaaataatctaaacttattattgcaatagttatttttttttctcggttcgtaatataaattaatttttagttgaaaattaagttcaagatattattttataccaatttagaaatacaaggtcaaacaataagctactacaaaaaaatactatttttattgataatttttcaattataatataatttttctttaactaaatattatttttaatcacaataaatattatttgtcgttaaaaagtagtatttagatataatttactaattttattttaatcgcaacatattgtagctaaaactacattgagtaacaacaagttataatttttgtgactaatacttttagccacaaatttttttagtgataatataagaatgataatttatatttaatcacaatttttttttttttttacatttagtatataattttattataattaaaagtaaaatttttatagtagttcttatcaatagtttttacaaaaatataagattgaaaataataccaggactttctggtacacttacacctaccataatatatgtctctcatcgtggatttgattggaattttttaaattccttttgagaataaaattaattagttgaagaataattccgtggttatattgatttgaatctccaaggaaaaaaaaaactcatgtctccatctttggtgttagggtagagacactactgtcattgtatttaataatttcaattcaaagctggcttatttcgttttcaaacagttttttctttttggtacgcacagaagaaatttcaacttgtaaatatctttaaagaataactaagatagataattatataatattgctggttaattcgtattaacaaacaaaacacaccactcttaacaataaaaaagtat

SEQ ID NO: 23342 - DNA, 2017 bp, Cannabis sativa
atagattttaaaaaaagaaggtaaaataaaaataaaaaaaaaaagacaaatataaaaaggataaaaagggtatagagtataatttcctctaatacatatgtgttaatttcatgtatgtgaacttaatctctaaaacttaaattttagctcttaacccctaataaaacttacttgcacttaatctctaaaatttaaattttagcagtaaaattcttaaaattagaatacggttggtaatttacagtttttatctattttatgtgctaaagtgtcatgttaaactgtctatgtatacatctacgtgaacacagtgtatacatagcacaattttattagcccacgtaaaaaattaatttaaaattaaaaaaaaaattataagtgaaaatatattttttactaataaaaactgaaaaacaattaaacttaaaaataaatttagtttgaagtgtataaattgaaaatgataaaaatcttaattggaaatcctaattccttttctctttcttcctcactcgacacccaccctttctctcttctctctgtgtttgaccgccgcgctccgatcacccacgccacgagaggaccacacatcaccgtcctcaagcccaaaaaaccccaggggcacacgactcgagatcatggggttaatgcttccaggtgacagtgaagtcatttgtggcttccactttttctatggatggcaggagacacccttcatcgttgggccgagcttgacgctacaagagagaaagggtctgagagcgagagagggatcgaggaacatgagttcttggggttttgtggctcatggaggtcagccatggccttcattttggccttcgttggacgagggtggctccaccgagagagacagagagaaagagagtttcagcaagggtgaaaccggtgagaaggggagagagagatacaaagtttttggtttttctgatggttgtatgaagggaggtgtggtccgtttggaccaccggcgccgacaaaggctcatctctggtctggctgtagtaggtagaagagagggagaaagagatgagttagggtttttaaattaaggttttctaattttcattttatactatttttttcttttccattttattaaattaaatttctaatgtaaaaataaaatgccaactcacattttaggaccccaaattttttaatatcaattcaaaataataatacaatttcattcaaaataaatttttgtcaaaaataattattttcccaaattcattctatttatttttcaataaaaattaacatataatctctttaatttatttttttaatttaaaattatcaaaaactacatatatttttttagttacaatttttttaatttcaattttttttttaatttttaaataattttttacattaacaaataaaattgtgccatgtgtacactgtgtctacgtagatgtacacttgaacagtctaacttggcacttaacacataaaatagatggaaattgtaaattgctaacagtttcataattttggaggttttaccgccacaatttaagttttgagaattaagagtaagtaaagtgaaagtattgggggttatgccacaattatcccaatatatatcaatatgcttacatgtcgggccatgtaaatattaattttatttaaggttttttttttttagactttgataattaaagtggtatgattatttgaatgatttattttataaaagtaaactatatgtcagtgtatttggtaagtaaattataattatatctagaaacttataatatgtacattgttattaatagtaaaaagtacgttaatttcaatatatacatactcatatagaagttattcttaatgtaaataaataatatatgataagtcataactacatatgactttaacatttattctttatttttggaaaattcaaaggaacaatatatgtcttttctaaaatttaaagaaaatattatgtaatggaaaaaaaaaagtcatcttaaaatagaagaaaaga

SEQ ID NO: 23343 - DNA, 2621 bp, Cannabis sativa
  modified_base (1364)..(1364): a, c, t, g, unknown or other
aattacatggggtttatttaattttcacatttttaattaattactaacttatatattagtggactagcaagtgtcactactttatggtcacttttctcagcttcaatggtaatatattgaccttatctaatcccctaatgtccaaggttagtagaaaaagttaaattatcctaagcataattaaaaaagcaaattagggatgggtttagtactatattaagcaaattgttattttacaagcatgtcttagtttaaaattagatttattataacactaattgttatatatacgatggattgatgtatgatatatatggttaattagaataaattgacaaatattagttggtaactatcacaaaatttatgattgatgaatgattacattttacatctaagataatgacattctactcactacatcaatatgtatataatacatttcaatcttatatatattgagaagatttatgtatatatgatgatttaaaccatattattattaatttatatattttaataaatctttgaaaaaatattaactattgatatgtttaaattaatcgtgatttgctttaaaaaataattatagtttcacattttccacataaaaagaaaatcttaaatttgaattcttgtctccgattagggtcgactctagattaagacggactaagttcgtatctagaactcatgcaatctaaggacccaaatgaataaaaagtccttttaaaaatatatatatttattttaatatattttttaaaaatactaaggcccaaaaaatttattttttttaagatctaatacaactcaggaccggccctgatcccgatatcaggaaaaaaaataataatattaaacatgacatttttttttccttttactaatataattgttatataaattccgaacaaaaatttgcaaacattcaaaattggatgaaagtaaatcttggttttagtaattaactttaaatattttttcgtcaaaatttaatattaaatatttaaatactataaacaataattgttgtaatattcaaccattacactttttttttttcattttcttttgattaaatgatattaattgatatataaatcctaaataaaaatttacaaaaatctaaaatcaccatcttttctacttgggtgaaagtaaattttaatagtggtataatgatatttgtagatgtagtcaatcgaaattgattattgtgtactgatttcttgaaactcttcaagtttagcatttttattataattttgcttattataaggtaagtttttttttaataagaaattttatcttatttttatacacaagaaaataatgcttaatgaaaataataataataatantaaataaataaataaaaactttatttgaaggactagcctttttttccaaatgattttgataaacctagtttttttttctcttttagatagtttcctttacacaatataatactccatttcttcttctttttatttatttatttatttatttgatgaaccttcttttgagtttcttattctcactacaatttcaaaatttgttttgacaaattaatctacattttgtatattaccattcaactttagtactattcatatctacattaattttagttctcttttataatatctttaagctcatttcgtatattcaattttattgaaatttgaaaattctatactttataataatcattttttattctataatttaaaatcataccatatttaatattttaaacttaaatttcataactaataaaattattcttaattatatgagattcaaattcaaatttaattatattatactatcaaatttgagcaatatgtaccatttcaaattatataaaatatacgatataaaaatattattaaaattatattgataaaacacattaataagtattaattaattattttatttatttatttatttgggatattttggaaaattaaaaaatttatttaaatacataataaagtggagcccacaagtcagaataattgatgagtgtggatgatccagttggcaaaacttggagcgcaggattaaagccgtaagcatttggaatctctctgtactttcgttgccacgtcatcaactgtcttttgtggataatctcgacacgtgtcctattgggacccaactcactactttaactaattattttacttgtatctataatattacttttagcattacttcagggtattattaaatgtgtaatttcatgtaattttaagaaataatttttaaaaaatattactaactaattagaggatgccacttaagaccgaccgtaagattgaatgagtcttcgaacaaataaaattattagatcctttatttaaaaaaaatatatggtattttcagagaatgctaaaaacatatatatgtttttaaggaaaaatatttttttggtcccttgactaagtgggttctaggcactagtctagtctgtcttagcatatgcccgatcttaatgccacctatagaaggtgctagacagtattaatgcccaataacaatgctcattgagtattagtggtgcatatcaatgctcatagatgacgtcttatgattgattaacgata

SEQ ID NO: 23344 - DNA, 3400 bp, Cannabis sativa
tggtacaatgtttaaaaaaagaggtaaaaatgatactttaaaaaagagggtaaaaaagaaagaggacaatatgaaaaaagtatagagtgtaatttcctccattttcaatatatagtgaaagcccaaaaatctaattcgttttatgcccatatattctaaaaaaaaaaaaaccaatcttatatatatagtttgactaataatattttcatgtgtatgttttcaaggtatcgaagtgtacataaagaataaatttcactttgatctctcaatcttctcagatatcttagctagctctaaatttcatgatctctctggatcatattgttgcttattattcatgtgtgaagtaatataataagatagagattttgaatttttgacgttgtttctgaattttttttatttttttagcacatgctgttgaaataaccataaagaatgatgggttaagaaatttaatatcaaattttacatattttattttaactatagtaacaactactgtagaagggtatgcagtttttttaactatattgaatgggtcagactttagttaaggcagattaagtccgtgtctaaattcacccaagctctaacattatttggaactgttgacattttcttcatctgtagatagttggatcactcccctaatgtttgtcttgtttgattttatgaattaatgtagaatttattgtttggtataattcatagaacaaaaaatattgggatttacagttttaactaactattaagttagttaaatgctacaatattggttttgttatgttagttgaaaatgttgtagcattcaacttagttggttttaagtgcacttgaaagaattatgtaagtcttttgccttgtaatgtaagaaacaattcatactgaaagaatgttgaattgagagagtgtaagatcgagtgggagagagactttgtaagagtacaaatcaaagagaagagagttagaaaactgaaccaagatcaatgttcttgaagctgaactcgagctaagtttcaggggtattctttttgtaatctttctctagagtgcactcaacctttcaagcattataattccttacattaatgaagaagaaaactcaacagagtaacagaaagtaggttcttaatttggtataaaattcttgtgtcttattcatttatttttccagcatttttaatctgtgttttaatttttggttcttttgttaatttgatcatttatatttggattgattttaacttgttgtgtactggttcttggttaagttctatgttctgagtttaaaacatgcataaatacatgttttcacatttatgtagattgaattgaatattttatgaacacgtctctcaataaaacattaagcaaaacaagaacaaaaatagcaacagttaaattttgcagcagaagattcctttcaatattttattcactctgaatcaaatacaagcccaattacaaaaccttactcccgtaggccgtaccgtatagcagactaaagttttgcataaaaaaaaggccactcccttaaaacggcatatgtatgagcccgagctaatatcaatacgataaaataacactaatatcttcacttcaaaaaaaaaaaaacaattaatcagaaatttgaataaccaacgagtttgatctattccgagaaccaactaccaagggtgtcactttgaagctgtgagaagtagcagtggagaaaaaagagttcttgaattgagctggatgagcaactctgacttgataatctccatggaaaagggaagcatcgtaaaagccaaaagcattagcttggccagttacgacgtcgtttaggaaaccccactcggccattaacttgtccacaacatcaccggttggcaagtttttgaaattgttatcagtcaaacacattgcccaacacccctgaggatgccacgatgcccacattactattcctttgatcccagggtgagagaataactcccttagaatatcgtccaagtactttgcctacaaatacaattgtacaaaatcaccattcttattaattcatcatcataattaatataaaaatttgttaataatcgtaatgttccatctcaaaattaattggtaatgagtggagtagtccatattcttatatatgacttaataatttattatttttattccatgtgggacaatgtccaaaatattgctattttttgctcatcaatcttgaaccgtatgagagagaacatagtaattatctgtataagtgcggatcggataataattatctgtataggtgcagatcggataagatcacttgcctgcaagggagatgactctcgtaccatgttgagaatcatagggttccatctcaaaaccaattagtgataagtgtagtggcccatattcttatatatatatggctgaatactttactatttagataatatccacaataaaatgtagatagtggccaatatatttatgattaaaaagttgttttaatttgagatagtaagaagtgtaagacaatacctgattggaattgcttttaacgtccaattcagtgatccaaacgggtaatccagtagcagcaagaacatcaatggaagatctaatataagcaagattaggaacatcaaagtgggactcaagcccaatccccaatttcccattagcattaccaggaaagctttgtatttccttcaatttcttaaggtactgagttggattggccaaagaatcaccagggctctctatagtgttatactcattcaaaaacataatggtactcgaatcagccccaaaagccaaattataaaactcagccgaagcattaccatttctaagctgtgtctcaaaaaacttattgtgcaaattctcgttgaccacatcccacgcaatgacttgacctttgtactttcccataactgagttgagcctcttagtggctgcagagtagagttgttggcccgaaagtgatttcacccaatatggctggtattgagggtcgtcccatacaacgttgtggcctcggacagagatttgttgtcctttggcgaaactgagcatttggtcggatatagaatagtcctctttgccttgggttggttcattactgtaccacttcatttcgtcctcgaatgtggttacggtgaatttctttgatgtgaaccagcttttgtaagctgggttggttaagatgagcttgttgattgcgcacccaaatgggaaattgggtttgtttcgttcaatcaagattgtggcgttttgtattggattgcctcttctgtccactactctgattctaacgttactcttccgtacctgaccaatgacaattattattattatttttttttttttgagaaaagatgaaaacttgaataagcaatcaaatggttcatcatta

SEQ ID NO: 23345 - DNA, 7757 bp, Cannabis sativa
  modified_base (7502)..(7504): a, c, t, g, unknown or other
tgatcgtttgtgcgaccatacatggttattttgctactaaaaattttgtaaaattatttggctaataaaattttacataaatgctatttttacaaaacactcgcaacatacatctgttttatttgcggaaagtatatattttgtatcatacatactagttactatctaatggatggagattaagggaatcatagttttagtaatttcaagtagttttagaggaaattacattgtatacctattttattttacctgtttcaatttttatttttatttttatttttatattttgttaagatatacctacttttatagatgatgtttttataagtagaaagtgaaggtaaatcggacaactcacttaaaaagatgggtacattttaatgaaaattgattaacggttacaaaaagagatatttttcaacatgtagttttattgtcaaaattaattattggtaccagctgattacaatcgtaaactttgagtagttatcttgcaaatatccctatatgttactatttgttttttattttaatttgttatcatttttggaaaatatctaaaatcaaccatggcatcattataagaccatctcaaagatgtaaaatttgtgtcattcaggttagacaatagttaatattgggcctaatttttataactgtgtttggaaaataaagaaactatttatttttattgcaaaaagaaatatatattcacatgaataaataagaagtgaaaaatcttccaattaataaaaaattaattagtagcaaataaataactgaaaaaaataatgttattcgtcctgaactttccgagcccacgtggcttcaaaggcttggtttattcgagagcaagatacttttcaaataaatcttttgaaatttattatgataaattttatttgtgttatattttgtgtcaaatttaatataatttaataatattattaaagtcatattttttaaataagctaaaaatatagcaatgcatgcaccacttttgtagtcttctattgaagatgctataagtttatcatatttatcaaactatgaaaaagaaaaatattttattttacaaagatattgaggacataaatagttaagttcatccatgtgttccacttaaatatttaagtgatgattgcttcttattttctttaaataaaaatgattgagttataactgtatgagttgaaaattaagcacatggttggttctcatatcaccctgtcttattatccaacatgctctcatttagaactttttctataaagaataatcatcttctaatatattccatcaaaataaacaaatcttatactattattagcatgacaaagttgaaaggtcatagtggggtggaatgatatttttgcaaacatcattcctttttccatattcaaaagtagaaaaaagaggaaatatacttgtagagtagaaccttcaaaggtcaaaaagttttggaaatgtatgttagtagaacctattaaaacgttgttttggcaaattatttatctattccaaaagaatgttttagtctatttcttttatataattgcatatgttataaatatataagatcactcataaattttttaaaaaaatcgaagtagtttacaatattaaaaataaaatttaaacaattatttactgtgtataagataaatagtcgcacatgcaataacaaatataaatcttatttttgccattgtaagttattaaaaaaaattaaaaatttataagtaattctaaatagctacattgtatgcgttcattaaaaaaaaacttaaaagataaaagatttactgaaacataaaagagattcactataaacttacccaaaagtttttattataacttaccaaattcaaattctctatcaaggaatttggtgtaaaatttggattatattactacttttctttcttcttttgtatgctcattttaatttaaaccccaaatggaatataagataaagcttttgaaaaagagtagttttattcctaactctcaaagctctcaccagaaactaatgcacttttctttttcttatgtttcaaaaatctcatttaaaataagaaaataaagcaagaaaacaactttgttttggttcaaaaatttccctccaatttcttcctttcattcaaaatgggaattttcccacattttcagagaaagtaatgaacacaaaaaacacattaaattacagagaaaaaaagagacctttaactcagagcaacctgatgtaccaatagatttacctgactcaactctatctaaatggggaccatgttggtaaaaaaaaaactaaactttagtgcatttactggagaataacaacattttgaggcaaaatgaagtatgatatttcaccagatggtgttaaaaaaaaatagtaaaaataggcaaaaaaaaatgcctactcagtgtctgtgccagctcttggctctggtttcgggctttcagcattgtttccaacatgcgtttggctttcgttatcaagccgtcgcacattttctaccatcttaacaacatcaccaattttggggcgttgatcgggcatccttacaacacaagacatggcaatttgtaacatttcaaccatttcttcctctatgttcgggtacctcattagctcgatatcaaacacttcatcagtccattcctctcggacaactgaatgaacccacctaaccaagggaataatctcatcaccagcagtagtatggattggcgatttaccagtgagaatctctagcaaaactacaccgaagctgtagacatcagaagattgtgatgcttttctagtgtcagttacttctggtgctcggtaaccagcagcacgagaaattggtggcgctaatgaactcattatgctcgctaaaccagcatctgaaacacaaccatactgtcgcgtattgagaaaaatattcgaggctttgatgtttccatgaacaagcttcccaccattttctgcgtgtatacgtgcaatgcctcttgcagcaccgatagcgattctaagccgggtatcccagtctaaaggaactctatcttcacctcttttacctgaacaaacacagtatcatatgtctaagcacatcacaagctaaaatttattcagataaacacaacttgaacacttatctaaatctgaaggaagaaaagccttaatggtttgtatatgtttatgaattactacttgccttttccactgtttcttttaggaagcgtttagaaagttatgatatgtagttgcatctttgtttgaccgtgtaattacacagaaattatgtaattgaagataattgagaggtttcaattacactctctaattcttatgcctcggacgataattaggtaattaaactttctattctaaatattattatttttgttgtaattactaactattttgctggacaaaacattatgaattcatatgtaaatatcatcagagtaattacatcctaacttccaaacacaccctaaagcaatccttgtcctagtccaaatctcagattatgaattcataattacacaaaattctatatctatatctatatatttcataacaaactcatacaaagcaacgaattgctattcataaccacaaaaacagattatgcaattttagagaaatgaaagacaaaattaaaaacaaaacacataccatgtaaaatagcagagaggcttccctgagtaaaatactcataaagcatgagcttttcttctttagaataataataagccttaagctcaacaacattttcatgcctaatattcccaacaagctccatctgttgctcgaattcgcgcttcccaacattcacatccttcaatctcttcacaactattgtagctgcatcttctagtattgctctataagcagtaccaaaagtccctttaccaagtacttcagcagaagctctcaacaaatcttccaaatcaaatgcataattacaaccctcaaagaaaaccaatctgttattagcatcttgactccttgaaatcactttctcaggagacatatttcccttattcaatttcccaccagaaatcccatcttcttcatctcttttcttcttcctccttgagaagaaaacaagtattagaaaagcaaaagccacaagccccaaaacaccaccagctactataattcccaacaatgctgtttcacctagtttcttaccactactcttggacttagaaaatggtactaaagatggtgtaataacaggtgaaatcttaggtggggtggagcttgggaatgaaatgttgttaccaatgaaaacagactttggaaacttttcaagtgatttaggcaaagtaccattcaagttattgtttgacaaattcaactgttgtagtttaggaagattgagattaggaataaccccagaaagtgagttgttagctagatttaaactagccaactgagttaaatttgagagagagtttgggatactaccattgaaaccattatgtgaaaggttaataattgtgaggtttttccaaactgagaaatccaatggtaatgacccagagaaattgttgaactgaaggtaaagaaaagacaagttttttagattagtgaaatcagaagggaaatgcccatttaaacgattagatctaagactcaaaatctgaagacctgaaagacgactgagtgtattgggaggaatctgaccgtcaaatccaactccaggtaatctaacggctacaactctagtcttgtcatcattacataacacaccagtccaatggtcacaaactggagaagtttcattccaattaagagaacgagaatgaggaagttggtttacaaaatcaagtaaagcttgtttatcttcaaaagggtcagcttctcctaacaagaaaagaaaacccagaagaaaaaaacaacaagagattaagcttaaaccctccatttgagaaaaacaaacaacccacttcttcttcttctaactcttcatgacccttcttagctgaaacaaaaatagcaggtgggtaataataaagatgagatttttaaaactgaaaaagaaaaagaaataatctttaagattccaagataaatgtcgaggaaagcagagagaagactctgagaaaaaataagaaaaatgacataaaaatttgagcttggtttgcaggggaggctttgaatattgggttttttattgttatatagtcaaaaagggtatttttttattaagttaaaattgaaaaaaagaaaaaacacagtgtcatgagcttctttttgttctttactgtttgtttttgtttaataaactaattttaaattgggttaaaaaatcattggaagcgaaaaacaaaggttattaagcttttattaacataacactcaccagcaaaattgacactgtttttcagatctagaaccactaaataaagatccaaactttgtgaccaaaactgaaaaaccactcaaaataacactgcatttgagaatgggaatgagaaagagagagagtctagaagcacaaggtggaaaatgctattatgtggggttattagatagactcatagtcataataagtgttattaatacacaaaaaaaaaagtgggataatatgtattattttcaaattcaaggtacttgttatgatttctctaaattgatggtgcttagctaaagtggtatccaacgtgaaatgacctgaaatggtaatcattcaagcaaattatagcctctaaaacaaacacatcaatatatactctatagaaaaattttagaatgcacttggtgtaccaatacattcttatttattttggtatttagattaaaaatatagttttttttcttataatcgttgttgtagttatttaagacatcctgtaaaattttgagaaatttaaaaaaatttaacacgttaaaaatagggtacaaagagtttgttacacatgtgatttttttattttatacacgtgtgaaatagatagtttggacattaaaatttacattgtaaattattctgaatttttcaaaattttgcaggatgtcttaaataattataacgtacacgactataaaaaaattggactaaaaaattcttatagatgccgaaatagtaggggttgtaccaattaatacactcattttagtaggatgcattcatatatgttgtagttatttaagacatcttgtaaaattttgaaaaattcagaaaaaattaacacgccgaaaatagggttcaaaaaatttgttacatgtgtgacttttttattttatacgtgtgtgaaatagatggtttgaacattgaattctacaatgtagattattctgaatttctcaaattttgtaggatttcttaaataactataacatacacgattataaaaaaaattagactaacaaattcttctaaataccgaaaccgttagggattgtaccaatacacttattattctatacgtaaactggtaattctaaagaattttgtagtctatttcttaaaaaatattacatacattgcagttatttagaatagtttataaactttagagcacacacatcacattaaatactctaaaatagagaagctttaaaatgtttaaagaaccaaattaaaaatatattacagaatattatagattgcaattatttagaatagtttatactctatgttttaaactctttcttcattttaaaatttactattcatgttctacatttacagaatattattcattgcactaaacatattttattaattgttttaagtttgaataattctttttatatggggatatgtgtatatattaatattatatatttgaaatgaaaaaaaaaaatataataaaatttgaaaaaaattgagcttttgtgatgtatttttaaaaaattaatgtatagtgtaaagtaaatataaggtaaaacagaaaaattgagattttggtgatgagtggaaaagctgatgagagtacttttaaaaaatttgagtaatttcattgttataaataattttttttaaaagagccacaaataaaaaaaaatattttattatacgcgtcgctatttttaaattttattttatgcaatataaattattcaaaatttacagacaatcttaataaataacaatttacccaatcattaaaaagaaaacaaaaaataaatcaaaaagctattatgaatgcaatatactttataattctttgatgcttggtagatggcttattagattcttagttgaggttgttattaaattttcttttcttttataataaagagcttgataagcctactattgttgattttactttttgaagtttatatttggtgtgatttacatattagagcatactcaattaaacaaggagtgagcttaaaaaaaatgagctccaacatataaagaaataactccttataatatagaatagatatgaaattacttactttttttaataatattttaattaaaagtactattattttattacattaatttatatttattaaatttaaattataaaatatnnntaaaataattaaatactaactaaaatagttaataagcagaacaaaaataataaaaatgattttttattttaactttttagcttaaaaatagggagtaacattagagatactcttaatgataaaatacattagaagtaatgaaatgaaatgaattgaatggaaataatttttattttatttatttatttgattacattttaaagtattaaaatgtcattttaataaaataattttctattattttgcaatgcaa

SEQ ID NO: 23346 - DNA, 6110 bp, Cannabis sativa
tttttctttttaaattaaatacatgtgtactttgagaaaacaaaatattatattaaatacatagagagtgaaattgaacaagagattaggtttcatttgtttccaattgttgtcgttttcttctttcacatttttatatgttgttgtggtatattactatattatgatgtatgtcgttttacagggctaacatcgttttagattattgttatgtattttgttgcttaaatgacaggagttatattgaattattgtcgtttttgcgattaaaattggttttgtagtttttgtttctttatttcttgattaaacttctgaaatggtgatagcctgagtggacatcattattttaaaaatgaattttgttttagtttgacttctaattttcagattattattgttttagtctactttgctcttttttttttctttgtagttgtcttttaaattcttcattaatctctgaattggcggtgaactattgaagttggaaaacaagttattgattgtttttttgacttctttgagttgttatcttatttttttctagaacttctacaacgttgacttagaattttaagtggtgttattttaagattgttgttattgtcgtttttgtttattactctattttcttgtcacttctaggcacccaacactcacacagccaaaaattgtgaaaaaaaaatatttgtatataaataaaatattaaataataagataatataccaaatattgcttagtgtagtagtgaagagggtggtttaaatttcagttaaggaatcaattttcaacttacatttttatattttttagttaactgctcactaatctatatatgaaatgatgctttaagaatagtcaaaaatattttttttacgtattttataattaccacaattctcatttattttaatttgattcctatttttagatggtcgacgtcgtcgtttctccaccttgttcaagacggtgccgttttcccaaatcaaagagtcatgttgagaggcgtaagtaataagtaatgtattctaaatcaatcaacgtacctacaatatgtcatcataataatgatcttgtaagctaagacaccccagctgtttcatcaatgcttctcatcttattttttgtatacaatatacatatatgtacataaattcaaatacaatcttagcttaggttcattactcttgctacatggtattattggtaggtatctttgtttcaactccaagccttccttaacaaactagcatttgctttaattacacaattgcccaagcttagtcacactaaattttcctctgtttcagacttttcaggggcaatgtaataaaattaacaaattaagagtgacgattcttagtgttcatgttacgaaaccatcattatcagttagtatagtactaacaattatgacattcccacatatatatggtatgcttgcccatgttactatactactacatatatataagtaattaattgaagacacaattacagagaaaataagagtaacttgataagacaaatataattaaggtaaaacagagaaaactaagagttagaaatggggcctaagaacacattcacaatcttggtgttggtcattttgggagctttgatgggaaatgaagttgaggcaggtcaacatgttgttggtggcagccaaggatgggagcaatccacagattttgactcatgggcttctgctcaaacattcaaggttggagaccaacttggtatgttcattaactctatcctcttcatcaaactttatattttactttttctagcagttgggggatctctttttcttttattttctttaacattagtcatgaagctcccccaaatgatagaaaaatgtttaaaattttatttgaattttattttattttttaaataaaaaacaaatttttagaattttgccccaaaccctataaaactatagatgaccctgtatagtgtatagtactatcatgatcatgtttggttagaattttttaatttttaggaagatcttctcaagcaaagtattaaagttgagttatgttaaaaattactttttagaatcaaaaattgaaattatttggttaccaaaggaaaagtgtttttggaacttcaaaagcttaaaattgaaatattttttagaactaaaaattgaaactacttaaacttgtttgtgttaaataattttttttttaaagaaaaatgtacgaaagctgagttaagttaaaaatactttttacagttagaaactgaaactaattggttactaaaccaacaataaaaatgttttcagaacttcacaagcttaaaagtagcttttaaaagtccagccaactattacttattattagtatagttataattgtgtttagtttagttttctgattttgaattttttaattgtatgaacaataattaactttgatagtagattacatttctctagactaggtcccatgaacaattaactttgtcagtagatttgttaagtaactaagccaacatcttcatacattatttttatggggacagttttcaaatattcatctggacttcatagcgtggtggaattggccgatgaaaaggcttacaagcaatgtgacactgggagttcactagactctaaaagtagtgggaatgatgttgtgaaattgaccaagcctggaaccagatactttgcttgtggtactttaggccattgtgatcaaggaatgaagctcaaaattacaacagtcgccggaaatgcaccttcaacgccaacatccccctcgtcgtcatcttcatcgtcatcatcttctccttcgtctacttctactactacttcaacttccacatcttcttctacaaaatctctttcttctttggctgcaatttttgctgtggtggccacccttttctgctttatgttttgaacatatttgttgcatatgtaatatgatttgaattaatatttttttgtatgattatatgaatacatgtatttgtgatgttaatgagggagaaaataaagttgagaatcagagaatgtaaccttttatgttttattattattattatttttgttacaatttatgataaatttattggtgctatatattcattataatttgttctataaatattaatggaataatgatttgtacacccttaaattataaaaaatgttaaggggtatttatggtgcctgacacctttatgatgtgtaatattgctatagtgcaacttaatattgggtttcacttactttacttttatgaatattataaaaaaaatcgctaaataattatacgacaacactcgtaatgttaagcaccataggtacctcatagcaatgttttttgtggtatgtaattcatataaaacaaattttggcacgaactttctattcttggcaacttggttaggaagttagttgaaagttgttaggctcgattttgtgagctgttttctaacctatttaaataccaattgttatatcatttgtaagtaagagagagttcatgtgagtgagagagaaatcagaatagagagtatagttgaagagagtcaaagaagaagtcatttgaaggagaagaaccatggtactcatggtgtctcaatattgctcgatcatggtgttttgagagcttatatctctctgtgtgtatctctcattgaagaactcttaattggtgttagtaaacgacattacatagtggagaaactccttgggggagaactggaatatgactcacattgagatctgaaccaggataaatttcttgtctcaactttttatttttctctatttttatgctttgattttgtttaatttttgtgcattttgttttttggttttgtcatctggcctgtgtgcaatgcaatgtgtttgtgtgtgttgagattgtgttgtagggatttataacactcttaaattatacgagcattgttattaggtaccagtggtgcttagtacctctagatatgtcgttttgtgattgggggtagcaatacaccctaaaagttattacattaaactatacggaacccaatattaagtgtaactaatagcaatattgacacataagaaaatacaaaataccatttgcatcttttagtatttctcaaattacacgcacttgtaattaattttaatgggtccctactagaaaatataaattgaaaaacaaatgcactaatgactatattaaatcttgaattatacaccttttccaaatatgttaagatttagaaataaatttgagataagttaaaaattactttttttttattatatattaattaaatataattttaatccataaataccctcttttataattaagtatcaaataaatctcacataacttatcaaaattagagtcacacataatagaaatatgacctataaaactagatataaattaaagagtaataaaataaaaataaaagtagatttacaatttaattttctcaatatattttgtttgaaaaaaaataaattttaattctcttaataaaatatacaagtaaataaaaataggaagcttactcaatatacaaccccctttttgttcaataaattagaaattttattctccgaatttaacatgtactaaattttattctgtaaactttttaaggagtttagtttttttttttaattattgagattgttgaatttaaggacttttgtccaatttcgttcaattttactaacaagagattgtctatgtatataccaaattgtactccgacttttaatatatatcaaatcgtaccctttgaactttgatatatatcaaatcgtatctcttgaatttttattcacattagccgcctattagtaaaactgaataaaagtctttaaatacaataatttcaatagtttaagagtgaatagtttaaaaaattaaatacaatttaatacatatcaaatttaagggaataaaagttttaattagttagaaaaaaaaaacatccttaaaagtcaaaatcattgttataatattatgaatcttcaaatcaattaaattagagcattgttattgggcatcactaatgcctagcacattttagacatgtcatcttaaattatatgagacttgatacttgattgcattaataataatattgacaagtagaaggatgttagacaccactaatatcttttagcatttcttgttaaattagcaccaacacttaaaattggagaatttaatatgattttctttgatacatattaataactttcacgtggtttaaattaaggtactattaggttcattatccaataataataataaaagactaaagtctaaaggttatgaagataatgcttaaataataatgtataaaattggaatctagtcaacagtctcaacatatcaatctcatctcatgcataatattctatcttaaaatttagtgaaatgctaaggtatccaaacactattcgttatttttcattacaaaaaacacacactattcgttatttctataattgtatattaaatttcattttaataaaaaaatataaaaaattaataatcactcataatgcattaagcataataaaatacttaatgacaaaatagaaattttacggtaaaagttttcaaaaaattcaatttgatacagataagttttcaatctcgaaaaatagctcaaggtcatgttttttatttatccgttagtcctaattttaaatgagttgtttactttttaaaattgtcacgtgttaaaatattattggtctaaattattattttaattttaaaaaataaaaataaataaattattttaaaataatttcttttttcttaatagttattttgaaatcttcaattaatcttaatagttaattaaattattttgaaatctttatatcaaacaatcctaaatataatataatcaccctaaattactcatacacatggaatagtttgagatgtttttggtaaacatcaaatattcatttttagggggtggatcatacaatttcccaatattatataggctagttagttagtaattttttcccccaaactttgacatgtactaaatcgtgtccttgaacttttttggctgttagaaattcgcccgaactattgagatt

SEQ ID NO: 23347 - DNA, 2500 bp, Cannabis sativa
ttatggaatgaattttaattggtttgacttattattgagataagtaattttatatttggttattatgttagtttttatttgtacttaagataattgtagctctatatttaattaattactataaaaaataaagttagaaaaataatcaattattttgttttggttattaataacatattttaaatattattttttattagtttcaaattaatgttttaattgttatcaacacttttgtatttattttttactctacacttttatgcttttatatagttattcaaagatatttttataggcttttttcttttcaaatacccttttaatcattttccaataatagtgtcaacttcaatttgttgtgtttagaatttcactataatgtcttgtttttcttcttattttttatgtatcattttatagtgtatcgttttttattctattatttcacttttttatgaatttcaatatattattttttttcaatgcaatatttgaaaataactcatttttaatattttctctttataaggttctcaaaaattttgagacaggcgtagataaagatattggttcaggatataatccctatgaattcacaatctacacatcatttcaagaaagagcaacatttgtatcacaccgaaacacagccaaaatcgcattcaaatatggtgacacaaaacttgcccaaatatgtggcgtaatagcccgtgacgagaaacaacacgaaactgcttacaccaaaatagcatcgaagctcttcgagctcgatccaaacgacatggttttggcatttgcacaaatcataaaggaaaggatcacaatgcctggtcacctaatgtatgatggcactgacccaaatctctttgatcacttcaccaacactgcctcacgtattggggtttatactgtgactgagtatagagaaatattggaacatttggtggccaaatggaatgttgaaaagcttattgggctttctagtgagggaagacaggcccaagagtatctttgtgggctggcccagagacttaagaggattgaagaaatggtgaagagtaaggcccaaaagaattcttcttctttgattcatgtaagttgggtttttgatcgagaaagaatggttcaagtttgatgtgatggagttgtttttggacattattatgtatattgtgtgtagtaaaatttagggtgtgttggattaaaatctttagtatggactcatatatattagtgtgtatgaataaagtgattattttagtaattgtgagttattaggtattaaagtattatggactaaatatataaatacattaaatgatatttttaatttattgaatagttaaattagaaatattaaaaactaaaacttattagtttatgtattggtagtagtctacaagaaataagagctactctattctcttctgcccttgttaagagaaaaatcatatgtcttgtattagtggaagattattacctaaaagattatcaccacaaagatcgtctctatcaatgaataaatatacacatatactatttggttcttcttctctttgagtgatcaagagttttctttagacttatatttatatactcatggttatatgtaacatgtttgtacatgaaattacattttgatattgtatattttatgagtgataaaaataattctaacatgttgtttatatgatgcactctaaaaaataggtttgggtccaaagtttgaggtaggggttaggattagggtttcgggtttcggtttcgatcgaggggttagggtcgagatcggggttggggttggggtcgggtttcgagtctaaggtcagggtcggggttcagaccaaagtcaaggttttgaggtctgggaccaaggtctaagtctgacgtcaaggtctgggtcaagtcctggtcttgggtcgagttcggggtttagggccagggtcaggatcagggtctacgctggggttgaggtttggttgatggttaagtcactaccaaacatagtattgtattgaataatactatacaatacaatataacttaacacaatacaatataatacatcataatacggggtaccaaataaaccctaattaattataatatggagtttaatttaagctttcacttaaatataaaactgatggttttaatgggggttgggcgagagagagattatcttccctattaatgatagaattcatcttcaaatttacgagttgtattttgaaaatagtgaaaattattagcataaaattttaacatgtaccaagtataataaactcaaatttttctatttataaccacctaagacttaggtgagatgcatgtgtatctgacaaatgcacacacaaagaaagaaggtaattatggaggacaatgcctataataattatccaataatagtagatgaatgttatgaataagaaacaaaagtatgccatttacataattaatatatttttaagtgtacaaatgacattgattgatttgt

SEQ ID NO: 23348 - DNA, 7894 bp, Cannabis sativa
tgcctattcaagtcataataaaaaggagttattcaacaatgtgaaggaaaatttttggaaactcctacatgcttggaatgaaaagttgttttttgttggaggcaatgaagtgcttctgaaggcggttgttcaatccattcctacatatgccatgagttgttttcgtttgccaataggtttctgcaatcaaattgaatttatgatggccaatttttggtgggggaaaaacaaagacggttcaaaaattcattggaaaagatgaaaattgctttgtaaattaaagtttgaaggaggaatgggcttccgttcttttgttgatttcaatcaagctatgattgcaaaataagcatggaggttgtttgagaacccgaactcactgttaggaagacttctgaaacatagatactttccaagaaactcttttttggaagctcaccatggacactcacattctctaacttggtaaggaatccattggggaaatgacctactccttaaaggtctgagatacaaaattggtaatgggttccaagttagaagtgggctggatccttggattccaggacatgaagaatttaagcctatttgttatactggtgatccttcaactctggtctctgcttacatacttgatactatagaatggaatagggcttctcttctgaaacatagaatggcattataacacatcaggggtctacacggttaaaacaggctttcaccttgcatcctctatctcggagaaagatcaagaatcctcatcggtcaattacaaatgttggtggaagtctttttgggccttacaattacctcccaaaatcaaaatttttgcctgaaaagtcattcagcatgccttaccggttgcctctgcattacataaacgaaaagtcatagattcggccttatgttcaaggtgtaaaaatggttgggaatcaattggtcatgccatgttcacatgcaagcatgccaaggcagtttggaaaagcacaaagtttacaattgattttcaccaagctcatggtatgctaaatggggattatctaattcacttggcaactacaatggacaaagctgatgttgaagcattaattttggttatgtggagtatttagaatgatcgaaataatgtcttacatggtggttcaaacagagacccctcctctcttgcaacatatgctttaacttatattgagaactaccgaaatgccaaaggactttgctgcaaaaaattacagcagcaacataaatcacagcctattgtgtcgatatgtagtaatcaaactgttaatgagcttaatcaaattgctcaacccttggtcttgagacacggttaaccaccaataccaacagttggtggaacaaccactttgtagcaccatgtatcaacacaaccatgctgtactcggcaggaatcgatccatctgcagccacctgcgactaaattagtgcaccagcagatcagttctacacctgctactacaaccggcattagaggacctgttgaagacatagcatggaaacctcctgatgtacatatgctcaaaatgaatgtggatgctgctgccaattacaaggacaagatttcaggaattggagcagttgtttgcgattttaaaggagaagtaattgctgctttttcaaagccaggccaaggttgtttcagaagtgatgaaatggaagcaaatgcgctttttcacagtttaaactgggcagcacattaccaatcacctattgctaatgtggagacgctttaagagtatcctcttctttgaactcttttcaaagagctttatcttgttttaatgatctaattgatgatgtacgttgtcttttatcctcgtttactagagttactattgctcatgcttgtaggcaagctaataaagttgcccatggtctagctaagtacgctctagagttgaataaagatgtttcttggataggagaaattctttatcctattttctttattattgtaaatgacggttaatttataataatatagaaaattatataaaaaaaaaaattacacctgtgttttccatagaaagaaaagtaaaaaattatacctgtttttttttttttttgtttgaaaagaaaaattacctgtgtttgaagtaaatattttgagtactttcacaaaagctaaaaagaacaaaacttttctttgagttgagttgagttttgctgagttgtaccattagaaagagggttatatttcttattttttaaatataaaatttcatgtgcttatgtacgtttatgcaacaaaactgaaaaggacattaaggcttattctggcatagattgctagttgtattattctaatgccccaaatatccggttttttcattaataaagtggaaaagattgaccccctctctctcttatctttacaccatttcagtacaaaaacagagctttaattaacagtttatgttgctttgattttttttttattgagctttttttggtttttggagaattattcaattccctagaacccttggaattgtatttgagttttgggtgttgggtttatgctgttccttttcggagactgaagagaatgaaagggaacagagaataataggttttttgatggtaagaacattattccgaatgaagatgatgatcagattgtgatgctgtttggttcgtgtgaatataggggaaagaaagattgtcgcaagtgtggaaatttgttgagtattgagattcgctctttcacattgtttttgattcttttaagtattcaaaagtttataacctgaatttctgggttttttctttttaaagcgaatatttttctttgacttttgcttatttgaacttgtttgaagaccctttactcacaattctcgaaatatttcggcgatgttttctagatattattatttattttaagaagatttccttgtaagttactttatctttacgtgttatccaaatccatgttttgagtgtttattataatattaagtttagacattctttcagtctaggatttttggattcgtgcaatggaagtgtatggatcagttagtagtagcaccggtaccttttacattttcggtgacactttttgaagtcctgttgttttgtcacaatgaaatgaatcacgaaataatgacacgaaaatgaaaagtttgacaagaaactaatacagatggcatgagacatgccatccttgtgattctgctacctcttttctccttcctctctctaaccttgtttgtatcttttttctgttgtgtgcagaaattactagaaggtccaactgattagtcaaacgcctgacgaagaaggtgagtgattgaattttggaaaatccctttgctatcttttatggaactctagctcagcaggtgtaattatatcataacgtattaattaattagtaattgacagtatcggaagagagttctcgtaagagtcattagattgtgtccgtgagccaccaactacttgtgctttgttggttggcattaaatttgtgtattgcattgattacttgtgctgctgttcaaccttccttgtgagtgctatctcaatcttcttgggttcatgtacatagaaatctattgcctgcctcttgttccaacatacattaatctatacacatgagtatatatacatattagtaacgttcaattctgttgatgctgattgactaatttctttttgagtcgacagtttctgtgatcacaggatatgggatgtgttttttcgacaccgaaggatactggaggaaatagaaggaggccaggaaacattggggatgtttcggtttatgttcctggtttaagaattcctaaacctgttgatttctcacaagcactgggtgatcacttatctaagagcttagtggaaaaattatctgctttaagaactcgcatagtagtaatggctggccaagagggtcctacgattacaagaacgagaagaaaaacccaacatggttggttggttgtgttttcttcccccctaaaaaaattcgattttttcactaacatcacatccaattttttataagccaaattaacattttctcgtcaggtggatcgactttagctgatcttcaacaggcactggaagattatttgcccgttcttctgggattagtgaaagatggtaaatcatgtgttgaatgttcttatcatcaaaatttttctgctgctatttcagataaactgacttaatgtttgtctgtactgtcaaggaagccagctacaatacagggtacaatttctatggataaatcaagaggatgaagcggaggtgcgaatgtttgaccaatcttatcaatccttgtgtctatatacaatttgttttttcttatcatttctcaaaggaacactgctttagttgaaataatacttttgcaggaaacagccttgtctaatgcttggtacgaggtgttgtcagttttacatttgatggcaacgctattattatcacaggccaacttgttacttcttccaagaacatccgctgatggttatcagcccaaagtatcggagggtacgtagtactgcatgacattacacctctttacatttcatctctctctgcctgtttctcttgctagtctttcatgttattgaagaagctcttctgcctatatttcaaaatttaaatttaggtttgtaaaatagtgagcacatggtcctcttttggtatattttatttatatttcataagacttcatcacagcattagattacctacagaaaatgtataattataaatttcataacgtttttcctaatgatataaatagcttaaatgtctttacagataaacataaccatatcttgataggtttagtatgtttgataattgttttctctgtactaaattttatttatataccctcaaaactattcctgttatgtataagtgcgtgagtagcataatgaatattgattggtagtctatagttaataaaaatggtatatgggacattgtaatagggtagtggtatagtacatatagcaactgtttagagaggaaaaagggtatgcaggaattaagagtttatttgctgcatcatggagagactaggcctctcgaatgcctatggtcttgcactgtaattctcttttctacaatattaatccagctaccattacttctacttctctaattgttcttgctactgttagtctctataattctaagttgtgttccagccggttcatatcaatattccatctacccgggtttaattcccatagtttgtttgtttatatctgctcttaagatacaatgtccattatctatatgttggatgggttagtgagtgtaaccatatttctcagtagaggactttattgttactttggattctgcagaataaattagaacatgtctattttctctattgtaaacggtagagacaacaacctaaactgagataaacacaaattccagtatttacctgaaaaaagatgaaagttaagactagataaaggctttagaattaaccaggttcttacaccacaaatacctgatgaaagtaaagttgaaagtttaagttttttggaaactcagcaatgcatgtaaaggaaagtacatgccaagtataacataaattacactttgctgacatgataatctagacgtgttgtctatttattagtacatccaacagagcttacgtcttacagatattttagccttctcttttgatagacccctaatttaattcacatatgtacgatggaattagtaaagtgcttagttgggtgaaagtgttatgattgcctcattcttgggtgtggatttgcggtatttactctagtcaacaactggtacatcaattttagagaatttttttattttttccatatctggtttgttgtggggatgacagcgtgtaaggtaggttgttttcttatagaaattgagccctagtttagggagacgacgagtctttcgaataccttggtatttattgtgttcttttcccagtttaaattcaatataacactctcaatttgtacttggggtgtatcatcttctctataattattacgtagttcttgtgctatcttacaaaattttctaccttgctgtagctatagtgtttgacatggtggccaagaattacatccatgtaagatgttaaattgtggggagactcttactgagcacaatttatgttcatccattagagaacttgttctgagttttttgtaggccagcagggttttgttggcagttggaggaggaaattagtatggattactgcctttaggctatgttttgggctgtttgggtagagaaatcagacaatgttatatgctgttgtgttgttagaggaatagaaacagagaatagtggaattatgggccattcttaggtttaagagtgtcaagaagtttaaaatgtggaaaattatgaattaattaggagaacattttattttactgtcaaaattatatccattttctattaaaaggaaaaatattgtacatcctcaacatctctcttgcagataccgataaaatagataaaaatgatggaataatctcaaatgactctttttatctacattaaaactgttctgctagctgctaatgtagtctaggatttgaagattttttattcatgtctcaggcttatagaaagagtatgaaatttcaaatgttgggattgcttgaaattacaaaaaatgccacaaatttttgtttttggtcatattattttaatttagaaataattctattgatcaacccaccttttaaaacttaccctggtgcttaagcagtgcttaaacttaataagcacttcagcaatagtgccattactaagcttattgcttccttatgcttcacaggccttcttttgtttctcaattctatattacatggtattgaactttattcttctgtaacagagaataggcgagcttctgttgatattttcctaaaggcagcaggatacctagattgcgctgtacgacatgtacttccacatttcccttctgaactcaggtttgttttgatggtagaacttcttggtgactgatttggcgctatggttgcactaagttcatcctttctccattttcctaaatttctggatgatactcaattgtaggagaaatctaccagtagacttggcagaaggagttcttcgagcactctgcttacaagcattaggacaggtagtaaccttctctggatgaactctgctgatgaaaagctagtttcttcaaagtctataatgtagaacttgatattagtgctttgcaagataagtgtgtaattttgcggcttttaattaattttaattttaatcaaagtaatcaaccccaccctaagagaacaaattgtccggattaatggtcagagaagattctagtataggtaaatgtttactttatctgctacgattggtgcattttcttggatacatatcttacatcaactaaaacgcagcaaactaagtccttgcggtgtttaaaagatcactgtaggtatcaatacacctaaaaacttagaggtaaactctcatagaatttactaaacaggccataatcatggagttttcagcatccctaaacagcatagttgggatcagttttttctgtggctaaccgagattaagaaggttaaggaataggggttgactctcataccataaaaacttagaggtgaactttcatatattttatttgatagggttagagtaataggcattacaaagtatgacagatttacaaaacattctagactattgtaaccactaagaatcaggaaacaataaaactatacgaggaaacgaataattcagaataacctaattaatatcgtacagaaagtttccaaatatttactgattttgttctgtagcaatttgggaatgatacttctaatctgatatt

SEQ ID NO: 23349 - DNA, 4548 bp, Cannabis sativa
tgtatatattctctatcttgaatgtaagtcatccgttttggatatatcttccatcttagatgtaagtctgtaacaccctactgattaagcgtttacagtgttttctaaatattgtgcatgcctttgctaatcaaagggtttaataaaaaacatgaataatgaaaactttattaaataacttcactttaataattaaacataataatatacataatttgggatccctttttaaaagttacaaaatatttaaacttcaaaagttgtcgtctagcgaccaatgaagtgagtcaaaactgtcccaaagaccctaaacactccaagtctaaccttcttgatatgtacaatcttcatccttagctttagacccacactggttcggttctaattcttacctgcacatacacgtaataattgtgagtcgatagactcagtaagaaaaccatgatcataatatagatataaaccggataacgattaggcgcccatacacccaatcataatccctccccgtgtcccacatggtactgagtcaagaacgttcatacgacagcactattgaccacaatatcagcctatactctgtactctagtcgtaccgatgtgatatcgtcaatcagtactatgccaaacatacattctttgttatccagtataactctatgtatactgataccgctattctaatgtaatctaacagaaaatcataaacatgtatactaaacacgtaatcacatatgcatatttatactaatcttactttatcggtcaacctgagtggaactgttgctcgatgacttataggccctttaaccttcacaaccataaaaccataaaaacctaagctgaattcctcttacttggtttgaattcaaagaaaaaggctgggtctccttgtgttctcttgtagccgaaccccaagagagagaaagggagaagagtgtgtgagatgagtttggataaaataacttagttttgttttattcagcttaaacttaatctagttaaacttaaggataattagtagtaggattatctattctccaataataaataaaccaaaagacaattatatccttagcttcattaggaagcaacctcattttgtaggagtaaaatagtccaaaactataactccaataatcccgacattctaaatgtctaaatatctagccctgctaattctatgatagacaatcaaatctaagtgactatattgaccaattcatcgcattccactgttaccaggcacaaaatatgaaaatcataaaatttcatatacaacattataatgcatctagaattcaaatatatctccgtaattgaaaaaatattttcctaagacctatttctagcaataagccctagtttttacgaagagatatataatcacataataataattaaacctcttaattatctactaattcctatgatttaactgtgtggtcattacaattatcccccgttaaaggatttcgtcctcaaaatcaaatctgaataattgggaccttgagtcctcaagtcggattctaatttccaggtgattccctccacctaataatttgaccaatattatagctctatttcaaataactttacctttcttatcgagaatttcaacttattcctctctataagatatgccttactgaagttctaagattttataactttaagttatgagtcaaattcttaccataccacatggaagcatcatgtgtgctgccaatgctactcgtaaggctaaatgagaaattattaacttgattcttctcaggaaattccaaaagtcttaggaacctagggtatatcttacccttgtcctcaaaatatttcgcttacttggagattctgagtttcggattaacatgtctttattgtctgtgttgaggagcaagtaccctagccataatcttctctatagtcttattagtctgctgaactgacctcaaatctagatattgttttgaacctcaaaacaacatcacacttcataccttttaacatcatatagggagccatctttattacaatttgatatctgatggttgcatgaggacttaatcaaacaggtactttttatatacattcttgtaattcatcacataaacttgcaatacatctttcaatacttgaattgtccctccggactggccatctatcaaaaggtaagaagttgtataaaacttcacttacataataatggccttttgtagactttattaaaacctaaagatgaattttggtttcctatccgaaacaatggactttagagttgcataaagtcatactatctcccttataattttccatactagctcttatacccaagtagtaccataccaaatcagacatactcatggttctaggtaatccaactacaagattcctagcaacttcttctcatcttattcgagaattaatagatcataataatcttacaaatttttggtgattaatcctaattcattaacaaactaagtatctgaatacattatccaccacatctttctacattctacaccataagtagaattttaaatttttatacatcttaatactaccaaaatataacaattaaaaagtggtacgagcttttttgtaaaatatcacttctgagctcaaactgcttgaaacacaaacttgagttttatgacttaacattctgcgatcaaatactaagatatctctgagttagcctgctaaggcttccttaaaggttttcaccgaatttacctccaccaactgagcacttctatttttatcaaataaacctggttgaagtgttaactcactgagtttacctagcacaaactctactcttaaatttgatcatgacatctactaactgaagggaattaaatcatggttgtactgattactcacttgagatgtttcctacttaagttttcttccactgcattggccttctagggtaataaaaagttacgtagtcccaaccttgtgctaaatctaatcaccacctctaatctgaattccgatctttctgaataactaaatactttaagttttctctatagaaatagttctgccaacttttacttacaaaatctctattcacaagttccaagtaataagtttagtaacactacttatactccttcaactaacaaggagaataattactaaccctaacaacttacattcaatcgcattttacatcctaactagatgccttacaaaaagacttagaacttatcttaattcatcaattgtgactttagcttctggaaaccagttttacctttatctatccacatatatctttacttttttttagctaactttgttgaaaacattgagatttgaaataatccttctatgttgtaataccataattcatctaaaccctaaaaacttcaattccaataattgcttttgacttcagccaaatcttgactgattcaaccttaccccgtgttgatcgtggttccatagtcactacaaaatcatccatagatgttgtccatacttcgtttctatttgagagtacttaaaaatatcatcaatatactcttataacgtgcataacgaggaaatccttaactgtgcttcttcctccttagcaaaccagatatggtgggagaagaagacctctacgaactgtttccttgagacctcgccaaagaaaggcgctgaaccacctcatcttttagagcagcaaagaaaccatgtttcttctccataatgaagaaaggaagtttggaattttttggggagcacaggcggatttctggtggtggtattggtagaagaagaagaagaagaagaagaagaggaggaggaggaggaggagttgtcaagggttacaaagaaaagaaaaagggaaaaaaggaaaaaaaatagaattttttattttttttaattatttttctttttaaaaaataaattatttttaaaatttaattaattttctaatatttaaaataattaaattgtgtggaccaataaaaatttaccacgtgtacaagtgtgtacacgtaggcagtccactgtgacatttaactataatttttggacagaggggtacaaagaaaaacgaaatgggagtttaggtagttttgcccccaaaaaatcgatttttatggttaagtgttaaaatatttaaagttcaggtggtttagccgtcaatatcccttacatatatgattttttttttttttgaaagatttatatatgattttgattaagggtgggcatccgatccaatctaacttttttttttcttatccgaatccaatccaatcagtaattagatttggaaaattatcatcctatctaatctaattagacctcaaaatccaatccaatctaattactaattggattggatcgattttttaatcggatatccaattacacacctaaattctaatattaacttaaaaatatgaaaaaaaatacttaaaaactaattatcacattttatttaagtttaatacatcataaacatattatcgttacaagtgtaatgtagacaaaaattttaaataattaaaaaataatttttctaagtaataaaataga

SEQ ID NO: 23350 - DNA, 2487 bp, Cannabis sativa
aagtcagtgactttcacatatgccccaacaatcaacttgtgcctcttggttttccacgccataatcttaaacctcacagccgtagccaaatccaacctgaatgtcacattcttatcaatcgaaacaactctcctaacctcagtccagttaaatccctcagtagagaaattcactggtttggtggcttttttcttgtgaccctgataaaaagcagggattgtagtctcgtctatgagggttctcttatgagggtcagtggtgttgggaacgtaagagaggttgagagaaacggcgtcgtagtaaatacccttgtctttgttgccattgtcgagcctcatgtggatgtaaatggtggtgtttttggtatcttttaaggtcatgttgagtgttggtatgtagatgtctttaattgaacaagaagggtttgatgtgcgtagacttaaccacatgaacagagcagtaagacccatcgtaaagatgaagctgaagcagcaacggcagcagcttccgttttcggaaaccatgttttccggtgaatttgtctatgggtttttgtttcaggtgagctcaaatctaagaaatggttgaatgagaagacttgtgctgctttttggtgttgacccatttagagactatatatgattatattccattctttcccattattaattaaagtcttcaaaagatctatggaatctattctcttttttcttaaaaatattttttttaaaaaaaaaaatataaaacgtgcatatatagaaattagacctcacggtcattacataaaatattatttgtgatagaagaaacactagacctaccatatcggttgtcagtgaacgtccacttgaccatattataggccataaaattacaatttctgcttacaaaataaaaattacaactatcaataaatcgagagactattaaacaaaatttagagtagtgctcaattttttagcggaagtctcgatcgttaagcgagttgataaccactttagaatcactctttataataataaacttccagccttcctctttagcaacttccaatgctacacaacaagcagtcgcttcaccacaaagcgcatcagagaactccaatctagacgaatgagccccacacaccactcccagatggtttcttgtcacaatagctaaacacgtgctatccattcctactttaacatcacagtttaattttaccaacctaagaggaggaggactccaacaaacatccaaacacggggaaggagcgaaaataagagaagcaatgtaatttgtataagagttataaatatagtcaacgcactgaaaaatattggacaaacttctattgtgtaccttatcatttcgtgtttgccaaatggtgtcgatcacaatcgaagcataaagaaaaatttcatctgtattaatgcccagttttccaagcccccaaatgaacttgatccagtctcatagacgaataccaaaatcagatcttggaaaattcccccacggggacgctttccacaaatgaaaggctcaattatatgtgaaaaataagtgttccaatgtttcctcactacctccacataaagggcaggatacatcttcaatatggaatcgcttagaaataatagcacgaacaaggagagccttagagagaatgctccatcacatcatcttatgtcgttccaaaatattattatttcacaatttgttccaaagagaaggagctacatcgtactgcagcgccctatcaaaagcttgtattagataagcagatttacacgagaatcggtcattactctcctttgtctagattcatctatctgtaccatgacctgagggtttcccccctttcaagatggctgaaacggaatctttctcaaacaaataatttaatttatgaatatcccaatccccatcatctgaaaggaggtcacaaactttactatgatctgtcactccaacacctttcgctttagggtagaaatcccatccatgggatatccagggattctcctaaattctcgtatcctttccatccccgactaatttgcaagccccctttctcaaaagtcaccaaccctcgaactttgatatataccaaatcatgctcttgaatttttattcatgttagacattcattactaaaattaaacaacagtcattaaatctaacaatctcaatttaaggaaatttttaacgacattaaaaattcaaaacacataatttagtagctgtcaaagtttatggacaaaaaacctaatcggtgattctattatttaataacaattatatcgataaacgacttgttaattgcttccgaaaaaaaaaaacaattatatggataaacgactcgtcgttccctcttacgacaagacaaaacagaactctctctatctataactgtaagacttgaacagtgtcatcattttcaatcaattgtatttgctcactgcaactctgccagacctctctctccttcattcccttcaccgt

SEQ ID NO: 23351 - DNA, 2254 bp, Cannabis sativa
aaacaagtagcatttagttttttatattaagaatattaaattttaaaatataataaataaatgtaatgcatttggaccttccacgtgtccatattgcagtagtaacggatgtaaaaaaattgtaatattaagtatttttatcctcaaaaataaaaattagatatttaaatgtataaaatctaaagtatttataccgcaatttatcttattgttattaatattattgtatatcatacaaataagtagtatttgaaaaatagaatgaattattttttatttatttatttgatgggaaatcgtatgaattatttgatagtagaaatatgggcaaatattttgtcatatgtgtagaactgcaaaggtaggaccacattgttttccactagtactactacatagagtcaaatcaaaagacaaatgattgtctatattatttgtctaatcaaattttacattatcacatttctttctttccaatactagtggttctaattctatgtcagaaagtaaaattatgcctacttttctaataattgtggcattgcttttgccataaatgtcacaaatgataaggtgtagatacttacatcttgtgctaaaaatttacatgtttctaattggttctattttgttgcatcactcattatttgtactagtcacgtgggctttcacctataagagtaaaacttttataatttagagagagttgtaaaaacaaaaagagtaggtagccttttggtacatgtgttttcgatagaccgacaattcaggtcataatacaataacacaatacgaactcgataagatcataaaataaaatagacgtgaatcgaatccaaataatatgattattatttgtactgtattagggttaacacatgtgacacgaaatcaacacaaatagacttgtttacattcaatatattattaaaattattaatttagagttaaattattatatattttcataaaaattatataaattaaaaaaaatattacttacaaaaatataagataaacaatttatacttgatattaagaattttattgtgataaattatttttataaaaataaaatatgtgatagcaatcatgttgattaacatatattgtaacataagtatagtcgacacacgaacacgatatgtcgacatgaaatcacaacggttcgagttaggattgagatttcttgatacgaaatatatataggttgagctagaattgactaattaaacatgtcaacctgcataatacgaatataaatataacacgtcaacacaaactgctacccctaatttttgcaaaatactattttggtaccttatatttttttatattacttatttggtatttgtactcgtaccataaagtcaagtttattaataaaattttattaatataatcaaactgcactcatatgagttccaaatcaatttaagtactttattacatatattataactaatgctagttttatcatcgggtattaaatatataggattttaaattataggatacgagcattattgaaaagagagaatactaaaatgatacttttgcaaaaatacagatttcctaatatattttaattaagcattattcatatccatctttttattttttaacaacataaattatatcgttattaaaatagataaaggaaaaagtcaaaattttccatttaaaaataatttagagaatataatcaaaacttgttgataaatttatttaaaaaaaacttgtgatgaaatcatcaaacttttgttcttctctttgtttattaatttatgatttgttcattgctaatatcactcatcttataaaaaatttgttatattgtgttaaatttgacacataatataacaatttatatcaccataaatatattatttttttttaattaagtgttatattattttatcattgtgtttagctataatattaaattataaaaagttttagtaataaaattattgttttttgtatatttttagtaaaatattaaataagtattgattaaatattaaaattttgcataaatatttataattatgtatttggatacaatgctaaaaaataatataaatatattataaaattatttttttatatcaaataaattgtttaaaggatgagttctcctaaataatttgaatctaaaatttggaaagagatttttataaaatattggattttgggtcaaactttacaattttactgccacacgaattttttcacaaaaatattatctttt

SEQ ID NO: 23352 - DNA, 3300 bp, Cannabis sativa
agtacttaccttaataatatatttaatttgtttttttttctgccttattttatttgattttattagcattcttttcttcattagataacgtattaatattttttattagagtttcacgagctattaatttaatcaagttatacgagatatgtaattgttctttgcaatagcgttacagataaaatagatcaattggaggatttatgttgcttttttttattcttgtcaattagtttagttatatgtagaattgatattgtgtcagatcggaccatcaagaaattttacagtgttaaccgatagtggcgtaatgtgcctaattaaaatcacacgtctccaagtttcgtgtcccatctctatttaaatgctacattattattattaaaatgctacattatttgtttgtatttaatatataaataatcaacataatatatgtttaaaccaaaaaataaaatatataattttttatcttttgagtcttggtagataaggtgcagagaggagacaccaaattatcaaacgaaaaaaaaaaaaagaaagagaggagacaccaaattttgggactttttaattctgtaataagtggttaatgcaaacgacgtttaacaaaaatcccattgtcgttcgattgcctatcacaatttaagcccaactggcgaaaagtgagaggcttgccacgtttacaattgaggatattccacgtccctatgaaatatgcggtctgtgaaatacgaaataatacaataaaatgatttatttaatagttaatatatacatgtttcttaaaatgtactttttttaatagcttttccggtcgttttcgacggtggaattagggaatttggaccttctgcggtgaacaaagagacgcatatttcactcttcagattcaccgaaataccctcgttgaacttgtagaccaccgaaagattctgtgtgcgattcaggggcactcccataatttcgtttttgcttcaattatagcctctcaattctcatgtttactgaagatgatattccacgtggcatgattacaacacctcgggttttaacgccactcagatttttttcccgcttttaaaaataataataataataataagaaaaatctgagaagcaaaaattgaacgaagaaacgccgttggttatcctctcagctgatccgagtctctgacacagagagagagagagagagagagcgttaaaaacggcgacgtattcgaggagaaaaagcactggtaatggatactgagtttgtataagtagcttcttctattggagctgattctttcagtttcattgagctcgtttttactggtgtcggagcaaacagaatggctatcggaggtttgatatcgaatcggaatttcggttcctttattggctcaggtataacctcgcactcgctgcttatcttatccataagtccaattctagttttatttctattattatttatttattttctgacagattatgttggcacatttctttcttttttaaacagtgatttgggtattctcttccattgtcttcttttcaatcgaatttagtttttataccagtcttgtttatgaattgtgttaaaaaattctgttttaactgctgaattttcattcgagaggtgtctgagtttacattggactgaaacttaaacttgtttcactaatcatggagcaaattcctgtgcatgcagctccttatcttttattagttttttctttctttttttaatttttttaagacacgcacatagttatataaatatccataattagataaggagatattgcatagaatcgattgatttcattgttgcatgtatgatttcttaacgcttttacatagattaatatataaaaagttatacaaatcttaaagcaagattggtttgattgtttgtgggaacctcacattttctacttccattaccgataggatttttgcatttcatggagtgtatgtcaagaccaaaataaaggaagagaagcaattcaatgactaatttatggccaactcttctatttataattttatagcccttttagctgttggctgttattttttttttcctaattggaaacttttgctaaatgttatgagttaaaatcggatgagagtggctgcagggattttagtacaagaacagtaatattgcattgagatacccctctgttggccatgcagatctattttatgtttatacccaaaatggcagcttgtgccatatgttttgatttgatatagatttgagttgagagtagtgacagggcttgctatctctgtcagaaaaatatgcaattgcattcagatacatttgcaatgcactcattctttcaaagttcgtaactttctaatgctcatttgttaatggcaggaaaagtctgtacaaacaaacaggctgtttcacatcacagaggagagcgttcagggattgttactgtacgatatggtcaagagagaatcggaaatcgtactttatgtactctgggaaataatatttatagatctaattacacatatggccaagttcttcatgctactggctcttcagaaaagaaccagtggatgtcaatagggaaatttaatgaaaggcaacaccctccatctctgcaatctagtaaaaggtgttgcagcaaaatttctaagcaaagagttagagcaatatgtgacagcagtctttctccaaatgcatcttgcagcacttggagcaagtttagagtgttaaataatctagatgtaagaaatgaagtatttcataagtctgcaaatgtgaggatcaacaggacctgtgcttattacaagtctgaagattatgacataaacgatgcaaatgtggagccccgtgtatctgtggacgggtcaggcgaagctgttttagtcaatggtaatctgcaagaagcatcttcttggtggcaacaatttcctaagcgctgggtgattgtagttctctgtttttgtgcattcctattgtgcaacatggaccgcgtgagtatttttgtttcttactgagttagatcctcctgttgttgctccattattgcagcattgtttcacaatatgtggttgtactgttctttggactgggatagtaactcttacacatgttgattggttgttatcgttgttctttctaagtgatgggtttgcttactactttgacatttttttttgtaggtaaacatgagcatcgcaatacttcccatgtcgaaggaattcaactggaacagtgcaacagttggcctgattcagtcatcatttttctggggttatctacttacccaggttctaactcaa

SEQ ID NO: 23353 - DNA, 4691 bp, Cannabis sativa
  modified_base (68)..(78): a, c, t, g, unknown or other
  modified_base (4611)..(4616): a, c, t, g, unknown or other
atgacacataaataagtgatgaaaatacttctgtctctttattgatatttaaatgatagagattacannnnnnnnnnnttttatttagggcataaagcccaatatcgcggtccccttacagtaagatcaggttggttttgaggaactatcccatgtgttgccctggctgctgcagcttctctctccaactcagtgtttcgtcagtttaattctgccaaacgttgttgaagttgcatgttctctaattctaccaatggtacgtatctggtaggatcatagtcatcctcactcttcttttttaggatttgatcaccatcagcattgaaaataccttttttcctccctgaacgtggtgttttagatgtgttgggtctttgagatcacataggttctttgccaggacgacgggttgcttccttaggacgattatcgttatgttgatcgctatcagccatttaatataggtagattatgttaatgaggaggaatttttatgagttttttatcaccaaggctctcaatgaaaccaccaaattgttaacacagatttttgttaactaaataaatagtcttttttgcaataaatacactatagaaataaatgataataataacaccaaatattttatgtgactttgtagttaaaatctacatactccacgagtccttattattagggatattttctggatgcaaaatacaatctcaatatttgaaataataagattttctttctcaaatttgtcgtcctttttcccatggatttcgcccctatttatagggatataggttggcagttattcttttaggattaattcatttacaactgttaatgaaacgtggacattcctcacgtttcatttattcacacacgggataatatgtaataactacccaaccgctctttatttttatccgttagaaatatttcatctcgttatatcccttcatttgtattattaatgtgagatgttcatcatgctgcgagtaacgggaggcggttgagcgtcataagttcttcttttctcaggagatggttaatgattcacgaggttcttgattgtctcgtcatgtacattttattactctgtctatcctgaggtaaacatgtgtctcctcaatctcagttagttattattcttgtcttgcataagattaagcagttaatgagtttgaatattttctatcaaacttgtacttaattgtaacgagttattttaaattgcatttaatgatgtaatgtcattattatattattgagttgattcaaattttttctgttggacacgtatcagcttctggtatagccaaattttggctataacaattatttactttaactcacgactttgagtagaaatttttttaaatattataatttaagtattataaatattaatattaatctaggatatataaaatttaaagttaaagaatgcggttattatattataaaatttttttgattaaagagttttataatatataagtataatttcaatttcttttaacaattaatattaaaaaaataataaataaaaagaattatggtaaaaaaaataaaaagaaataattaagaacaaataaaaagaatatattatataaatgcacatatattaatgagaggtgtaaatatgcagactcttttttttttttttgaaagaatacaagctgcaagaacaagaaattaagaacaccaagcagcagagaaggaacagagcaatccctcctaaacttcttcccttgatctgatagcttcttttgcaagaccatgggcgtccatattgaactgacgaggcaggaaatgcaaagatgcttcagggaagttggagaagagcatacgaatctgagacacaagaccagaaagagcagagtggtcttgccaagaactgttaactttgtagaccaaatttaagcaatccgagaaaatgaacttaggactcaattgagagtccaaacaccacaataaactctgcaacagagcctgcccttcagcaaatataggagtggaagcaccaggcagaaggcgatagtgagaggctacaacacgatgatgtccaatcttgaagataaaatcagtccctgttaaactattcttgtgatcaagggctgcatccacataaagagatggagaatcctcttagaagctaatagcttgcagccgttgagaaagatgagtgatgggagtggcctctgaatccaattgatccgcatgatagctttgttgaccctcattgtattcctgtaaataattaataacaaactcttccacattgttaggaataccatatctgttaagtaaaattgagttgtgagtattccatatatgccagataagagcaataaagattggaaaatcctgttttgagatattttgcaatgcctgaagatgaaattccttaatgtctattctacaataatcatagtaaaattgtttgaatcttgaaagcttccaaatgttctttgctctggggcaacccataagggcatgagtgacagattcggtactgttactacaaattgagcaagtcggatgaggaagaatctttttttgagataaatttaaggcacatggcaaaatatggttaaaagctttccaagtgaaatgcttaattttggggggaacagaaagagaccagagctttttccaccattgttgaaaagggttagggttggaagaagaaggaacatcaatagatgcaagggaagaagcaaggtgataagatgatttgacagtgataaggccagaagggtggaatccccatatcagagaatcggccagggttgggtccaggggaattcgaagaatactatcaacctggtaagaaggaaagaaatgattgagtttaggcacattccaagtggtattgtggtttataaaaaaagagacgaaagcctgagaggggtcaattggatgcaggatagttggactgggaaggccaggaatccagtttgaagctaataaaggaacattggtaccaacaccaatcttccaaaccagacccttcttaagtaattgacggccccaaagaagacttctccaggtgaaagaagaattatgtccaacaggagcattcaataaatcagagtgtttaaaataacgagctttaagaatggaatgaaggagggaacccgtatcactccacactctccaagcttgcttggccagaagagcttgattatgaaaagaaaaggtacgaaagcccaatccaccaaagaacttagagaccgagatggcagaccaatttttccaatggactttgttagtgcccagagaaccccaccaaaacctagctatgacactctagatttttaggcaaatagatttaggcaccttaaaacaggacatagcaaaagaggggatggcttgaaccacgacctttataagagtttcctttcctgctctagagaaaaacttatcattccaagtattcaaacgggaggaaacactttggagaagataatgaaaaatggaatttgtaaccctacccacacaaatagggtcacctacatacttgttaacaaaaccctccccagtaagatgtaaagcatgtcagaattgatgctgtgattcatcagaggtgtttggggagaaaagaatagaagacttatccctattaaccagttgaccggtagctctattatagagttggagaatagcattaagggcgtcactagaatgatgagtgacttgggagaataacatgctatcatcggcaaacaagagatgggaaagggggtgggctcccctacatatctggatgccaggaaagcttccattagtttcatgtaaacggatagcagcagaaagcccctcagcaatcaagagaaaaaggtaaggagacaaaggatctccttagcgaatgccaagggtagagtgaaaagggttagtgagggtaccatttatggataaccgataggagacagtagacaggcaattcaaaacaagagagatgaagggtgcaggaaaagctacatgaatgagcagttgatggaggaagtgccattcaaccctatcaaaggccttttccatgtcaagcttaatagctgcccaacctatcttgcccgaacgtctagagtggatggcatgaataatctcattagcaaggagaatgttgtcagtaatttgacgacacttaaggaaagcactttggttgatgctaataatggagaaggacaagttttaaacgattagcaagaaccttggagaggcacttgtacagagtattacagagactaatcggcctaaagtcactgaccagtttggggtttttctttttcgggatgagaaaaatgatcatttcattgatcagagaaacgtcctcctagtggttaagaatttggagcataggtctggtgaaatctttcccaagggtagaccaatttttttggtagaaaaaagagttaagaccatcagggccaggagccttatctcccgaaaggccaaataaggcttgcttaatctcaagttcagtaaagggttcttcaagaaaagcagcctgctcaggggaaagcttgttagagatcacatgaaggatagaatttatagccatatcgcatactccttgagaactgaagagagtattgtagtgttatagtgagatttctctnnnnnngaaactcgagaccagacccctacttaaaggacacgtatactcagattttccacagaaagctgagatgtccctgag

SEQ ID NO: 23354 - DNA, 5141 bp, Cannabis sativa
tttgaaaatgtattgatttgaaaatttttagatttaaaacgtgttatattgaagcgagggaaaacacattatttgaaaaaatttagatttgaactaattgtcgacggttaaaaattgtggcctataacactataggcgacggttttaaaccgttggcaattctccttgaaaaaaaaaattaatttttaagacacgcttaaaaaccgtcagggataatactataagagatggttttaaactgtggtctatactataggggacggtttaaaaccgtggcctatataggccacagtttttaaccgtcggcaatttccattttaaaaataaattcgcaatttttaaggcacacataaaaccgttgggaatacatcacgcgtgtttaattaaaaccgtcgagaatacttaaatttttccgacaattttaaatactaacttaatttttttagcgagtgtctccgaaaaaagcatttttttaaccgtcaggaatagtagtttttgtagtagttatagatagaaacctttaggctatgtggtgttgctggtttgtatataacaatttgtgtaatgaatacatactcatctgattcaccaaaaaaaaaatatatgttaggttgtttttacaagtcttacgtgcttatttattaatggtttttttagaatatgtgcagatatattgttaagtatttctttggagcaatactagacgatatatatatatttgaagttgagatcttagaattcaaaaagtatatttcatttctgagttagacaaacttagcctcttactgagctcggatttgtccaacccaagatgcatgactacctacaaatagagcaatctcaacaccaagaaagaaattcgattttttaaagagctaattaaatatcactgcaaaaattgtaacaaaaactttattaattgttgagttgctaaaagcttaatagtactgactcgtgaaccaaaattcattaacgctccaatcacttatttgtctcaatattttttgtgtttcttttttttttttttttttgctctaaatccttgtaacttacttatttttaaaaaactcggtaaagacaagtatttagaatggagaaattatatttagacctcaataagttataaatacaccccaatttacataaaaattttaattacatttttgtgcaaattaccaaaatatacaactttgaatgatgagtttattttaacttttattttaataattacacctcatttgcttttaaaagtaaaattatccccttcaagtcttaaaaaagaatcattaatggaggataataattgaggttttatcaataaataaaatttaatataagcataaaaaaaataatatgtttaactattttattaaatttatataatctctaaattttttgtatttattttcatataaatctcacttatattatatatataaactaatataaaagatttcattcatttactttattttttcgaccatagaatctttatttattgttatacatatgaaaaaaattgattgatattgttaattataattataaaaagagagatgtatatgtaagtgcatatattgatatccaaaaggtaatgattatttaaaagaatgaaaatgacaaagaaaagataaaaaagattcagaactgaaaaaaaaaatatatccaaatggaagtgggttgaatatttattgtatggggtgtattttttttttaaaagaaacctaatttagtaaataaaaatgggtgtgtttatcaaaagtaacatttaaataaaaaaaaaaataaattaggagtgtacttataatttattgggtaatttattggggtgtaattttttttttttttttgaaaatggatgatttcattaagagctggcataagccataacaatgtcacacaaaaaagatggagcatttagctcattataagtacaacctgacgagaaataagactccctagcaatactatgggcagccctatttgtagattgattaacaaaagaaacaaggacattattcacagataataaaatagaacgacaatcctccaccaataacccaaattgggatggcatacgaactgagctattaattgcttgaaccacaactaaagcattagattcgacaaacaccttgtcccaacctttcctctttatccaactcaaagcctccttgatcccaataacctccggtatttcaggaagaacacaaccccatctactttcaaaaatagcttccattagtttaccatggttatcacgagcaatacaaccaaacctaaatttctgttgagtttcaaagatggccctgtcgacatttatcttaaccgtagtagcatctggtttacgccatctattgatgattgaagaatcacccatagcaaacatagcactaggcgactgaaatttagcaattttccaatggttaaggacctgtttagccgactgaactacctccaaaatagatctggttttctgctgccattgcacttcatttcgagttttccatatactccaactaagcatggcagcctcaacaacaacctcctccgaactgctctcaagcagatcaaaaaaccagcaagcaaaatcagtaaatacaccaaccggatgtgttactgtggaaaaaaaccagcaagagaccgaaaattggtagcccaagagaacatgaaaaatcctctcaatgtccatattacacaaggggcacaaaagatcaacattcacatgttttgtttgaagttgtaccttagttgggagacaaccggaacaagctttccataaaaaatggtgaaccttgggaggcactgaaagttgccacatttttttccagccattatcatcttgtgtaaaaagccaatttccactcgacgattgtagaaacttgtaagcactcttaactgaataaaatcccgaagtttccatattccaaaacaaactatccatatctctagagctacttagctgaatatttcttatcaatctaatatccctctcttcaaacatgtcatttagaatcttcatatcccaagtcctttcaccaacattcagcagattagaaacctgcttatcaacaagaccaggatgtgtagtcatgacataaaggttagtatcatgaggtagccaagggtcattaaggatactaaccaaggaaccattagaaaatgatcttcttgcaccctttctgactagatcttgagcaacccaaatactccgccaaataaaactaggattcttgcctaattcagcaccaagaaaagaaccatgcgggaagtacctagctttatagatttgacccacacgagtgtcttccatagtgagcaatctccacccttattttcccaaaaaagacaagttgtaatctcgaaggtctcgaaagccaaggccaccaaaatttttgtgttgacaaagtcgcttccaactcacccaactcactcccttgcttgagcttgattgggatttccacaaaaaatgcaccatcataccttcaaggcttgagcaaatctcttgagtcaaaataaagacactcatagcatagcttggtaatgcttgagcaactgacttgattaagatttatttcccagctttggagaagaatttagtttcccaactaaagatcctcttcctcattttctctttcaagaagccaagaattgcatttttattcctccccattatacaaggaagtcccaagtaaaaactatcattcgacgcctcactcagccccataacacgacaaactcggtcacggacagccacggtagtgttcttactaaagaagattgaagacttagtaaaatttacttgttcacccgaagcaagttcataactatgaaggagacgaatcacattttgagactcaaaatcattggctttgcagaaaacatagttattgtctacaaagagcatatgagaaaccacagaagcacctctagcaacacggcagcaagtcaaccaacgttgtctttcataatgtttcagcaatgaggaaagaccctccgcacatatcaaaaacaagtaaggagagataatggtggatctccttgtcgcaaccctctaccagatatgataggccccattaaatgaccaccatgagtaacattataagtgaccgtagtcacacaaaacataatgagttgcaccgaatgactactaaaacccatatgaagcagcatactttcaataaaaggccattccacacaatcatatgccttactcatatcaagtttaatggccataaaaccctccttacccactctctttcgcttcaagtaatgcatgatttcaaaagctatcatgatattatcagaaataagacgtcctgggagaaaagcactttgattatcagatattacattcggcaaaacttctttaaatctatttgcgaagaccttcgatataatcttataaagatgattacacaacgaaataggacgaagatcagtcatagactcaggatgtttcttctttggaataagcacaatatttgtatggttcaacacccttggacacgagccaaccacaaaaaaattcttgacaagagtgataatatcattacctacagtactccaacatttctgataaaaccctggtgtcataccatcgggtcctggtgatttattcgggtgcatttgaaagagaacactttgaatttccacattcgaaactggttccagcaatctatcattatgagcaggcgttactgaagcagaaagacactgaaaaatatcagtatttcctgctgctgctgtcgaagaaaaaagctgagaaaaatagtccaccaccaccgaagaaagtcccccttgccaatccacccaattgccagcaggatctttgagtttttgtatcaaatttcttctccgtctcgcagttgcagcagcatgaaagtatttagaattgctatctccctcacgcaaccaaagcttcttactccgttgcttccaaaagatctctttttgcagtaatatatcatttagcttagtagtagtagctttataattatcagttgaaacaccatctcggcctctcttccacttcttaatctcctccttacactccttaattctcttagaaaaattcccagaataatcctttcccactacaagaaaaccaacttttgccggcgcatttttgcgccggcaaa

SEQ ID NO: 23355 - DNA, 4493 bp, Cannabis sativa
attaaactattttttttatttaagacttcggtgtttgatttgaaatttaatatttatagttatttttattttatttgaatattgaagttgaattttagaatttaaacaatattaatttttttatatattttaaagatgaatgtttgttgagaattatgaatttttggtgactgtcctttggccttagcaacatttcaaattgctaatgaatgacctttaacaacccctttggagaagatttacagctgctactattgctaatgtgtgaggaaggaatcccttaaatatgatgcaaaatgaatcttcttctatcattgatcagagatttttctatgaataatacaaatcggaatttgaagaaggggaagaaggagtcctcgacccataacggatagaggaggatttattcaatcacatagtttgggctcctagaatatggcacccttggacacagaattcccccaatctattatctaggacagaagcaaagccaaaactattcaaacttaaagagacaataattaagaaaagaacagtctatcacccataaattaactgacaaatagaggcagttaacagagcattgaaaacttatgtcgtgtgctttaccaataacaagtattggtaaagttcattttttgagctcaacaacaagtgaagtattatactgacatggaggaatacaaggtggacgacatggtccatcctaagctacgtcacaacagcccctacctagaagactgtaagacctattcggtacacatactctaaaagggctacaccacatatcacttaattagtttatttagttatattagtcgctgactagacttgttagctatttctaactagacaaattaattaaataagtccatgtcacttaagttctttggggagggtataagtagaggattagagaatatattaaagggggtggaataatttgtaaagtttacagattaatatctggtttgggagtttccaagtaacgcgaatgcttgggcaaaattgtatcttattacttaccaaattgatatcatatctgaggcatacactctcgagaggaactgatgtcacaataggggcaaaagcccagagtgggccattgtggacattggctctaaattgaggtgtgtagttaaattctcaagtcggtttattaactacttgggcaccatcttctcttaggctgttcttttggcagtgagtcaatcaaaatggttgtaaaaaacactttgaaaagttggctaccaagtattataggcttttgaaggtgcttgcttgcactgggccagtggctgaatgttgtactgaatgtcgaaaaaagactactagcagtaccagccagattgaatttctcatcaactggaagacctacctaagtttgaaccacttggtagacttcaagatgatccacactcagttactaaaggtttacctagaaaacaaggtgaatgtgtagacctgtggtaatgttagatcctggctagactggcttattctacgtgatctaaggatactaacaataggtcagattttgactgtattaatggttgaggtgccatgtttataagtgtacattgattcccaaacatcttgaatagcttggaataattgaaagggttatcttttttatcaatacaatacctattacagattctttcaagaactaactttgtagtttaggctcagaaattgtagtccaatttccattcacttgtgcttaatgtttagtctatagatgtgtggcaaagagaaagtatgtttttagcaacaaacgactacatagcaatagaaatgttttaatgctgagatacaaatctgctaaagaagctaagcagccaaataatactaaccacatcatagactggcatttgattgcgccagaattccatcacaggtagtagtagcctccctgtaacatatttgattgaagcagacttatgttaacggcattaggaatagacataacgatgacaattattactctaatcccaagaaatattctaggttggcttaaaagacattagaaatgttatctgaaatttcaagaaagtgacggtagtagagggtaacaaagtcacctgatctggatcgtccataactcaaacaatcaggggaaactacagacactttaattttgttgtcccgaagcggtggtgtagcctgaacaaatgcagaaaaacaaacaaaatatgtgaacaacaaacagccaaaaaaattgaacttaagcattttacacatccgcataaacactcaaaaaataaacaaccttgtattctctcttgaataacattatactaagcatgtagcaagaattctatagtactctcttgcagaacaatccaatgaagaatagattggattacaacttcaataaatcataagaagcagctccatgctgaaataaatactaaatgacatcaagttttgacacagtatgcattatctccaatgcttgtctcagtactgtaaaacattaattattaaataagcgaaaattggccaatctgaatgaatttgtgcatggcagcaggtcaacagttaagaaggatcaagatactaaataaataggaccatgatcactttatcatgattatacccaacttgtaatatgtgatacacaatagactacaggtcaacagaatctaattcaataacacaaaagaaataaagtgacaatatgtaaaaataaaaatatgcacgttgccatcttaagataaaagccctccccttccccactcacccccttaaacatagacagttgaactaggctcaactgcttgtgtacctaagtgacagaaaattaactacttctactgtaaccaaccaacttactgctgtatcagagaaatttttcctctttcttgtctttgtgtcctttcttccttctttaaaaccagtttcctgtctagctgcaataaataattcattaacttgataaaaaaatctgactattatgagtaaagataaacaaataaattggctgacaaccatagaacgccaacctgtgtcaaatacctttagtctcagcatttccagaatcatgtccccgttttgaattagaagtctgctccagacctatgctcaaagattcatcacctagttttactgtcacatttgtatccactggcttctgcttccttttgctccctacataagaaatttcgggcactctgtctgttgagtgaatggttgcagctatagaactgttcaacttctcatcgtctagcatttgaacaggactaacattttgctgttcttgatctaaagaacacccagatggaagggagttcctctgactgcctttgagatttttcaatctatcactacatttctgaaaaccaataggtctgtctctgagatttctcaatctagcactacatttacgaaaaccaattggtgtaacatccagttggtgtttcttctcatcactcaggttagaaacttttgaattattgagggtattaccattctcagaaaccttatgagattcggaggtttcaacatgtttcccatgtttcagagtgacacaaccttgtttctcaagagttttttcttgtagagtagaagtttcaggcccagatactactccacatttcccaaagatagctgaacaaaataataaaaaaaacaaactaagaactggtatatacaaaatggactaataattatgtataaaatcagtagcagtagcagtaccaggagattctgtattgaggataccattctcagaaaccttatgagattctgaagtttcaacttgtttcctatgtttcgaagtgacacaaccttgtttttcaggagttttttcttgaaaatcttgtacagaacatggagtaaaagtttcaggacagcattccataacaaaagagaaaaaaaattaagatgttgtataaacaaaatgaactagtaatgatgaatgctttcactgacacctttccttgctcggctcaagggttcgaatcacaccacactctcatagagagattatactagacccacttgctcgggtcaagggttcgaatcacccaagtgatccttaatagaatggaacccttgaggtgcataccgatgacagtctcgggattatctaagctagactggggaataaatctacaccaagtgatccccttttttcacagcaaaaaaacaaaatgatgaatacaaaagcagaagtagtaccaggaggagcatatgtagaaaactgtcgccaattcgaaggaaagccaaataaaaagcttctagaaacctgggaaggaaagccattgagagtggtgcggtgctggttgatgacacccttaagactgatacagacattatcggtagtctcaagagtgaaaacatcatatcttttggctataggagcagaggtaaatacacgaactgcttcttgttgtctggatgttaagccggcaacgccaaggttgttgccatggaagtgattttgggtgtgaatcaaccaccaatcgaacaagcatacctacttagtt

SEQ ID NO: 23356 - DNA, 2990 bp, Cannabis sativa
  modified_base (2928)..(2953): a, c, t, g, unknown or other
aaatcagtgaaagttacgcacctttagaattttcactgcttggaacccatacctaaatgcacgaattgaacgttcacagacatacaaaaggattggaacaagcacatacatccatgtctacaacaacaatattataattataataaaaaattgaattgagattttagataattataaaagaagaagaatattaaaatagttagctggttgagactaacttacagtctttttgtaccacttgtcaatgaagtagagataataaccgtgaacgagaaagaggacgtaaacaatgacaaacaagtggtgagagtaccataaccttagggccttgggtagctttgatttatttttacggaaccaggattgtgctaaggtgaaagttatagccattaagaccaccataaccaaaccggtccacccctctgtgcccttcaagaaccaccagtagttgttgggtcgttctttcccaaagaattgcgccattggctggtattcctcatctgttgcatgcagcagccttggaaaatcacaagttaaatgtgccaatgcatgtacaccaactccaattgcaatcccaccagcgattacctaagataccaatcataactatatatatcatgaatttaaaagaaatgggcaacattgtagtatagtaaatctcacaatatatgttataccgtgtgaaactcaatattgtcattgaagggaatgagtgctcccaactttgtctcggtcctgatcaaagttatggtatttctacaaacaggtaagagaattagagccatgttgaacttgagagtctcggcagcacccttagcagtggtaacacaatagcccatcacttcaaacacagctcgattcctgtactgaataaacttccacgtaaaaaggcatgcacaaatggccagccacaaccccatcacccaaatacgtctccaattttcctctaaaatccaattatgtctccggatgttgtttacgaggtgtttgacccgtttgtggtatcggtttatggtgttggactctacagttgtctcgactaacttctctttgaccttccttgagctcggcgccatgcttcgatgaaatagatcttccaatttcttcaactgttggaaataatttcatcaatgttaatccatggtaattttggcggttttgcatttaattaattgcaaaatgtagcatgcgttgtgtgggtgtacctcaattttgccaattttgttggggtctagttcttccataataagtgttgcatattcttcagcatgttcgtaaatgttaagtaacttattctcactagcactaaactcaataatctacatgaccaaaaaaaaaaaaaatcaatttatgtatgttaaggttacataaaaatgattttaattttttttttatataatataaatatatctattttgagatgacacatcattcatttattttttattatgattttcacttacacatttttcttattaaaattttagcaatatacaaatacatacataatattttactaattaaaataaaatagttctttaagcttataatatatttaagtaaggtaataatataatttatttacttatattgtttcgttatttattgagtaatttttctagcaccaataaaactttttcttttttaaatttctaataattctaattttaaacatatatatattgatatcttaaaattaaatttgttaattaaaacgacacttttcatattattaaaattacataaacacaaaaaaaaatgacataaagacaaatgaggacaccaaaataacataaagtgaaataatacttcttttcttttaataacattaatactgttatctttttactttttttcagtgctcaacattttcatttaaaagaagataagaaaaaaaaaattctctcataatcttcaaaataaagaaaagctcaaaacactgtttctctagtttatttttcaaaatatattaaaaaaaaaaaagaaaaaaaaaactcacattttttacatcttctttgttgattaggccgtctatatctttgtccaccctgcatccattacatttatataatttatattcttttaaataaaaattattctgccagtgacgaatttatagttatatggaccaaaaaaaagtatctataaattctaaatttcttatatatatgataatgtttaattatttagaatatgaagtattaaaataactttttaattaaataacttactatactgaaatgaaaatatatatatatagttcaaaagacaatctgaaatacaggcagtacatgcagtgttgcctttctaaggaatgaactataaatgtccagaatatatgtaattgcatttttttttcttgacaatattgaagaggatttatatatagagagatcttggaaacaaagtaccgtactatttgtattgaattcgttattatatataaaagtatcgttatgtttttgtcaccgagaataaaaactaaagatatattatatcaattatttaaaatgattatgtgtgtacaaatataaatttgaatgaggattatcaatgttctcataaaataataataataaattgataaatacaataaataaaaacatatttttaaatttatttttcgaaaatatacatggacctcaatttcttattctttacttaagtaaaaataaaaataaaaatgaaatttataacaccctttttttttgttttaaaattaaaacaaaatttattaataaaaacatatttttgtctatcgaaaataaaaaatagaaaagaaaatcttttggcatctatcatgatttaaaaaactaaaacaacaaatgtattaccaaactatgtaaaataatattttcctgattcacaatatgtaacaataaaaattaatacactataaaaaactgttatttttagtgataatttttnnnnnnnnnnnnnnnnnnnnnnnnnntaaatgtgacttttagtcacaacgaaatattacttgt

SEQ ID NO: 23357 - DNA, 3641 bp, Cannabis sativa
aaaaaaaaaaaaaaaagtttgtatctcttatattatatatttaagaactaggttctgatgtctaaggtttagactttggggtctggtgtctaaggtccaagctagggttcgaaatgtggtctaggtcagtgtttgggattaggggattgggccgggattcaaggtccggggttgggtttaggatcagaaaagggttgggtgcaaaattgggattgaaggcggggttttaacatttggtcgaggtccatagtcaagattggggctggagtcccgatttaaatatggtccagtgtttgcagtcttggtttaggctgaggttttgggtttgtgatcaagctggggtctgtggtcaggatctaacaaaagtggtctatgttcaacactgcgacaaggtttgggttgggatccaacatttggggttgcagtcggagtctggacgtgggacgagtaaaaatacacacttatattactaccattgttaagtgtcaaataatgcctaccttttctaacaggaaagtactttatctgtaaaaaaaagtttagatgtttaaattagaccatctttaatgagatataaaaattgagttatactacaaaaagtaattttgtgatatttttatattaacttttactattgtatttcaatgcataattataaattataaatttaatatgttatttaatgttcacttaataatttattaaaaaatataaaataataataaagattattgggttcttaaactatacatgtctgaaaagttggttttcaaactttatattttggtaagttgatttccaaatttttatttttttagcaatattaatttcaactattagatattgacatttttattatttatgtgttaaatcaaataattttatttttttaattttaatactttgagaaaaatagttatattattttttttatttattatattaatattaatattttaatattttaatttattatattcatatacattaataataagatgaaaaaaaaataaataaatactagccgacacatataatagctagatagaattttagctcctcacttttttatattttaacatttatagtatattttattgttgatttataaatatgtggtattataattttaattattttttattatatatatttattgattatttaaattttgcatcaacgatgtaaattttcataaatttgtcataaaacttatttttatagtataaaaaaaatgttattatttaagcatttttaattgttttttttcttattaaaattataatactacatattcataaattaacaataaaatatactataaatgttaaaatataaaaatgtgaggagttaaaattctctttagctattatatgtgtccgttagtatttatttatttttttcttcttattattaatgtatatgaatataataaattaaagtattaaaatattaatataataaataaaaaataataatataattaattttcttaaagcattaaaattaaacaaataaaattatttaaatttaacataaaaacataaattaaagtaaaataaataataacaatgtcaatatctagtggaaacttaatgtttctaaaaaaaataaaaatttggatattaatttatcaaaatataaaatttggactgaagactaatttgccaaaaaaataaaatttgaataccaacttgctaaaacatatataatttagtgacttgccatacaaataaacataataataatacaaagttaaatgtaaaaataataatatagtaatacaagtcatctaataaaggaaaaacaaaataatattttaactaaaatttaataataaaatgttaaaaataacataataatgatacaaatttacatcatgttatattgagatatgaacttcaatcacttttgatcctgtaaaatttttgcatcataagttaacacactaatagagtagacttttaattaagtcatattttgcatttgtatctccattgagaagatgctcatgctcttatacatacagtgtgtacaaattttaatattttcaatgctaattctcctatttttaaaaacagaaatactctggaaatcgtatttattaaaaatatacacaattgatataattgtaaaatatatgaaagaagaagttaaacaataaaagtctcactcgaatgtacagatcatcatcacagaagtgaaacaattacgtattttaaaattgaaggttccaagtacctgataatattaaaaatgatggaggtaacaaataagagaataataatgcatttgcagcatcacctatgatataagtaaaaagaaaaaccttacgctgcaaaattaattaaaaatatttcacttttttgctttcctgattattatgaagaaagaaacacctctctgctcttacagatttgttttcggcttcttagcacctgcaacacgtctcgattctgatcgcatggttacaaattcctcagcagcagaggggtgaattcccacctgtgaaattaatcggaagctctcagtagagattctaaaaaaagataaagagtatgaacataataatcaatggattaccgtgctgtcaaattgttttttggtagcgttacacttgagtgcaataccaatgccctgtgagataaaaccaagaaccaacaattaaagttcttgcaatggtagaacatattttgaagttgagagttgagaccatggaatataagatggatggagcaagaaactatacctgcataatttcagcagcatccggtccacacatggatgctccaagaactctatcactctcagcatcaacaacaagtttcataactgacttttcttgtcgtctaaaaagaaaagaaaattatggaaaagttaatagttgataaatgcagtaatagaaagattatatatgttgattcaataacacatacagagataaaaggtatatgttggtaattccaataacaaagttgtcaaaacaattatcaaccaatgccaactatcagacacaacttactttttattattattattagttaagaaaaaaaaaatgatctttacaagtatagctaagctatagtttcatcatgtattacgagaacattttaagaaaaagcaattggggttggattggtataagaaattgtagcctgagaattgagatataaaaagggtcacttttcggttacgatgaattggtaacttaagtaataccggtagatttgtgttaccttatttaattcaaagcaagggtcatagatagaagaaaagagaaaaaggaaaaaaggaaagagatgtgcatgtgcttattataaaccaatatcattgtcataatttatgaaaatatttaaagcaatacgatatcaagttaccccgaaattgtgttcttcataggattgaagtttgatgagaaaaccaaaatatcaccctctgcctgctcgattgcttcctcttcagtgaggcctacggttgcaagaggcggaatgctgcaaataagcagatcacagatgctcatcattcacaaaaaatgtccagaacacttttggaaatctcaaacatgggaataacggagcattactacggaccattaggtcaatgtcaactctaaactttctaatatgataaaaaaaaaaggg

SEQ ID NO: 23358 - DNA, 6433 bp, Cannabis sativa
aaaaaataattaaccactatgtctatctcgatgatctctttctaatatatcaattaattaaataatgagttcacatttgcattatcatcaagctactcgagtcaaacttgttcaaattaatccttggtcttttttatgatgatgatgatatgatgatgaagaagcttcttctgatcattaaatgcatatataaatgtcatacatcgatcagaaagtgatgttatacgtacgtacattgaccctaactttaaggtgattaatttaaactacgtacagcttaaggaattattgatcgttgctatgttcatcaagtccaagggaaattcttcggtcgtacgtaacgtgatgtttagggtcaactataaataaaacttaaaaagaaaagtaagtgtttactaggtcaaaaagtatggttaattgtttgttatggtcattaatagctgggcacatacacttgcctgtcatatttgatacgattttttaatttttaccaagtctaaataaatgaaccttgtctcctaaaataatatttttatgttggggtaaatattattttaacctttttaatttacaaaaattgaattttgtattatacaaaatagtatcttgagtttattttttatcaaaatacaacttaataataacacatctaaagttattatgacaagaataactatgttttgtatttattcttattagaaatgtcttgaagttaattataataataaaaaaattattaaaaaatattttttaaaggaaaaaattattaaaaattgaactcaaatttttaaaattttaaaaaatatacggtcaaatttatcatttaatgatataaagaatttgattagtaatttttgtaaaatatataatctgaaatagtatcaaatagtattaaaatgtaaaataataatatgtgcacaaataaataattttaattaattatcattatttgagctgagtttatctatcaaaagtaatttgtcatttggatatgagaacatttgaaatttatatgtgtacatattataactttaaaatatataaggtgaagtccacacaaaaaaaaagtgttgacatatagcttattaagctaaaaaagttgagactttctactccttactatttactatttgtttatgtgtaatgataagcacacatataattttgacacataaataatttcaatcaattatttttttttggagaaaattcaattgttattataaatcataaattgtttacagcaacagagaaactaagaggaaaaatttctcctatctaagaaggatctctattcaactctagcgcatattttgccaactcatgggtgacataattagcatttctccatacatgagaaataacaatattaaagaaaaaggataaaagaaaacaaatatttataatcaaatcggagaaacaagataagtcatgagatgtggtgttcaaggctgataagactctcactgcatcagtttaaacttgattgattgtcaaaattagctgggcagcccgattgaggccatgaaagaaggccttagcctccatttcatctgatctaaaatattcctgtactggcttagacaaagcaacaatcacttgaccttcatgaaacctaacaattgtaccaactcccaaaaccttcgtgtcaacaatcaattgtacaacaacatcaacattaattttaaggccatggagatcaaggggtttccacgggataccatccttcgtcctagaagtggagattggagttgagtgttgtgcaacttgaggttgagagtgattcttggctttgatataattattagttgattgcaaaagtatccaggtatgacccatctcccagaactaccatggaaaactttgttttgctcggtccaaatcacccacatgatgtagattattaattccatcactgcctgagtatgaacagtggagagattagctaaatcatcctcgttaaccatttgttgagctttcccaagatcaatatgaaaatgaaagtatttccacaccgccatggcatgtcgacaactgaacaaagtgtgcccaatcgattttcaagcatggacacatctagagcaagtagccgaatcaataattttttcttgtgtaagttcgtagctattggaagggctctatggatagcttttcacataaagattttgattttggaaggtaatttttaatcccaaattttttttaccgattgctatacgaatttgaggttgcttcctggacagattcttccaatgtggtggccaagtggaacttcgattttactgtatagatgctagtagtggtgaaattccatataagtctgtcaggattggaaagaaagtcaaagggatattaaggaccgaattcactgtgattcgagatctatggatctttaccaatttcaattcggtagccattcctaactttgaagctgagtccattgagtagcaattctcttttccaacaaatattgctctattatgtaagtaagggagagtgaccaatatatgcttccaaaaaaatgttattagaaaagtacctattaagcgctttcaaaattctgcaagcttgtttaatcaatacaaagctaatattatcacataaatttgtatcatgtttatatgtttatatgtgatttatgtatgaaagtattattattataattatgtagcaataaaagttaaatgctttccagctatttgctaatataataaagctataaaaactttgaaattttgaggacataaaatactaattaagcctaaatagagaagactcggcaataaattaataaaagagaatagagacaactcaactataaattaaaacaaataataaagacttgtttcttcccctgtgtcattattatcaaacagttatatataatattatagattttcatttcattaatgattaatggacctaaaagaagataacaacatataaacaagactttacaagtcaagccaccaaaaagaggtagcttatttattttattgtaatttcaaagaaattaaagcagagaaaagtaataataataataacaaaggaaagcaccgaacttatagctgcaaatgcaatttcttaaaggacaaatatgatcttctgtacttgtaaaatcttgttcattaaataagaaaaaaattgataatcaaaactatatattgatcagaaaagtatgagcaaatataaatatttgtaaaaataattaaataagttatactaatattcaaaaaatttattaaagcatcccaatttttttttttttagtttaaaagaaaaagtatacttattttctttattattttctaaaaaattatattcattttttatttttttaatttccttgaaataataaaatattttaaataaaaaaaaaaactacattatatgataaagtatttttaagaaatgttgtaacaagagcatgtccaaagacacggtatatattcatatatgttgtgaatatgtgtcgaacgggatcgcatttcttgaaccattttgaagtttattttatatatttaattaatatttatattattgaatttataaaattaaaaattatcttttgagaaattttacaatgcatatatttaaaagtaatgtacgaatctactcctatttgtaaaactaaatactatatcatcaacatatatgtgaacaatgataaaatctacacttcatgattaacaagcacctgcactttatgattatatgtagaaccaaatgctatatatcatcaatatatatttgagcaatgataaaatctgattttatgtgtttgacgaaaagagtcttgtctacactacctctttgataatcatgaaaaattaaaaattgagttaacattttatactaggcaaattcgagcttgcatttttgcaaatctttactccaatctggaggagtttgaggtggattttcatatctaccaccctgaaatcatccatggcttatgctgtgtccacgaggattttgacctccccgaccgcctccggtctcgatcctattaccctgactccttgtatttcgctgggcattcatttaatatgacttagcttccgaacccataaatcaggtaggtgagacagtgatcacataaattctatgtaccgcacttatggattttatgtcaatgcattcaaatagataattataaactattatgcttcctaacattctcttctaatcacataattactaaataagtaaaggcttatggaaccgtgagtcaaacttatctctgacgatgattgtacatgtcttgacgatcttcggtagacaatcctagcggttttgataccaaaattataatgtccttatacttaagcgcgctacaataattttctagttaatgtgtcacctttgcaaatcaaagggttttcctaaaaaaccgtgctaaattaaatttttgataaactttaaactttataaactaatatatatttacatcaaacgggatcccatattttaacttttacaaacattatcaaaatacatttacaaacatgtcgcacatcgccaacaaaatacaatccaagatgtctcgagaccgaacactccaggtcgcgtcgtctcgacatgtacaatcgccatccaagctcggtgctcactcctgttcagccttcgcctttcctttacctacacttgaaagtagcaaatgtgagtcaacactcagtaaaaaaagcattcaacaataatatatctttgacttgtatctaggctcccatacacctatccacaaggcttatcagattagtaagaacgttttttactaaggtacgacctttgtaccacatgaacttcttaccgctattgtacttgtgttggtagggtttgccccgtaccccgagtacccctaagtgttgtatcacatacactccgtacctgtttgtactagtgttggtaagtccgtaatgtactctttaaacatcgtacacaataccaatacgctcattaccactaccatactagtgttggtagtgtatgaatcacaatgagcatgtatatatcacacatacacataatcacatatataacttgttatatgctattcttaccttatttttgaattcaagtgagttggctgacctgaacagaagacctcgtgctggatggatgtcctaagtcacatttacataaacgggtaaataacatgccaaattcctaattcgagaacccaaactcactactaagggttctacgattgcaaattattataaaaataccctaattattaagaaaataaccatctaaggctctaaaaataacatgaactgacaaaacaaactgttcaagaatcctgcccctgatccaattaaccgattttacagggcctataaaaccggttaaccggttttcaccaggtaatccatacaagttctaacaatgccctatttgtgtccaaacctcactaaaaacttctagaatacctgtaccaacctcaaataatattttccaagcaataacagtaagaaacatacacaaagtccaaacatgccattaatgacccaagtttgagtttacaaactcaaacttgttcattcaccacataacacatcaaaatcaacattaagaactcaattttaacttaaaatgaacttagaaactgaaccacaaaccattctaaccctaacaaccatgcactaaatctcaaaattgcataatcaaaccaaaaattaaagcttgaactacacaaagactagagctttagggttaccttagacttgagctagttgaaatccagctgaaaccttgctgaatttccaaagaagtagtggttagaagctgggttgcttttggttgtgtgagagtcgagcaagagaaaaagaaaaaatggattggatttttcttttgtttttcttaattaattgattttcttcttaattgattaaatccattaatcaatctttggatgagtaaataaagtggccagctgccacctccaaggaatgccacctaatccctttaagtaaaattcccaaaatacccttgacttgtaaattaagcaacctataggcttaggggtaaaattgtccaaaactataacctcgcctaaatctggcattctaaatatctcttatgtttatcccgctaagaaaaaggttctaaacatacccatgtgactctaacgaccatccagtgtatttttctgtcgtcgctgaataaaaatcgtaaaaattgcgtaattcctatttaacataaataatactcctagagtttaataaaatttcaaaaattgagaaattataactctagttctatttctaaaaatagaacccataacaatataaaatcatatatactcattgaaatatcagtaattaatgttagttgcctttactaatccatattctaacatgcagtcattacagttattatccaaatagtcaaagatcctatatagatgatctacattgaatatggataaatt

SEQ ID NO: 23359 - DNA, 3448 bp, Cannabis sativa
  modified_base (2511)..(2518): a, c, t, g, unknown or other
cctaaaacaaataacatataacataatacatttggagacataatttattccctatatatattgaaacatgacaatgtatatatatatatatactaagaaaaactaaacatagatagatagatgggagagtgaggaaagggttttggttttattttgtacgttggttagtatgcaaagaatctctttggctcaaatcaaggcctacttctactttggttgtggagccataaaagctttatattaccccaaaaagggtcctcacctttatcacttttcaactactctcccacattattcatttattattatttatatacatattcttgtattgtatgagtaccctttgggaactacatactaaatatatatcaccttgtttgataaaatgactctcattgatcacaaatgcaagttggtgcatgtggggtcatgacacgtgtaaaatgttcattggtttgatgacatataaatgcatgggaacatggtgatgatcaataaagagaaatgatagctacacactacttaaaaggatctattgatgcactttctatctattttactattttagaaaaaagaaatttagtcgtaattatttaagatgtttttaaattttgagagattaggaaaaatttaatacggtgaaagcagtgttcaaataacttattgcacgcgagactcttttatattatacacatccgaaatagattgtttgaactttattttcagcttgttaatttcttttttttttttttgagtttcttaaaattttacaggataataattacaacgtagacgaccataaaaaaattaaacttaatttttttcacaaatattgaagcagataaaaatgcatcagcatatacctcttttagtagagggtacattgtaattttttttttacaacaaaaatatttgtatttgatatatgttagttgagtattattattagacactatagtggtgcctaatactttctataagtgatatattttataattgattagtgatattcttgaaaagttatttttctaaaattaaattttataagacctactatttatttgtataaataataatataacaccaaaaagatattagatagtagtacttaaacttaataattctgtatgttagttaaaagggggaaagaaggaggagacaatggcgttaatacttaatacttgtggtgagaatttatgagaagaaagaactaaaatctaggcaaatttttgatatgtctatatacctctctcttctaaaagatgctttttattaggtcaatcagcatgaaattagggcgcttgggaactgaaaaatattatacattaataataatttcatttaccttaggtctttttcaaaaaaaaaaaatatatatatataaatatttatgttgggtcaaatagtatgactttaggtcaatgatatcattaatttggatcagaatccaatgagtatctatatatatatgagatgtttgttctctctctctctctcttattacaatgaaatcatcttaatctaaacttgattggccattaatatttttaaatatctttttgataaaatatatatttacatgtgtaaattgacggagtatatgtgtttttttataagagcaatactattaggtaccactgtttagcaccttctcaacatgttgtgttacgattgactagcgatactctttaaaaaatattatattaaattatatgggacccgatacttagttggattaatagcgatattgacacataagacggtgctagacaccattaatgtcctttaacatttctcttcttttaagtattaatggtgattaatactttttaaatgcatcgattagtgactaattatcgatacttcttaagatttattatattataatcaaactatatgagatctgatacttaattggtctaatagcgatatttatacgtaaaaaagtactaaatactactcataccttttagtatctctcgttttctttaaggggttattgacatctcgtgattataaataattttttttttatcctttcatcctatataaatagattagttctatttatgtttcataattaagaaaaattggatgagtacttaattatacattattctcaaataataataatgtgtttaaacaaatttgcttaataagaatggtaaaaaattcaaaaaatgaagtgaattataacaatgtaccctatatagctttacataaggttcgacttgattaattaagtaagttaagcttgtgtttagaattcatctaacttaatagttaattttttttttacttattttgaaaaatactattttttttaattaagggcttaattttatttttttcttgtaacctattaaattttatgattggccctaatctccaaacgaaacaggtttgtttcttctaaaataatatgaatattgctattaggtaccagtggtgcttagtactttctttgaaatatcgcgttgcgattggctagcgatactctctaaaagctannnnnnnnaattatatgagacccgatacttagttgaaccgatattgacacgtaggagaatgctaggcaccaataacgctctttaacatttctcaaataatataatatataaattacattacctagataatattatttttaaattagaggaccacaaaaggaactataaatatccaaaacctatgaatatatataactcaaattaaacttcatatgtggaaattataacattggattctttttggatggactcaaaatttagaaaaatgagaaaaataaaataaaaatagtttcaagttttaggatgaatttatgaagcctcttcactataaaagttaccacctatatactgacattcgtattaattattctaccacctatatttatttttatatatatatatatatatattcacgagacaagagaaaaataagataggtcaatttcttggcctgcctaagatttgacccttattacatttttttttaaaataattataaaaattattaattccaaccataaataaattcatatataacaaaatagactacactatactacagaaaattgaagccacgaaattcgagatcatttttgaattattttttaaagaaggaaaaaaagaatagaaaatagggatgactagtattggatttttataatgttagaaaaaaaaattatagtgaaccgatatatttgtatttatttatttattttatggttatgtatgttatattatagttatttaatttttttttgtaaaattttaaaaaattcaaaaattttaatatgccgaatataaaattaaacaatctgttatatatatattttttattattttatatgtgtataaatatattttttaaacactattttctatattatatatagatattattctaaaaaaaattcaagattttgcatgttttaaataagcac

SEQ ID NO: 23360 - DNA, 1650 bp, Cannabis sativa
gaatctgcgaaagaagaggaggaacaaggtgaatgggtttatgaggaggaggctgtggcggccatttctgggtcgcgaaagagagggattgagaaggtttagcttgtgtttgttggggtttgggggtttgtagagagacagaagactctctcgtgtaatgaaatggaagccctaatttgaagaatgctatccccaaatccaattcagggatgaatcgtgtgagggttcgcacgtgcggagtcaactcgttttggtaacaaactaatatctattataagagttgtgtaagctttttgtggtaatgatgagaatgaaagattttgacattttattttaaaaaatatctattaaataaatttattttctctaattttaaaaaaataataataattgtggatggggattttttctttaatttgtttcatgtttatcttcatttttcattgaatctaaattaaaagagaatgatttttttatcacattctatttaacaaggataatatgttttattacattctaaataaaatgaatattattatattaaattaaataaatttagtaagaaacatcacatttttaggtacttttataattttttctctcacttttgttatttatcctttattacttattgtgattttttatatattaattttttttaagaaaaaatcagcaaactttattagttattgataaaaattctccaagaacaccattccaactaaaataatgatataaaaaaagaatatgaagctcaagctatactataaattaccttgttagcataataaacaaaaattaatactaaaaggataaaacatagaaaaacttaaataaattacatctacaataagttggtaatctaattcaaattgaaaatcattatcgtgttttgatccaacttaacgcctctcgaatactaatagcttcagttacaccgagagcaatcattccctcaaaacaaaatgagtgaccctccaccaccctctcctcatggtccctaacaacccataacaaccctaaaattgaaaaattggatcttggcttgacttgaaatgattgaagcttaacccaagactccacacctgaaacccaactagtagtaagtaaaagaatgtgattgttatctctcatatgggctttctcccattcagcaagacacaccaacacaaatagcacaatatcttccatctaacaacttgagtctcacccaacttcctaatactcacccaaccactcagttaaatcaaccaattcgagaaatcaaatagttttcattttgtgttttataattaaactttagttttcattcttactaaaatatttataaatctaactcttatactttttcaataattttcttttaaaatctaatcatatttaaaaaaaattattaaaatgtgatcaaatgatttgtttttaatatttttttattttatgaaacacaatttttttttcttttgatatttgaaaaggtatgcgaactaaatacttctatttatgatgagaagtataaaattacgaaactacatttacaatctataatcatataaaatttaaattagtcatgatgcaaaatatagtattcaaaattgttattcgtgtttttgatagggtgacacgtgtcgtttcaaaagtatgattaattcg

SEQ ID NO: 23361 - DNA, 4132 bp, Cannabis sativa
accaacattttaagagcatccacaacaataccattttaagcataaccagaaattaaagcaccccaagagacgacattcttattagtcatcctttcaaataataaacaagctgaatccaaatttccaaacttactatacatatcaacaaggctggtttgaagtactacatccaaagtctgattgctgatctctcttaatcaaatgcccgtgaatagaaagccccagttttgagtcaccaaggctcacacaagcctgtatcaaccccaacattacaaccccatcagcttcaacaccctccttttgcattcgtctgtaaatatcaactgcttttaatggcttcccacttcgaacaaacccacttatcatggatgcccaacaaacaagatccctttttggcatttcatcgaacaaggtagttgcatcatctattctcccacactttgcatacaagttcaaaacagatgaacccacaaaagcatcatacttgtagccatattctatggctttaaaccaaattgcttcgcctaatctaagatccaacaagcacgcacacgacataagagcgaccgtaaaactagagctatctggcttaacaccttcgacaatcatctgacgatgtaatattaggacttcattagagttgtgctctcaagaataagcaaaggtcatggcattccacacatctacacctcgttgaggcatattatcgaacaggcagcgagctgtcactgtatcagcaatgcgtgcataagattttataagcagggcattgaagtttccacggtggccagacaaatcataagagcgtggaccttagctatggattgttcatcttcacaagataagataagagatcttaagccctttgtccatgaaatcaaccacattgatcttcttattgcttgggaagcaaataacaccatatatggtggttttcaatcagatttttttcataaaaaaagaaatatacataaaattgatacctgaatgagagggggcgggcttggccttcgacgaccgattaggtggttgcacagatcaaatagagagattggagtaaaaactaaggagagcaggtgagaggggggtctgggtctcaccaatagagggggttagggtgcgaaatctaagagggccaagagacggcacgcacgacctgggtgcaaaatcgatcttagagggccagagatggtgcgaaatggctgtgagaaaatgaacctctttggttcgtttaatgttcaaatggggttggagtcaccgatagagataggagttggaattgggccaccgtcgccattgggttgggttgggttgagtctgtcggggtgaggatagggagagtcggtgagctaaggttgtgagagaaaactgagagagaggttgattttgggaagaagacaagagagagtgctaattatgcgatagaagactcaactgaataaagaagctcattatgcgatagaattgggggaattaacatctcgatgcttcagaagtatgtgtatgatacgacccatatcctaagctatgaggatattgaacttcagacagatctgtcatacaaggaacaatcggttcaaatcctggataggaaggaaaaagtgttgcggaacaagactattccactagtcaaatttctgtggaggaacaggaagattgaagaagcgacttgggaattagagttgcagatgcgggagcagtatcttgagatattcaggtaaattttgagtacgaaatttctatgaagaggagatagttgtaatattctggaaattatgattatgttaatttgagcacattttattaaatatgtgattaaattaataattaagcgtaatttattaattacggagattatgtggaattatgtgggtattgtaaataccatttttaaaataaaatatttttggggttctgcgtccgtgaaaactcgacggagtggtcagaaatatcacggcgataaaagttgtgatatatatggagtataccagacttgtttagaatgttaagttttcggtttagaagaaataattagaaatcatgactaaaatactcctaaatttgattttaggcttaagtgattaaggaggggcaaaataatcttttcattaagttgggattttgtcttttatgttattgatatatgttgaaatgaattaatataaggtttagattattttatttaattatagatattggtagataaacctagaaactaaggaatcacacacatcactctcttccttccttcatccccttcgaaccctgaaccctagagccaacagctacaaagggaggttttcttcatcaagttcttcaattcctagctaaattagctaatcctaggtgttattcaaagctttgaggtaatttctttcttttcttatggatttcttatggaggagtgaatgtgttggagatgtactgttggagcttatggcctcaaatggcagaaagaacctgaggtttccacaataggtaattgtcatgatcgagtttggtggccaacttgtgcgagaagacaacaggagtgaacgaagaaccaccagaaccagtggctctgttctggttggttgtagaggaaagagctggtgaggatccatggaagttcaatgaagatggagacaaacgattattcaacaatgagattcgaatgatgaatgatgagaaccatgttgtgttctgatacaatgttaaacgaaatgaattgacaagaattgattctcattaattacgaaagcaaatgatacagtttatatagttacaagattagccagaaaatggaaaagaaaaaactaacctcctaaatgacttaactaacaaaacagaattataacaaccaactgaatgtaaaagacaataactaacagcaaactatcctatactctttgacactgaaaatattattcctatgactcaatatacatcaataaagttaaatataaacatagaatattgaacctcaatacaaacgaacaaaattaaattatattacatatttcacatacttatattatataaaagagagaatttttattcattaaaataaacattacaaatagctagagttgtagatgctagaatagattgtataagcactgaagccatttacaattccagcataacaagtaaacattatattatttttattgttgacaaattacacaccaaacatatatagagttcgatggatcaaggatattgcatatcttattgcaaattacacaaataacattattccaaattacacaaattcaaaagtactcgatcaaggatatatatatatatatcctatcttattacaaagacttaaataataacaatattatttgaaattcaacgtgcatgcatgtgataaaagtaccctccacggtcacggagtaagtacacctcagccagatgtccattcttcaaccttaattcttctattaaacaacgatcaaaattaataattttcttttattagaaaatgttcaaatcaaagaacaaagctaaatagaattaatattaagagttaattaatttaccagtttgacataaatgccaattgaatcaatgaagtggcctgattttccatggaacccaacaatggcgccatcttgtattgggtgggagaaagtcgggccagttaattcgctcccgaacggtccatgttttttcttaagatttgttataaatgataatgatgtgatcaccatccttccataataaatatcatatgtcccacttatggccgtcaaaaactctgaaggcccatttatatcaatctatatacatacatgcatgaacaaagtaggtcagtactttcaccaatttctttacacatatcactaaaaaaatgtcagttttgtcagcatatttttgcactggtaaaagtttagcattacgctctcaaaacggaaaacactggcaaaaatgattttttcagcatgtaaatgcactggtaaaagttaagacttttgctagaaaaattttaacctttttgctagcgcaatttgcgagatgcgtttggaaaagttactttcactaacactactgtaacgtgctgacaaaaatgactatatatatatataatcaaaatattcaattaataaatacttactgttgttggtacaccacgattgtttggatc

SEQ ID NO: 23362 - DNA, 5236 bp, Cannabis sativa
agtatagtttagttgcttgttgtttaaaaaaaatattactagtggatattgtattagtaaaatactcttaaatcgtattttgatactcgggatcctgacctatatatttatataattataatatattaaaattatcttttgagtttagtaaatttttaaatacgggcgttacacttcatgtccgcatgttggtttgtaaattttaaaataatttaataaccactcaatttatattattatttatattaaattaaattaatatatacctataaaaatcaatgcacaaatttaacgattttataataatcaaatatacaatatatcaaatggtatgtgagtcaacgcttgatgtgaccatacaatcaagatatattaggttcaaacatgaagtatgaaaacacaataataaataaatgacaaatgcaaaaatattttttatatgtatataccaattttcttggcttctttcttttcttctagttcttcattgatacgagtggttggtggtgcctcaacttctcttgtagccacatcaactgtcactaaggttgaaaagaagttgcagttggaggggaggtggcaggttcgctgtggtgcaactgatggaaatgacaagtgagtgaaaatgaaaatttcatgtattttatactctaaagataagttctgataaaaaaaaatacatgaagatcattctaaagtctttttaacaaagaaatttgtaaagcaaaaaatatacatgtttctttatatacatatgtttaagctatttttaaaaataaaaaataaaaaagcacaaaaattctaaaccaaaaaaaataaaaaagtgaagattgacattcatgttttctgtttctaaatttgtttacaactttttaagtcaaaaaccaaaacaagatttttacttttattttcaattaatgtcaacaatataattaaacttttaattgtttaaggaacaaattaataatttctattaacacggcctctctaattccaaaagacacttaccttttgttgacaatgcccttctctaattgtttcccatctccttaaaaaacagcactcctaattcttgaaccttatttaaataatcaaaaaaaaaatacagagcataaaataagctttagatttgtgtttaaatatctcaaccaaatataactcaatgactgatatgcagaaaattgtattgaagattataccttaaaaaaatgaggggtttgtagtgtcgtgatatgtattctcttctaatccacccatcgtgatcaataaacttagtagtagcagagaaccttgaaagagcaagaaaataagaagaagaaaaacccatatcacaaaaagaagaaaacgataagataaagacttagaaaaatagtgcaagagcaccgaaaagaaacaccattagagagccccctacgctctattgtcttttaaagacgcctcctctgtcactcgactcactcttgggttctttaaaggattttggattgtctagtccaaaattaaaaaaaaaaataataaagaaaaaataatgaagttaagaggaaagaatttgattgaggatgattataaggaagatgagcgtccttaggatcagtaatgaagttgcaaagagtggccaagtcgatattagcctcatttggaaccttattcttgcgaaagggatgatccaaattgggctaacgtcgtccaccattcagctatttgagaaaactaaattggagaggaagataaaatgagattttgaaggtatcattttttaattaataatttacacatgtcattttaggagtaattaacaaaaatatttatataaaaagtcactcaattattgctcataaactaagaattcggttatatatatattcctcttgaattaatgggtaatcgcacacacattatttattttttattatttttgagttctctctcctgtttatcttcttcttcgtttttttggctcaattttatttcttgttcagttcttcttcatcatcttctttttattttttttctttagtttttgaagttttcagtcacgtttttgagaaaaataagagtatgatttttttattctaatttttcagaactagacttacaaatataacttctattgcatctggtgttgaagttgtgcagaagatggttagtttttttttaatcctttctttttcttttcttttttatatttgttttagtgttgttttatggttgttttgccatgatttatttatttgacgtcgatttcactatgcttgctccatctcgctggaattaatgattattttctaaatattctcgtattgcaatggtggttctgtccgtgggtgtggaagatggaggttataaatacatatcttcttccttctctatggttgtttttgtaatttttgattatgattttcttataaatacatttaacgagctcactgacaaaagaattttgaggtgtgtggttcttttatatttttctaaggggttatatttggtttattattttacatttattgttgtgttgtttttgttataaaataatatagaataatataaaatagataagaagaagaaaatgaagagataaagagaaagtgaatgagaatttctcagttgtttatttcaatggggtgacctcctatttatacaaaaatatgactaaaagaatgggaaactaaatcaatgtaataaaaggaaatacaatcaagcattaatggtgataattaatttggtgatttggacatctataaataatatttcataacactccctcttggatgtccataaaaactgtctcattaaaaaccttgctggaaaaacttggtcaaaagaaaaagagtgcaatgactcccccttatttaggcattcgtggagatcttttaatcgacgaattctattcttgtatgtcgtcttctcaaatattaatgttggtaatagctttgtgaataaatctgcaagattgacacttgtttgaatatgttggacaccaatatagccattctccttaatatcaagagttaagaagaatttggtgaaaatgcctttagctctatcttcttcattatacctttagttgagcaatgcatatcgcgttatcttcatacagaattgttaatgttgatactagttatagagtgcaatccatatatttcccgaatatgttatgtcaatgatttcactcccacacatttcttacttgcttcataaagttcaagtatgttaacatgatttaaagttgcctcgttaaaaaccttgtcaggaaaatctaatggcacaaaacctgagctaaggaaaaatagtgcaatatatatatttcatattcataactatttgcaagttgtcttgttaaaaactttgtcaggaaaacacgatgggacaaatcctgaactaaggaaaaaagagtgcaacattaatatgtctccccctcatgcatatgtgatccacaattatattttggtgataatatatcttataagattatcgttatcacttttaaaatatcattgtatattatctatgatcatatattttctatctcttccagagtatgtgtggacttctaaattatggatgaggggttcatggaacatcaatatttatccaacttattaaatcattcatatgtgtatacaactttgttcatactaaagtttaacattttaagtagatatgaacataaaacattaatataaactttcatctgcgagaatgatggtactctcattccagcactgaagtcgagtacagaagtttggctagtgttacagcagaaattacttggattcagtcactgctttcaaaactaaaagtctcaattcttcgacctccaacaatttggtgtaaatatctcagcacagttctaatggcagctaatcctattcttcatgcaaggactaagcatattgaactcgacttatactttgtgagagaaaaagttctggctaaaactctcatcgtgaagcatacccctacatatgatcagacagcagacattctcaccaaggcattgtacaataccaggttcatgttacttagcaccaaacccagagttgagtttctctcaaccctgagagggagagtgttaagagcaataattcataactaactttatttttcagttatgttagttagtgttcaagggtagtttagtcctttacatttttgtacctattttgtgtataaaaggttgtaaacaactctttttctactcgatctctttccatttcgttgtttgttattttctctttctcgtttcttcacaatgtttatatatatttatatatttttatacgataataaaatgtaaaaataataaaaaaaaatgaatagtttgtaagttcccttatattttttttttatataaataagaataaaatacatatttcaaattttaaaatatattagtattatatatattaaatttttatattaatatttttcacattaaaatattaattgtaaatataaattttttaaaatatatatatagacaattaaatatatgagcagttgattatgattatttttacatatcaatcaacattcaatccacacaagtacacattttaaatttttcaattaaatccaatctacacaaatactaaaatccacactttaccaatttaattgaattgaattatttagggacacaaatcaaattttcgttaactaataacttcgaagttctgacacaccaaaccacctaaaatgatcttcgtactctagatactctcttaccaaaacgctcatagtattctttactgcaatatttaccattcaaccagtgttgtataagtataactaaaaaaggtctatctttataagcaaagatcggacgaattgaaatagtcatcagcgctacgaatggaactagtcactaaaaaaccctttaaacataaaagccactttttatatggaatgaaggtgatggtaattgcagcttcttcaatggaataagaatcaagggccaagaaatataaatgtactcatctcgcatatcctgataataagataacaaaggtaccaataattccaaaactaaaaaaccacaaaaacaaaaactctttggccaaatccttacaaatcttttttgacttaaaactacaaaatatcacctatctaatacaaagagttataatgaatagaagatgaagcagttacaactgttcagcgcttcccaccaccaccaccgagcttcggaccctttggtgcagctccctttgaaacgttacccttgcccttctgt

SEQ ID NO: 23363 - DNA, 4047 bp, Cannabis sativa
gcttccacctgaaataccaagtaggaagacatcaactctgtaacagaaaaaactgtgaaaagatgatatccattaaaaaagagaatgacttaattgccaaaaatttaaataataaaaatctcttttcttggcaggaagaaacaagtatattcatttcaatgaacaaagaagaaaaaattgaaacctcttgccagctactataatgattgtctgcacttaatatgtgactgtatctctgcaaagcttgtttcatgtgcatgacctaaccatccaaaaatattatggacaaacaaaatattaaatgttatgcaactgaataaacatgtttagaaactagtcatgccagaatacaataaagcaaagatcagcaagcattctgtaatataaaaaagaacctcattggtaattggatcacttttaggcaggtggcagctgcacatggtgagaacatccaaggcagcatcaagctcccatctatgcatatacctggaatacatatatgagggatctaattaatattaatatccagaggtacaagctttcaacaaagtttatgatcagaaattaggtcatgcaaaatttttttatgagatcaagatgcaaaactgcaaattgaacctatataaagtgagcagaattcaactaagataaaagtacataattttccacaaatgttaagaaaatttggcaaataatgttgtgtcttccagaattatcaggtaaatcaaacagccatagcattcaccacaagtaagtaaacaagacataatttacttacttgagggcaactctagcagccaactgcttatccttcaaccgcagacaatactgccaactattgctccaaatgccgtggcctccataactttggttttgcccagatattgacttgttctcttccccgcgttcaataagtagctgcagcagttgatctgaggctcccttacgtagaaagcgatcagaaagtgcaagagcatccattagttttccttcatcaatcaatctgaaaggaaggccaattgatcacatccatcagcatgtgaaattccatcatcattgcaatgctaaatacgtatgtcttaaatcatcatacttggacacttcagttagaaattcagaaagaagacgtctttagcaatatactaacacctagaaattacatgcggctaaatatggttattctttcatattgtgtgagtttcggatgtcagactaatgaaaaattagatcctaaagttttccttttatcaaattgctaatgcagatattaacatacctttaagatacaaagcaggttttataacttactagtaccattacaattttttaccagagaatgtatatgcaattagcaatactctttcagattgctaatagcaaaatttatgttaattagactctagctcagattgacaataacccttgtactggaagatatccaaatatctattttacagaagaaactttttgacagcaattttatacatgagtaagaaagccaaacaagctaaccctcataaattttaagggtaaagatggaataaaataatacctttctattgctttctgatagggttcttcattctcccaattaaaagaaagaaaaaccgaattatcatgttcagcaacatcagttttcatagcatcttgccaagatgtattgggagctgcattattttggctgttgaccgatgataaatttgtggacatattagtaccaccaacattttcatcaacctcagactctgtatcactatcatgctcatgaagtctctttatagcagctcttacttcatctttaactctgctgccatcagcagtttgcttggttgttactgcaaactctgaaactcgatgaagatttgtttgcatttgtatccatcggtttaaagttgggaatctgttcagcaaatataaatttaaataggtaatcacagagtagattatttacaaggatgaataacttcaaggagttttaagctaacctctctgattgatcaagagcaaactcgtaaaacaaacgattcgtatcaggtgcttcgagcaattcaccatgcaaagagcttgatgtagaagagtcacttccactgtataaaatgctactcccaaatacacatgctaatactgccctaactggcgatattttaaccaagtgttttacgatatccagctgtaaagggtagagagggatgccaggtaatattgatgaccagtcataacaattaggttcaccttttgaagaaggtgatggtagtttattctctgacccgctcttaatgcaagagggtacaattggaatgcaagcccatccttgaccagagcgtggaggatacactgacggcacacacgctgaaataacttcatgaacaaagtcagcacacataatctcagccaccttgctagcagcatcagtactaccacggtcaaatacaaggcgagttaaaagctgcaaacatgaaaatatcaaatcaatacatatactatccagagaaaaccctcaaatactcagttggtcccactcaaacatgagtcaaaacagaagtctaaatgtaacaataactaacaaacagtgatccatccagaaaaggatcaacctttaagatataattaaaacaataaaatactccaaacatcaaactaaaacaaaattttcataattcaaatatatatatatatataaatatatataaacttcaaacaaatctgcaatgtattaattttaaagaaaatacaagtggaaaaaccacatgtatcacctacatataaacagcgaaacattccaatttcctaattaaacagataaaggaatctctttgaaccccttaaagttatgcaaccagagggaaatccagaatgattcagataagtttcaacttgattttgaaatatattcttttgaatacagttaatacatatcaacagaagcattatgcattgaatatttgcaaagaccacctcaccaatgatcctacagatgatggctgggtacgcaaataaaaatactaggcatatgattattccaagtgtctaataaatatcactgagacaaaaaattcactaataataataataatgaacacacgagctctttcaacgtagcacatgtaataagtgctgaaatgatcaattatttgatccaagtgaaagctcctagaacgtgttccacaggtcaatatgcaaaatacaccaacacattttcatgtacgttttatatacatacatataacatatatattaatatatgtatgaaacaatacacttatcaaaaaaaaataataagagaataaggtatcctcatagaaacaaaaaataaacataattaaaaagatcatttctatacaattaccccaactgatttgtattactcaagaacttaatattgccagaaactccctaataaacttgggaggagatcaataagacatttgacattgcctctttttaaatatatacataattgccagaaactaagtaaatctctttccacttatagcttatataaatcaatccaaaagtacttgtagaaaaagaaacatgtccgaaattgattccatcacaaatcaataaaataaacttggacaagaacattagcaaacaaacaagaaaagttttcataacaaatcaaccataaacttgacagcaaataactcaattatgaagatattgtcttacatccttaggccactcatacacgagtgagaaaaagttgaagtcatgagttgtatcagtcccatctactatgtcaccaatcgcagcaatatgaagaataaactgtgaaagataggttgtgggtttgttacttatgggaccaaataatctcttccctgtctcctttacatcataatccacaggctgctcattaaaatcgccaggggctgaaggtaaagctttcttctttataacttttagccctagcccaagaaccccttccttgtcaaaatcagaaaaagccttctgatcagaaggctggccttcacctttaagaaaatttggttctgcttcttcatctgctatagctcttgctagattatggagcttacctaaagt

SEQ ID NO: 23364 - DNA, 2002 bp, Cannabis sativa
aataataataaggacagtatataatatctatatgttattattattagtccgtgcaagagtaattaatgttatttttttatttttacatataaatatttaaattattattattattcgtaagagttttgtattatcatcatcatctttttcttttttctttttatttatttattttgtaatttgtaagtgtacctcaacgataattgtaattgttatgtctatcgtgtacaattggctacagatccatatgagtacgtgctctgtagtggagctatataaatacatgtcaaattaagtattttgtttcttaatttctcctctcttcttcttcttatttattttttcattacattgaataaattaaaaagtatataatttttaatctttccataatttcaaatatgtaataaatttctcttctctatctaagaatattttatttaagaataatttttgatataaaaaaattaagtctcaatttaaatcaactataaataagaataacttttaaattgtaattagttatataatttttaagtctcgtattacaaaaatataactttatataagaataattatatcttaataaaatatataaatatagtttatatatttatttatgtttggggcaagaatcaagtttgggctggagtctgggtccggggatgggatagggttcggggctggagtctgggtttagggtctaggtttggggtctggggctggggcgggggtttgggtcccgatgccagtttggggctagggaccgagttcggggtctaagtctgagtctagggctggggtcaactccagcctcgggtccagggtcagggctaagaccgaggtctaaggactaagtatggggttcgagttcgagtttgggtccgagtgcgactctagggtcagagtccggggccagggtccgggctggggtcggggtccgggccggggctggggtcctgctgttataaatctaacaagtaagtatatgtattgcttttacaagtaatactcaggtaagtgagattgttcccaaaaggaatgtagctaagtaccaaacaattaaatatttttttctatttaacaatcgaaaaatagattttaaaactaaataatttaagcaataattaaataataaaagaataaacaagatttaactaggaaataaaatatagagaattgcttccacttcttatttcaataatgcaaactaatattcttcttttatctagtatgactacggattataaagtactgattaagatatatggaatctaaattatatggcagtatcctacatttatgaggtataacacatataatcaacattaaaaaataacccaaaagctacacaagctacacaaatacttttgttttgtcactactataatatgggtcttgagaggctattttttcaacccaatttataagaggagaagctaaaaggtgtgaaaatacctgcctagttcgaaattaacatttagatacattttttttttgataaaaaccataggtatagagattaataaaaccaattatgtggttggttaggggttgaaaatcttcctgctgtatatataatacatacgacatcggttattatggaaataattgacaccataggagggcacgtgtcaataaactgtgcacgtatagcatcgattattgcctaataaccgatgccatatgtattatatgtacgagcagcagggtcttcgtcttccccatttaacctccttcttcagcaagaaccagcccgaaaaacccatacgaaaccctcgccaaccaccgtggaaaaccccccattctccctcatttcttcaccagttcacactatttgttttttaaaatcttttatttttaatatctaatcctatacactaaaaaagttttattttttcaccttatttcattgtacctgaccctattaaaataaaaggtggtggtataactccggccaccaattttagcggagaacacgttgaatctcaacgtccattaa

SEQ ID NO: 23365 - DNA, 2224 bp, Cannabis sativa
gttgagtgctccaaaagaaatgttctaatcgaattctaatatttgattttttttttctatatgttattggaaaattatacaacttgggacaccttatttgtccatattggtatgaaatgtcattttttataaactagaaataattattaatcaatttttcttatatgactgcatgtattgtagttataccaggtattttatatatattttgctttctatatatatgatagggtttgtacttacctatggacacatagtaaattgtgtcgtgcaatcaaatatattgtagtgtgaatcaaataaattgtttgtgatatggccgaatatcttaacttgtctagacacatttgtatgtatatataaatatatatttatataataagtaatacactttttcagccttccttaagattatttcctatattttgaaattttttagacatttcttctcatttaaaaactcattcaattgcgtgaataagataattatagtttatgtgaagcgtgaagtgagaagacaaactatgttgaaaggtatatgtctattatgtcttgtctcatgcagagaaggataaaattacttagagagagaacgctcataacctactcactctcaccctgtcgatgattcttcaaacatgttagtgtgaatgtgaatgtatcaaccatcaaatggttattaataaatatatctatttttgttaataaaaaatattagtttttttataataaatattttatagaataaactgtagtattaaataaacaacataaaattcttaacctgattttgaaattaattctttctagtctacaaatttatattattaaggataataattagagtacagaatataattatgttaaacaataataatgtttgctatttctcttgagatttttccgtcccttttagtctgggttctatgtcttacaaggactgaacattttgagcgagttcaacccgaacccaatcaagccaacctgcaattttttttaaaaaaaaatgttcgggcgggttgggttcaaaccggtgccattcgggcgggttgggttataacttacatattataaggtaaactgtaaatcgtttgaaaaataagattggattgaacttaaaatatatctaaaatatttagtaaactatgaaaaataagttggatgcaaaattataatatctttcttatcaatgaaatacatgaagagattaaattatcccatattcaggaaattatttaagatgttgaattaattttttcattatcctctattttcacatcaaaatctattaaaaattatattgttatttctatccaatccaatatcatctttctaacgtgaccaacaattcagagttagtgccacacttaaattaattaaacataccaatgtattttattttaaatattttaagtgtgtcataatcactacttattctaaattgatatttcatataaaagatgaaagaaataattattttgaataaaaaattaatttatttaaatagttgaccgagttgaccggaacccgccaacccgtgacccgccaacctatgccctatccgggtctgggttcggttttgtttttttgaacccaaaacctgtgaacccgaaacgtgcgaacccaaaacccgataaacccgcccgatgttcagccctaatccctatttatagatgtctcaggtgatagttattctcttgggatctattcattcataacctctcatgaaacttggatattccccacattttcttattatgcatataagataatatttaccgagatttttgaaaaccaaatattttaagagcttaagaaagaaataacaaaataaataacaaatacgagattttcacgtggttcaggctttacctatcattagtccacgagtcgagtccattgtccattttattaggctcattgctcattgactagtaaatttgaatacaaaaataaatacaatagactagaactccttattcctctcgttcctcttgaagaagaagaagttgggtaggattttttgtggagtttttctgtaagtagtatattattttttgtttccaaagcgtctctaaaaaatatctctcttttctaccttatggagtgtaggggtatttataggccagtttccctccatgcgctagcttgaattgatcacccttaggcgagatgcagtcggttgtttggcaggtggctgttggaagttattttaccaggaact

SEQ ID NO: 23366 - DNA, 2620 bp, Cannabis sativa
  modified_base (99)..(103): a, c, t, g, unknown or other
gaatatgagaatgaaatagcagatttcacaactattatggaaatataatggcaatataattgacaattcaacagccagaaaataataataataataatnnnnntaataataataataataaagagcttaagaagaaagtgcaccttcacttcatcctagagtctttttttttcatgctaataatttatccaaaataaaagcatgtgtttcattctctcctatatcaaacccatcattaacattaaattgacctccaaatgacctattccatgtaataacacgcatcactctagtagagtgatcaatatgtccggttaaatacagcaaaaggaaatttatttcagattccaaaaccactgtaaacaggttacaatcaatcaataaattactcaaacataataaccaccgtaaacagattccaaaaagaaatcacacatcccttcaacccagctcgaaatcacacattttgatttttaacaaaagaacacaaaaatgcagctctttcaacaagaggaattcaatcagtgaaatcacaaatacataatcagaccgaagaaatgaaattagcgttcccataatcgataaacaaaattaaatcttacatatgtccaacaaaataacacatacaattaatcaacaaatccctaacaatgtatcaatatctcaaaaataaaagatgaatctttatcaagattgaactgaactctgtgatcagcgccttaaagccatctctgttcaaagatctaaataggtcttagtgcgttatgccatccaacaactcttctctcccctctctctccaagtatatatacacatattatagatatttagtaataattgattttaaataatatattgttaataacaagtacaaggttcaaatttcaaatttcaaagttcacatataattttataaataatgacaccaaaatatatatgatattaattttattttaagaaactgctcctcaaactcagaacatggtaccttaactgtatataagaggctaaaaagactaagaattcttcaaaaagtataattgatcgtattattttcatacatataagaggctaaaatggctaagaattattcaaaaagtataattgatcatattatttcaatacattttactcagaacttggcaagttacatcagccggataacacatttaaacacaggatggttgaaatagagagtgcaagcaaaaattatttcacattatgtagtacacaatgccacacaaaaacccaaagaatagcagcctaaaaaacaattggtcatgtgtgagtggcattttctatctctgaaaccttccatgtgaaatacttgccacattacttttctagatattttagaaaagagagaaaaaaaaaacaagcaaaacataatatgtatagcaaaactgaagcaaacaattgcaactctcacaatttcagtgttcagatttggcaccaaatttttttatatagattattataaaattgggaagaagaatacaatggcaactgcaacaaaggatctaatacttagcatcacatatcaacacaaaaactttttcaacgaaagattaggcagacatacacaatactgaagcctaactctaaaataggataagcttgtgaaactgaacaaaacacacacacacacatacaaaacgaacaactttcgaaagaagaaaaactggcagcgttattgcccaacaaacctacccatttcagaggtagataattggatgccaacaattcatcaaaaccaaatataaagtaaagaagttgtagtataaaccaaaaagcgaataattttcctttacccaaaaaaaaaaacaattatggaaaagaggagaaaatgggtcgaaaccgatcatcaaaatctcttaaattatcatggaagagaaaccaaaacagttcaaaaatcaaaaaaaatttgtagacaaggaaatgatggtcaaaacacctgttaacgaaactgacctagggattttgattacacacaactatatatataattaggaataggatgatacctttcgtggccagtggtgtttgaatatttaaccacaccggagtctcctaattttcttatcgaggaatggaggttgagacggaccaatgagaagacaagaaagatagagcggcgtcggagttcaaggtggacaaaatgggggctgaaacgaatgggcatcggaattcagagaaagaacggcgtcggagttctcaagaatgaaaaacagagctagaaaattgatttctctctgaaattttcgatcaagcaagctgtgacatgaaatggggaatgaggttttattatcagtgctagtaaccatgtaactatatatatacactagattttgttcggtctatttatgatcagtctctagttaatttcatattaaatttggtctgatgatgaatcttcaataaatctgctctatttatgaattactctattttgagtaatctcgaaaaagtttatccttctttcctatgaaagtatatagtgctactcggtttctaaatttctttcttttaaaattggcctcaaatgaagaattttagacaaaaaaaacatatttcctaaattactctgctttcatcgggtaacaaacatcttggttctaaa

SEQ ID NO: 23367 - DNA, 2667 bp, Cannabis sativa
  modified_base (2164)..(2167): a, c, t, g, unknown or other
ttaaagaagtcttttattgtctttatcttaaatggttttaaacggactagctagtgtgacgtctcgagaaatcggggcgttacaatctccaccctggatgcaaagttcaaactaaaggaccttggcaaccttaactttttttcttggcctcgaaatagccaaatgctccaaaggcatatcagtcactcaaagacccttcacacttcaattattaagagaatcaggttgcctcggctctaaaccactctcaacaccaatggaaccaaatacaaaactcagcaatgatgatgaccaacccttacaaaatccaactaaatatagaaggttaatagggaaacttctctacctcaccataagaaaacctggcatcagctttgtagtaaataaactcagccaattcctccaatctctagtgcaacctcacttacatgctgcaaatcgcatcctacattatctcaaaggctcccctgatcaaggactctttttttaggcatcatgtttagctcctcagtttcaggcctttactgatgctgattggggagcctgtcttgacactcaaagatccattttagggtattgtgccttcctgggacagtcactcatgtcttggaaatcaaagaaacaacccaatgtatctcgatcatcatttgaggcagagtatagggccatggcaaatgcaacttgtgaactcacatggctgcactccattatcaaagacttcaacatacaaatataactaccatcaatcctcttctatgacaattcaacagcaatgcacattgtagaaaacaccgtctaccatgaaagaaccaaacatgtgaaaatcgactgtcacattgtcagagaaaaggttaccaatggcagcatcaaaatgaatcatgtatattcaaaaattaacttagtcaacatcctaacaaaacccttatttcctaactatatttcaatgaccttgtacccaaaatgggtgtcaaaaatttctacactccatcttgaagctaggggcctattaaattcagtcaagttagttaagtttgttaggcatttagttaaatcagctggttaattttttctctccaattgtactggttcaagctctgcctatataaggcatcttttctctcttgtaaaaatagagttttcatataataaaatattgcttttttgttctaataaaaaatgagatatttgattgattaaattaagtgttacaatgaaatgaagtgtataatatttaagattaaaattgcgatatataataaatattgttatgagtataatatataatgtgattgggagttacatatatgtatattcatataagttgtaatataagatgtggagttactcatattttgtaacttccacattatcaccaattaagtgtgtaaagagtagttatacaacttaatcttttgaaattcaaagataaaatacatcgcggttgtaaatttaattttgtcatttataatgtgtataagtgatattaaataaagtgaaaatagtttggaatagtttagagagttatttacaaaagctgaaaaatctggtaactagtaactagttagtgtttttttagcgttaatattgaaatgttttctagtttgggaattccttttaacaactcccataacctccaaatcactcatttaatcctatttatacccaattaagagacggtaatagtcattgggtgtaggatgtttgaatttcaatttgtgtgatcctaaacactataaatagagaccatagtttatcatttgagacacactcttctcttctatctttcaaacacaaagttagagtgttctaaggcttgatgattcccaaaagtatttcttcaaagtcctaactagaggggaaaataatcttctttgacaaaggtgtggaaactttgttcaagcttttggtgatccccatctccactttaggtgtttgttcttctattctgattttgttctattctctagttttatattgttctcttcttctcctctaaacactcttatatatactatcatatatattatatctctattatataataataatatatatattatataacatactatatacactctttatatatatttgatatctctactatatatcatctattttatatatattctatatcatatatatactatattatatatatatnnnnatatacttttatatagtttacatttatttgtatctttaagttttgagttgtaacacttttcttttatttgtattttgtcctttgaaattgtaactgtttatttaatatattgtccttataatatttttgttagagttgtaattgttttggtcttttattcatcttattttattcttcttacaatctcatttatttctaacattttttatgggttgtattttaaccaaacctatttatataacactttattgtccctttttaatggtggtattggtgttctttatgcattcattgtgagttgtgatttgtgatttgtgtatctaattagcgtaaaatgagttgtgtaagctaagtttgtatttcatatagtttaaatgagtagattatttgtaattttctgtgtactatattatttgtacaaatattataaaaattaaaatagtaaaattcgtgcatatgaatacgcgcgttggaattatctttaacgcaaattgtacttt

SEQ ID NO: 23368 - DNA, 4175 bp, Cannabis sativa
  modified_base (4145)..(4146): a, c, t, g, unknown or other
tgttaaactcatcaatctgttctctaataaatttgtctttcatcatcttgaatgaatacagggcatgtttcagatataatctattcaccaacgatttagttatatacaaactttaaagtttcaaccacacacctgcgactgtatcttcttttgtaacctttttcagaatcttatctccaagattcaaaatgatcgcactatgagctttgcaagagtttctttcttgtcctttctagacatcgaattaggaagtcttctctcctagcagagccttatacaactcttggtgaaataacaaagccttcatcttcatcctccataatccaaagtcattcgtaccaataaaaattttaacatcgtattttgctgcagtcatgattataaacctttttctgatatcagtttgttgtgcaaaatagaaacaatcaatgacttactatttggtatattgaatcaaataacacgcaacacgatcaagaaataataaattaatagatctcagaattcaagtaataaataatgcagtaaaacaaaaaaatacaaaaccatgtttaacgagtttcagccatatacaatactctacatctcaattagaatagcagcaaccatatctttattgatattagtatttataaggttatacgaatttttacaaactctcagagattacaagaaaatatttctctctctcaaccttacactatcacgattttcacttaagcaataatggtatgattcttcctatagattacaaagatttgatagttccttatatatttgcattgttgcctaatatagttccaaaattatcgtggcacatttacactaatgttccaattcatcactagcaacaataatctacgtcatcactgattcactggtgataaaggttacaagcttttgtgttcattaattttagatttataacttgaatcttttttataattatcatctacacattttgtaatctcagaccatctccaatagaaaatataaaatttgtacaaatttagtacaaaaaataaatttatattatatttgacatactatttacaattatactccaatacacaagatgtaaaataaatacgaaaaatattaattattattgattatttttttgaccaaattattattgattattattttctattttattgaaaatatgcaaaaaaaaaaaaaaaaaaattgatgtattattttttattgtttaaataatagtaatatagtaattaaagaagttaaagtcatgtaaaaattaataaatcataataattagcggtactataataaataaaaagagtaaaatttattgtgagttaaattatttacaatggtatatctcaaatttggcacaatttttagtaagtgttaaatttgacacactttttaaaatactatagagtagttttttttttttcttcgctaatttataataatacactacttatttagtagttgagatgctctgtaatatgttacaattcaacaaattacaaaattatttgcctcaccactaaatcatttaaattaataatattacatacatggaaaaaaaattatacataataacatagcattgtttttctaaccaatcacatttatttaggttcggagcaactgttataaaaaagaatgtcagtacctcagttttgtatgcacacatacaataaatctttaatgaaacaattcacattaataagtcatcatcttacttatattattatatagttactagttaatgggaagaggtaggccttattttatttatttatataaaacaatgtgcgaatatgtacaaaactgtgagattcactcatagtgattgaaatgagaacaaaaattgtattgccattctattcaattttgttttaaaagctgcccccaaaaaaaaaaatacaaaacaaaaagcacaacccatatttgtttccttacagaaatctctaatttcattcttaaggattattattttttgcccatactaaaacaaatagtattatttattcaatgtcatcacaattcccttattattgtaattggatttaattgcaccaaatctgagttgaaaaatatatacacttgaaaaagagagaaaaaaaaaaacttaggtgtgtgtgtgtggtgtgggcctaatctcgaaaatgaaatagaaactgaaaaaagcctttaaaacagccttgagtttcggcttcatacccaagagcaaaggaagatggatggatagtaataattcacaattatttgttgtatattatattttagagaattaatgtaagacaaaatagagaggtcagaatatttcagaagcaagtgtccccttaaatcccaacaacctacactgttaccatgttccccttataccacgcccgtttttgggttctttcactctcacacattttttttaaagaaaaattcacgcatgagtccccaccctcattcccataccccactactaatagtagctagctacttctaataaatatatttgcaattcacattccatttatgatttatgattaatgcttttcttttcaatcaattacatgttacaattataacaatataaatgtttttactctattataaaatatctcaatcatgcacattcatttgtctttttctgttaaagtgcatccaaatctccattattatgtttgctaaaatgagttgtgataaagaatcctacataatgaaagtaaaaacaaaaatgttaggcaaaagaaaaaataatgactataaaaactaaaccatattattggcttgagatattaatataatgactaggatggggtcagtcctgtattataagctattttagtttctgatgatattgtcctccattgcaaatatgtataatagagtagagccaggccatggccctagtcaaaacaaagaatgtacagccgagagtagtgaatggtgactggtgactagtgactagtgactagtgactagtactactgcggtcccagccccaacacatatttgtgggccccgcacccaccacacatcatttcttttctcccgtaatactctacggcgccggtgtagtggataaatgtgcaatacggctcaaaggccacaatcaattgaacagactactgggtctaaatatatacagcattgcaattacaccttaatgtttaatatatgtggtgttaaagttttataatctataatgctattttcttcaaaatagaaagaaaggtgaaaaaatgtaaaaaaaaaatgacttcaaataagttattttaacacaaaatttaacgaatgttaccgacattattcgttcttcaaataatattttattcaatgtattatttaaataaatgtggagatcaaacaaagaacctcatgtatggaacacttgtttggggcgagttatacatgttattatactactcatctgccactcctattaggttggcccattgggttcaagttatatatgttattaattaaaataaaatgggtatataatatgattttttctattttattatgcttaattaattgtaaaggcctcattaaaaggtaaaataaccatttataaaaatatgaggaaaaaataaaaattttaatatatatagcatgtaaattttttatttattaatttttatgaaagagaaaaaaatttcattaatcaaccaaccaaaataaacaccaatggcaaacaaaccacaaccacccaactacaagcccctcacttcctatttatcatgtaataagcaagatataaatttatgtttatctatactcatctttttgctttataagctataaattacactacttgttcaatatcttcaatcatatgtaccactgtaaaagaataacctcatgtatatatctattcctgttgagtaaaataatatatgttgacactgtcaaagtagcatgtacaatagtcttcaaacacccaaaatagtagaaatccaaacaagccaatcatcatatttcaaaggccaagcatcaaaacccagtcaccacttaaagaggccttttactacctgaaccgagagaggacattcaaaaataaatgctcatggctttcttccttatcatcacaaattgggcacaaaacaaaattcaccagaatatgaaattgaaaccgaattagaagaattgttgagaatcatggggttccnnctcaaaaccaattggcaatgagtggagta

SEQ ID NO: 23369 - DNA, 1794 bp, Cannabis sativa
gatagatcatccttggcgaaaccaagtttcagggaagaaatgaaggataaatttccgggtaacagccctacagaggcatcggaatcattagagaaactatctagacaccctgtgtcagcttattcctttgtcatctcttttggggtttctgctgctatagttttgcttttagtttcatttggctggagagctctagatgttggtgttgcgtggaagtaggctgtaggttgtaggttctaggttctaccttctagatttcctttgcctagcctgagagctctttaagttcttacctttttgtggggttaaaggaggttgaaagcttgtaaattgcagtcataaattgttattgccagcttagattattttgtctttgctttatagttaattttttttttgcctttactactttaatgttggacatcgaattcaaaaggaaaaaaaatgttggcatcaatattagtgtaagaagaaaaggtaaaagataaatattcttaactaggaattcacatggacaacgttactctctcaactaaactttattatctatttcaacttaaagacaaaaaagtacaggtcacagagcacctaaaaagagaatgtagcattcagcaactgtagacatgtgctctatattatcccatcttgcaatttcacaagtttatagcaggagtccaatttacattagtcctattttggtgagtaggaaacacctatttctctggacctcttcatatattggcttcctttggagttaatatattggattcctaaatcgttacatagtattttccaccgaaagaagaaaatggattagacaagatctttccgtattggatgttggtcaacaaatggtgagaggttgttcatatgaagtttttgatttttttgtggtagcactttagaatgccaaagaaaagactagcacttcctaatagaactatagaaggttgagtatttgaataggaaaattaacaagacagatagaagctagatgatagagcagattttactgagaattgtccataatttgttagggtccaggttaattggtcttgctgatccaatctaattacatgagaaatagatttaatttgttgagaattgattgatattgggattaaaatatggttattattgttatataatgaaaagattgcctgattcaattatgacaatgtgatgatacatgaatgtgatattcggactcaccttattaggtgatgcgatatatctcgcagcgtacctattaggtacaagcggtagtgacatgtggtaccaggctatggtgtgggctcatcttattaggcaatgcaatatattggtgccaagttttagtacggactcaccttattaggtgatgtgatatacttggtggcgtaccttattaggtacgtgcggtagtgatatgtggtgccaggctatggtacgagctcgtcttattaagcgatgcgatatattagtgccagattttggaataggatcaccttattaggtgatccagttatgtgatatatgtatgggtgacaggctatggcacgggcttgcttgattaggcaatgcaatacaagattattagattaaatcatcgacttgcctgattaggcaatgtgatgtaatgaagatgattactttatgaggtaacatatatatcgtttatattattaaatgaatataatggtttgtattaccatatatttttatattgatgtttattagtgacagatgacagtagtgatttaaatttcatcttatgagtaatgcgtgatcgtttgattttgattgtttgagtat

SEQ ID NO: 23370 - DNA, 5484 bp, Cannabis sativa
  modified_base (2763)..(2766): a, c, t, g, unknown or other
agaaacaaagagtgaaaactaaccgaaaatatgacccgaaacttagactaattattatatgttattctatctcaaaaatgcaaatagatgatatatagtttaggacctttataatctgaaaagattttaggttattttcataatctgtcatcacataggagaaaaaataatagtcaatagcattaataatttagtaattgaaacaactggattcatatccttaatttctcatctatatatttaaacaacatttattattttttttaaatttctttcaatctttattatttgctctcaaagattatttttcaatcaaatagaaatataagtctagtacagtagtaataagtttgaatagtactttgagtttgacctattctgtgtgagtactatttgatatgtgcacttgtatagcataataatcgtatcaaagcttgtagattaacaatgaggttaagacaatgtagtgtaactccttacaaaaccacaccattgagattagcttgatcagatacacaagctttccatatacaccctacttctctctattatttttgtttctctcaacaagtagaacttgtagattttaagtatggaaggacgcaaaaaaattaaaaaaaaaatggttgttttcaaagaaagtcaatcatttttagtcttttatatttgaaaagtttacttgttcgacatagtttggatgtcatgtatatcgaaaaaaaaatgtgtgtaagagtattatcggtaccttacttgatattcccgacaaaattgaggatggtctaaatagttgtttagatctcactgaaatgggtatacgacaatctctggcacctaaaaagaaaggtgaacgattatatttgcctcctacttgtttcactttgtccaaaaaggaaaaacaaatagtttgcaaatcatttgcaaatatgaaagtacctgatgattactcgtctaacatcaaaaacatagtaaatgggactgaattgaaactaatgggtctgaaatcacgtgattgcgcgtgttaatgcaacatctacttccaattgtcattagaccaatcttaccgaaaaatataattgcactaattttacaatatttgtgtaatatgtaattgtaatttatttaattgcttctatgaaataaaattaggtatattggctaatcataaaattaatttaaataatatttaatttaccatttaaaaaataaatatttaatctaaatttaaattaaataatataatatataaattaataaatataatttaaataaattaaattaaattaactgaaaaaaataataattattatagtttggcgtcggttgttaggggtatatggcgtcggttatgggggcattttgtgtcggttattcactatgaaccgacgctatagggtacatatgacgccggttaatatacaataactgacgccatatagggtatcctttagcgtcagttttttcaatcctacaacgtggcctcgatcagcgtggatagcaaattttgctaaaaccgatgctaaaaggccttaaaaaccgtctctaaattaagggtatttttgtagtagtgacataacattattttaattgaatacttctatagttttaatggtaacattattttagttagaaatatttaagttattttgaattgtatgccctatctttcagtgttaggaaattggcatagcaaatatcaaaattaattaatgagaaagggagtccaattcttaagcagcccaagcccatcaaaaatatgtaggcatttcggacttcatatgactttgtgtttaactaaatagattgatggtcatctagtgccatgtagcaaatcaagactcctcataagtatggttgaagaagacatctctgcatgactatgggatatcatgtttcccactctcccctcaaagctgaccagtcttcaaccccacaacttgatgcaacatgcaatatggccatgttattgtcattttctcaaccaactaaatgatacatgatgaaaatactattttggagactaaagttttactataaatagcattctttggcattgtgaattttatcagattttagagtagaaaaaagacactttttcattttattttctctcttattactattttatttatgtttactttagtgacaaaaataagtgtattagaataataatattagtaagattagagtgtagatatatattttactttttattcttagtattatgcgtcatctatgtatcccatttattaaattatttttatcttctaatttttcttccaaatttaatagtatttttatatataagttcaattataccttacttataattgcatgaattgattagagcacttccttatgtcactacaagaaatattacttttgccagcatatttttgtactagcagaagtttggtttgtgctggtaaaatagaatttacttctgatgtgttgccaaaaatgattagcaaatcaatgttggtattagaacttttgccagcacaaaatgaaaagcgcgggcaaaaataacttttccttagattttagtcactgatgtgcgctggtaaaactttgacctttttgtcaccgcagtttgcgaaatgcactggtaaaagttatttttaccagcagagtagcaaactgtactggtaaatactttcgtttcacatcaaaacctagtttatctaattttagcattctccaaactcacttttcatattttgaattgggatatagagcatgcaaaaggtgatcaatcttaaacannnnattaaacacaaatatggataaattcacaatcaagaaagaagaaatggcaattatcattaacctaaaaaaataatgtcaatcaacattcatcatctccccatgataggagtttagttcataatctccataatcaaatccataattaaagttggaacagaaaataacatagaaaaattaagagaggaaagtgtttgaaggaatcgattggggtcaccacaagcagctcttgaagtcctctcctttgatttcagggctccaattatgaataatgatcaaaaatcacgagcttcccttttaaatgacccaagttttctctttaaatttgtgaaattacgaaactgcccatgtagtcgtcaggaaggcttcgccacgaccacagatttccccagtcacgatagctggagcattctcgacttggaaaaatttttgccaagtctcgtcgcggcgaaggatactgggcttaggcagaaaagaactttgtatagttctttacctcaacttttttatctcttgtcctttatttttgtaaatacttcctttgaacattcggggacctaaaacaaaagaatcaagcattaaacagccttaaaactaaaaacaaagatcaaaaactatccgaaaacacgatccaaaacttagactaaaatcagcctacaacctcaaatatcataacctttttgccaataataaattagtatgtagcatactatatatatacacatttatttacatataccctaccttattttataaaatttataaacatgtttgtattgaattttgaaagtgagcttcgggaggtgacaccatgcatgggccatgagcagttgctattaattgtttagttgagaattaattattataactttcaaccacaaaatgaattaaattataagactgagagtagataaatatttaattttatcattaattgtgaaagtgacaaccttaactccagaaacttagaaaagaaaattctacttttacaaagtgaatttagatatatcagtaagagtatatatacatatgagaaatgctaaagggcagtggtgcctagcactttcctatgtatcaatatcactattgttgcaactaagtatcgggtcccatataatatttttatataatagattttagagagtatcgctaaccaatcgcaacgcgacatatcgcaaaggtgctaggcaccactaatacctaatagcaatgctctatatatatatatagatatggtgaagaagatccacatgaattttttcttcttttttcttaatacgtatacgttacaacatcaaaatcagagtttgaagaagaaggtgaagacgaggactgatcacaattataaactctatcagtttaataaatttgacaggtaatttataaaataaaaatgatatataacactatgtacaagaaaatggtgttttaggggcgacattaataggggtgataaaatgtcgctcctagtaacccgttattagcggcaactttctcatgtcgttgctaataattatcatcaatttttttgattttaagtttcaaattatttaggggtgacatttaatatttgggattttttattgttatttttacacttcaaaatagtttttcttgcatttttacggaaatctacagagcaacttacggagtaacctaaattgcaaccaatattcatataacaacccacataaaaactaccggagcaaccacgtccagagcaacccaaaccgtaaattaaaaaatagtatataaattaatttcccttaatatttttatagtggtgacacatcgtccctaaaaattgattaaacaaatattttattaaaaaatgttataaaataaaatatataaaaactggaaaaatccaacacacaaagaagttttctctctcctagctctttcagctgtctcgagccggtaccatggcgaaaataagggcaaaggtccaaggaaagctgaaagtttttactaagaagaagaaaaaagatcctaattcaacagttgatatgaaaaaaattaaatctatggagaaaattctaggtattgaaccactagatctcacagatgaagaaaattgtgttgagtctcacaaggaacctgcgaggtcagatcctttacgagatgtccttcaggctcctctgtttacgaagtcctcgatgaaatcgatcctctagcaagaagattcgatcatactttgctttctttatggaagctaatcaagaatgctcgaattctttatctaaaggtatgccagctaatcctctagttctatgatttgggaacatgattcgaaatttggcatcttctttttgaaattatgggaaggacaacaaggttaagataactatggatgatattgaagaggacaatttcttttggaattcttctatagtgtgttacgttcttggagctaatccacccctctctgtgcttgaaagctctacaagacgactatggaaagaaaaaatggataaggtgggtatgttcacaagaccaccgagatcttcgacttagcattcattttgatagcattaaggatagagaagaaatactcatgggagggtacactttcttcaacaaaaggccaatcatcatgaaggcttcaggtagaggtgtgcagaaagtcatccaatcaaattccaaccaaccgatccaatcttaatcgatctaatagaatcggatatccaatcataattggatctgatcggatgttggatg

SEQ ID NO: 23371 - DNA, 2924 bp, Cannabis sativa
taaattccattggcttgaaactattattaagaagatcaattaagatattgtcgtatatctcagtagaataaaatattagttgacctttattttgtcgtttatagtaaatgaacgatgatgctaatttaagctagcattatggccaaatgctactgataattagaaataaaattaaaaaaataaaacccccaatttcacgacactgctctatatatacattatataactaagttctggactgttctctctagttattattattttttattttattatgatttatattgttggataggtagacacacatgcatatagcataatatattaaatcgctgcaatcgttttttctaatctaagtgtattttgtaatatttttgtgttttaattttttaataaataaaataaaaataaaaattatgtttttaaaattttgtttttagatgataataatgtgttctataattaatttttattttttaaattataaaaatagaaaataaaaatgtgttccgtaacttttattattattttttttttaattttatttaagttggatccagatcagaggccggagccgtggtgtgagtccaatattggggccggtgtcggagttttgtgtcccaaggtccaaaatattaattaagaaaaaaaaactgtttaaaaaaattttaaaaataattttttattgtttttacaattttaattcttaattaaaatattttcactttctaaattaaaaaaacagacaattaacgactaaaaaaaatattactaaacacacccaagccaattaaagagccactacgtagacatactacacgttttttaattctatctatacatttcatttcaaaattaccaccacccaccgaaaaatgtatttatgtatatatatatatgatcgtaacagtgatcctggttgcattgcagctaattgtatctccacaccagtgaccacatcttcacgtcattatattgaaaaataagttagatacacgtataaaagcgccgtcgtcgtttgaatacacaaccatatatagataattgatacaatacaatttcttcttaattgcttatatttattggaaattctgtggtgcatcggatgcaacgtcttgtttcgtcattaaaaataaagattaatttcctttcacatgttatagttatttatggcctgtaaatttttaccaaaattaaaatttaaaacgattgttatatggatgtgttttatattttatacgattgtttgaatatttcttttgtatattgtaaattactttaaaattttcaaatatcttaaataatttcagtaataaaacaccttaaattaaagctccctatgtttatatagcaaagccaatatttgtagcggaagcggatgagccgaaagctgcctagcgttggatgtggatggttagctagattattgcattagatacatgcaagcaatataaataaaaataattatttatatttgaacaatgggtgaattcatattatatattacccaactcgtgcctgagctagctagctagatttttttgtggttggaatgaatgttaattaatataaaaagacaatttatgctaaaaaaaaaaaccaaaagaagaagaagaaaaacaatatgcacctactgcccctccttccatccgcacctgagttacccaactaataataaccacaaaagaagttcaaatatgacaaattgcatctataaagggttgctttcagaaaaaaaaaaaaaaaaaatctactctaatttttaagttttgttacacatcattcttcaattaaaatttcgagtggttactaccattctcttaacaaatttaagagcagatttggtattacttttttattttttattttttaaaaaaagtgttttaaaaataagaacaaaaaatagtttttgatgttttcaaaacacaagtcgtgtttagttagtattttttaaaaacagtattgactaaaagtgaattattttttaaaacagaaaaaaatattttgttgttttcaaaattcttattttttgtaacattattttctaaacactgttttcaaaaaacaaggccaaacaaacctaattgttttcaaaaaataatatttttgtttttaaaaaaaaagaaaaaaaaaattagttatgacgctaaacatgtattaaggtttcgttccttatccaccgtttagtaccagcgtggctcattctaacacatgccaaatcatactaacgatgaatataattttaagtagctgacatggcaatacaagtaacaaataaaataaattcactcaaaacaaattattaaaacaaaaattaatcagaattagcctttcttcgaatctcaccatcatcaccactgtctcaccaccaccattgtcaccaccaccagtatacaaacataaatcactatagcacagattcatacccagatttttttaaaaaaaaaaatcaccatacccttttgatggtttttttgtttgccaatcccatatctaaaagaaaaaaaattaagattcaagatgccatcacttgcaccattcatcgctgcttgaaaccctatcgtaaaagcaattcatttaatatttttctttgtcagtagtggagatggaatgttcaaagccctcatctaatttggaaagcaacaaactagttcttgatcctaatttcttgggcaatcaaccatacacacgaatgaaggttctattatccaagtaccaaagcatttttttttatcataaataccttgcaaaacactataagaaatgtcacttttgtcaccacagtttgtaacactattacaaaaatgggttttctcgacgtttctaaacagtcgtttaaagtattctcgtcggtttctataaccgtcgcctaaacgatcgtcgtaaaacgggcagaataggcgacggttcaaaaccgtcgctaa

SEQ ID NO: 23372 - DNA, 3340 bp, Cannabis sativa
gattaatgaatttcatccgcaatacttatatttagatagaactgataagtgagaagacacacaggtttataaataaaccagccaatttaaattttgaagaccaataaaccatcctaatttgtaatctgaaccgacgatatctaatataccaattttccaaacaataattaatgagttacggcttacgagggaaaagtaatgaaacgatatcattaacttaacagcattactacttaattaatattatactttattgtgccacgcgaacacctactgtgcaggaccagcagtaacatattttaagtttaaaaattaattttaaagaaataattttgatttttctaaaagaaaattttggagttaataaaaaattaatgcattaatatttgtggttaaattttgtagaatttggaatgagctaaaattaataggttttatctcacaaaatcaattgagaattagaggattaatctattcatcttctatataattatacaatgataatttattttcaatacattagcaatctactctaataaattttaatcgtaactaattttattttgttcaaaggaaaaatcattaaatacaactattattatacatttcaaagattatgtggaaccaaaataggacaccattttagactcaaatttaaatccaaacttttaatatccaaatagcaaatgtgttaatttgttcacttggggaatcactaggcacacaacaaaagttcattcatctaagaaaacctgtaaacaaagtgatagtattcttgcttcgaaattatatttacaaaagcataatcttataataaccaatagtttttaaagtgtcccacgaagttttcacatcattaatcactttctctgcttgttctttcttgagctcacaaaacttaacatgatcctcttcatctctaacaagtgactgttttgaagtagttgcttgatcagccaaaacttgaagcatcttacctagacgtgtcttctttgctttcctttcggttagctgtctttctagttcggcaatttcatgatcaacagcctctgcttgtttccttattggcaagaactttgaagataattgcttcatagctgttttctgatcatctatggacttttccttctcttggatttctctcaagtcttgtttggccatttcatattgctcgcaactttgaacaaagttatccacaaatttggttacctcatctacagaattctcgggaaagacattgctacttagcaaaattaaaagcgatttcttgagctcgaaatccctacccgattggatgacattatcaagatcaatatcaaggcattgtttgaagataattttggcagagtcaatctcctctggtgtccatgaaggagggccgaagctgctcacatagttctcctccttaaacctctctccttccaatatattttggatgtcaacaaacaaattgtcgtatttagtagtaaattctgtttctccggaattttttattggtttctgataaaatatgtataacaaaagaatcagatgactaataaaaaacaataataaatatctaaaatgcttattcataacctgatcagtattatagatatcaaaagcaaaataaatatcaatttttaatattaatatgcatttgatcacctgatcagtttttttattttgctcttcgtcttgttttttccagttttgaacgttgtctgccgggccggccatgaaaatatatgagcctaagacgaattgaattttgggacctataaaaaaaatattaaaaatagaatgttatgggcctataaaaacaaataatgttagtaaaatgacactaaagccaaaacagagacttaaaaataattaaaagagaaattttaaaaacaaaacacttacttgatcttgattttagaatcgagacttaagagattataaaccgagaagctcttagtctcggttataccctagaggatataaaagtcaatattaatctctgacactcaaatcctacgccaaaaacctatatatctctcaggccaatacatcacattgtagataaaattaaaagaggtgtgtagcaggattcgtactatagtttgaaaggggtgaattggttttaccattttttaaatgtaataatctttgcagtgtggtgatcacttgtgcttaggttgtaagtttttgattgaaagcaatactcttacagacgtctttacaaaaaaaaaaaaataaataaataaataatgaagtaacccattatatcgttctatcaaatacttctcccgatagtaaattatatatttctatagtaattaacaatagccatatatatataacatgaaaattttgaaaattagactagctcgtacgcacccataatactgctactgctagttataatcgagaaattaccaatagattaactattgtcaactaaataaaaaagactttaaatactcttccaaacctatatataatacatgttgatattcctggttgtaaaactgtacatatttttaaattacaatacaagattcagaaaattaattaatatggatgaattattaataaataccaatacaacttacgtaccttccatttatatatatgaggcagtgaaacagaaaacagtacgtactagctattatattactgatctccgattttgtttgagtacgctatataaatacatgtttctttcgaaaatttacttgggagagatctgagaactgagaaggcacgggttcataaataaaattaattacgaaacagaaaaataacaatttggataactgaacgggcaatataattacttcctttcaccatcttcaataaaatattatgatcatgatcattttgccgactaaattaaaaactagttttcctatgttggctatgggaagtggctaacctagttttcctataattgccgtgggaaatggaaacgacccaccattattaaattatatatggatcattgattgtagtatcatgatcaaaattattatatttgtatcgaatattgatcatcaccgtattatgtctttagagcatctccaactgagttgcccattaaacacaatatgcaatttgctcttaattttaagaattttataaaaagtgtgttgtttaatatagataatgatcacatgatttttttttaaatttttttattaggaaaaagttgtttttgacctaacaattcattaatttaatttgatatgggactatatgatggacaatttttaaagttgttaactattggagtattttcttaagagaatatgataaattttatgtagatgagagagaagataaaaaaaaatatatattttaggatgatttgtgt

SEQ ID NO: 23373 - DNA, 3604 bp, Cannabis sativa
aactcatatgaattctactaattctagtgctaaaaccggtgaccatgatatggatactacatcttctgcttcggcctctagccggtctgagggagaacccgaaaaggattcaacatatgggtcttgtgactctgatgatgcagagcaaagacactctaagcttagagactatcagaggcgaagaacttctggtgatcgtgaaaaattcaagaggatcttattagttttgaatgaagaaacagaggagtctgggcagttagtcgtgtttacaaagctatgtgaagtgttgtcattttgtacagagaattcactttctagcatgacagctgactccattatctccttatcttgtaaggctctcaaaaatatgagactaacccagaaattatgctattggctataaaagctataacttatctttgtgatgtttatccccgatcatcaggttttctgctccgacatgatgcagttcttgctctttgtcaaagactgatggcaattaaatacttggatgtggcggagcaagtaaacttgatgtttttcctttgtgtttatactaggaaaatatgttttttgcaggtgtcttaatacattgcttatctacatgaagtgtctgcaagcattggagaaaatatcgtgggagcagccactcgcttgtttgcaggttggtgatggttgtactgaattttatcgatttcttctcaacaagcattcatgtaagattgcatctaatatgtatgtgagctttgaaattttttgtgtcacgtttactgcattgcaatgcctttttaattatgtattcctatgcagtgctcaaattgatttactttttttttcgagacctagcatttatttaagttatttatttgttccactgtgatgaacttatgcaataaacttcattttgaatgtgcctcccattctatgaaggttgttctgatattatgcaatctttttcattatgaagataaggaggtacttgaagtgttcaaggtttttcaggactttgtcacatattttcttgttttgagacatattattgagtcattgaccatcatgctcatgcttctggtttatttttagtttgttgacaatgtggctctctacttgattagaattacaaacagagttaggaagtctcctgagatgctggatgaactttgcaagcatgggttaattgagtagaccactcatttcataaactcaagtagctgaactattgtgtcactatcaatttataatgtacggtacttattgttactagtttataatgtacggtacttattgtttgtaaccatttgaattcacatttcaaaagtaaagagacatgaggaaggtttctcgatttggaatgtatatgtatatcatatattatatatttattgtattataatattacatttcatatttgttattatatttaatatttacaaatatttaatataaaaaactaagattttaaattgtaaaatataaaaatatattaaattttttaaaagcactttatttttttttcatgtagtttgaacattaatttttggttattgtgggtaatcagactttttaagctatctttactctttttagatgggtttttagtaatttcacagaatgagtagtgagctcggggacagagaccctatatttatataggtgagacatttctatcaaagtctctgccacattaattgtctgaatattttgataattaagtttaaaaattaaattgagtaactcaaatatttagtaattaaatttgactataatcaaaatattataattaattactaaatatttaattatattttataaatcaaatcaaataaaatatttaatttgttcccatataaaaattattctaacagtgtggatacttaaatacaacaaattatgtgttaatacattattcttaagattcctaatgtaagaaagggaagatatattaacattatcttcttctctacaaacataaacaaataacaactttaaaaatccaatatgaatatgtgataatagatgaatttaataatcaaatatatgtagtattgatcttattctaatgcttattgaaaaatcatatttttgtaaatgccaataatttttttaataacattaaaggaaaaaaaaataacagtacagaatttaaaaatttgacacaagagaattgtaggtggtatcaatattctttcaaatactactagtctatagggccacgcccagagaatacaattaattagtaaattgacttaaataaatttagactccctctagtgatttaccgtaatcctttataatctaccttgctaatctgatctctgaaacacaccaattagtgaactcccttcaactattgatgtgtgcttacttcctcttgaagtaaggcttaaacaaatcttctctcgaagttatatgcttactttctcccaaaatgagacttggaaaagtcttctctcgaaggcccacacttgttcaaagattctcttcaatctattctatgaatagtatgagatcataataagaaaatcaaaacctagttgaacactctaggtttttacaaatgaaatactcttctcacaaagaaagatatgaaaatatgatactagaagagataaaatcgtttggctgctctctaggtcctatttataaaacatagtaactctagagacgaccacagaaataatttcccagctgtacaaaactttcttaaaaaaaatttgatttgcagcatcagaatcaggctccacagcaacaaatcaggactagaaaaaaactttccaaattgaacaaagatcacgaatttagacttcaaacctgtcaaataaagtttatttaatctgttctaataaaggcaaaactgaaatcttcaattagaaaaagtaaaagtcaagtttctcaaagttagacaactttccataagacaattccttctcttacaagaagtttcctaaactaaaagagaccagctgagaagatatctttccttagaagaaaaaagtaattagaggcacaaaatcaatgtaataaaaataatttaaatgctcaataaaaatacacattaattaaaaaatatttgacaactaaattgctataaaggacttaacaatcttcccctttggcactttagatatttaaaatatttttaataaaccagaacctacaaaacaaagttagcaaaacaaccatataaactccccctgagaagcacaatattaaaccaaaataaaaggctaactttgaccaaagtcgaacacaaacacaaacttcaactccccctagatatttgagtatacaatcaaaattaaaaccccaaatactcctccttttcgtttatctataagggccaaagacaaaaagaaaccaaaatttctcaaaaaaaattaagatctgaaacatcaattatgatcaacaaataagcaaaatacaaagaataagaaattaaatcttaagaagaaactcatcaaaaatttaccaaataaagcacatgttgatacttaccataaaaaaagataaatgaccaatttttcttatcccaaaagtgaagtcacacgactcctttttttttttttaaatatcatttttttcaaaataaaaaaaaaaaacaaga

SEQ ID NO: 23374 - DNA, 2845 bp, Cannabis sativa
aagaagaaaaaaaaaacagaaagctaatgaagatcaaagggaactgagataatcttttatcaaaccgaatatgggattggaactggacgttccttccagtctctcaaacaagattccatccattcgagcttgaactccctctgaaaacgtcatgtcctgcagcaatgctttaactgttgtgtcaactccaactagtgtacttcctatgccacttaaaatctctggcaacgttggggatggtcttgagagctccacaagtgtaacctggcaccataacaaacagtgtcattgcagcagaatatgaagaaccagaacattatcagctgtatggagctgaaagtatacaaggaaaaaatacatgtatactgataaaaacagtaaggatagtcccattgatgaaaactaatcttcaaacctttctgtcttgtggtatattggccttctgttttgctattgcaacagcccgagaaaggcctcctattgcatcgactaagcctcgcgatgctgcatctttaccagcccaaactctcccttgtgcaaccttctccattttatcttcctgaagtataattaaagatattagtgacttcatatacaacaaaatgagatcaaacagttggtacagaatgtaaactggaatagttgatatacactcattgatctggaaaaagctgccttatcacgaaattgttgataggctctctgggtagacctggcaaaaagttctgcttcatctgatctgcatatcaagtagacgtgtgatcagttaacagtatattaaaatccatgtaatgagttcagtagacagaagagatatcaatcttaaagtaacttacacacccacgagtttggaagtaacatgcataaatattggtttgggaacttcccatttttttccttttttgaacttttcatttactcagttcaattccattttattttctcttttatataagtctaaattgctagtattagtcaatctacaggaaaattaggaaactgcaacctaaatggtgtctagtcgcattgatcaaatgaagaatgcacactctagttagtggcgcgcataatgaaccgggttaagaaggctaagaaagtccaattctttaaggtaaagttcaaagcgctccgctggacacgacattcttgtttaaatagtaactatagaatatgaaccgaatgcatttacaaaatgtatcacgtaattagggtcgattggcttaagaaagggcattttgaaagaagaaagaacagaaagagaaaaaaaaaagaaagaaagagatttctgacttagcttggattttaagatgatgtaattatggaaaaaagctataccaacttcatattacctagttgcagagaacaatccgaactgaggcaattgccagctaggattcctcgtgcgaatgcctatactagctatgatacacaggatttatttaagcataagataattatttccttccaactgtattttagagaaattagggatttgttgcctcttttcaatttgctgagatctattatctttccctctacatatattatcttgtaatttagctgtcttgagtaaatttttcctcattttgccatcagagctgcctttgaatcctcagaaattcccttatttttaagatatctcccccagacgaaacacaaaagaaattcggaggttactaccagtcaaatattcccccccacaagcagttcccaaagatcggataattccatctgatacactattgttccaattcagttctggaaagaataagaatataggtatttcattgatattacaaaagaattacgaatcgtccaaacgttttgagacagcttggtaatccattactctctttgtaacaaatcaagtcctaatcccttacaattattacaactaatcagccccctctatttatactaactcatccctactgttttaagataacaccttaggactattaggccagctaacttagaaacatttcatctcagcaactaagaatttgacaactcggcctctataatcctaatcaattgtctttaagagactaatatcaaggcctcacaccgtgacatggcataaactcaatagtctatgtcatggccgatcaattccatgactattgaagttggagaaaacgtcctttacaactcaacagccaaggaatcttggatacaacaagtctcttaacagagaatactgctgagttgtttgaaataaaaatattctttttttatctgtgacaatgtgaaatgctagtcacacaatattcaacactctcactcagctttggcaacaaatacacatgtttgaagatctagtatgcgagtggatacaagcatggcagtaaaacctttttaagatatatttgataggcattgggatattaaataaaaagggcataagtgtaattgtaataggggtattgttttatatataggactcaatagtgaaggaaaagggtgtgaagaatttggtttagtttgtaaatattgggagagaaccaggctgtcgaaatcctgggttttaatgaaaggcattctgcaaagggagcacacaatcatggacgaaggggtctaatagagggttgaagcgtgaatcattatgatatgcctccaagatgatgtgctccacctgcaagtcagtcactatggagcagaaaaataccagaaaccggcaagaaaaaatagaggaatattattgaaatcacccaaaagcaactactggtattcgagagatctatgtctctccaagatgccaaactctgagtacaagcatgcccataatccttccccactcacacaactaaacaaactaaaaagcgcccccccccccccccccccc

SEQ ID NO: 23375 - DNA, 3442 bp, Cannabis sativa
ataataataattaattaattttatttgaaaaaattattaataataacaagcgttttttatttgaaaaaaagagttagttatttggcaatataattcaaattcagaaacataaccaattcctattttagaaatcttatgttgtcatcaataagtaattattaattatattgatgattaaaaaaacctaattaatagaaaactgataatttcttgggcaaattattattataattatttaaaataaaaataaatatcaatgaatgttttgttaatcttgttcacatcacaaccaaccatccatattcaaaacgtccagagaaatattgttctaaaaaaactttaaactaatataaatatagaatctgtcactacaacaaaaatactataatattattagaaaagtattatgataaatgaaaaaaaaaaatatagggtatatatatcaattgtgtttcgtatcaaattgagatagttttaaaagcccagtcactctttagtactaaatactaataggcccaatcagaacaaaccatttctaagccctgtcattcacaatccaattctcaaatcctaatcacattcatcgatgataatcataaatatttgtttcgatgcgtatacctgatttagtactataaaactaacaatctggatccaaatcctgattcgagaaccaaactcggacatagacccagatctgggatccagacttggacttggcttcggtactcaaaacttggaacgtgactcgtacccggacacagaccccgaagttgggacttgacctagacccagactcgaacgctaactcgaatcccgaacccaaaccgaacttgtaccccggacctagaccctgcactggaatctggaccctgaacccgagacccgagactcgactcggatctgacccagacccgacctagacccagattcggaccccagaccggtacttggaccgaaccccagactggtactcgaactagacccaaaccaaggacccgcagctaggacccgacccagacccggaccaaagacttggacctaggaccctagaccccgaaccccgaacctggcccgtaggtggtgttgggattgagtttattgaaaacatattataacattacacaatctattaatataagtcgatgtcaagcataatattacattaaataatactaatacaatacaatctaacacaatacaatacaatataatacgacataccaaacgagcccttagagaacataactctggagaattgttcttaagcattaagatcaaaaaattacaagtgaactagcctataaaaaccttgtgttcattttcgttaaatttcttttcgataaagtagtttttactttgatcgatgtttattcttgtgttcatcttactcatttacgatctttttagatttgctgacaaaacactgcatcaataagtattatattaaattttaatttatactaaaatattatataattatatatatgcctatacaaattaatagcactagttttatataaaaatattgcacaaaatacaactcaatataatactatatatacaatataatatggtataccaaacgaattttaatacatataatttaattattattaaaattaggttgatatattgtataattagttaaaagatgatcagaacagaaaaagaaaaaaaattaacaaaaggacagaaaagcttaagtttccaagaagattgtggctagctagctttgtgagaaatgtgtggtaaatgtgttgtttgtttatatagttgtcgttgctatgaaaaattatcgtttttatgaaagtttacgtatcaaattgatataagaggaatatgatcaatacacttattatacaaattttagtggaccgtaagaaattttgtgctcttatttaaaaaaatgcataatatttttcaatataaaaaaaaatgtatatttttaaagaagaattttttttttaagttagtgggtcctaataaataagtatataagcatgaaattacattttatactctttttatattctccttttgaatttttacattttttttaaagtctatcatttttaccttttttttaaacattgtaccaattttgcccctattacttcaagatactctccatgtgactctcttatgtcagggtattttgagtacaatacatataaaaagaagtatatttcaattaaatataaaattaaaggtaaatttgattaatagattaataaaagtgatatttttcaacttacccccttaacaagcacagggatagcccagtccgtctatatgggcctgcatatgtataatctctccaataataatattttattataaatatataaataggcaaacaggattgttcacgtgatgaattatttgattcatctatgcatgcatgcaagaaaagatgtttcactaaaaattattataactttacttgtataattaattgtaatcatgcattaaatgttaaactaataaacaaaacgaagttaaagattactactagttaaattatatctaaccaaattcaaagatgatgaaccccattaatcctagaaattaattataagggaactttgtgtgtatatatatagatgacttcctggttaacatttacatcaatccaaattaatcttactctttgcagattttctcagctaattaaagtttcctagttttctctctacttaattaactactcatcattaatggctttcacaactctttcctacaccaaaattatgatgatcatgatgatacttattttgatcatgctagaaaatacttacgttaaaacacaaaggattgtacctgcagtcttcgtattcggagactcgattgtagatgttggtaacaacaacaatttaccgactctcataaaatcaaatttcccaccgtacggaagggattttgcaaatcacaactcaactggccgattttctaatggaaaattggccattgattatttaggtatgtaattatatcttataattttattgaaatatatttatattttcactagtcattaattaactaattatattttaatttttgtatataatatggcagttgatgctctcaacttcgagtcctatccacaagcttatctaagcacacatggaagtagcaatgaacttttatttggagcaaattttgcttcagctgcttcgggatatgatgattctaccgctaatttatacgtaattaattttctattttacaatttttttttcaattttattagtaaaagggtttgcattatattaaatggttaattattttatcttaatgtcgtaataattaagacctaattagattaattattaatgaataaatgtgttttaatgatgtgtagtttagcatatcattatcgaagcagctacaatattttggagaatatcaatcgagaattgttggaatggtagggcaa

SEQ ID NO: 23376 - DNA, 3297 bp, Cannabis sativa
aataattaaacaaagcttttctttttctgatctcaaagtcatattaattactcactgaattgataatatatatataaagaacagttattgtttgtcctaaatttccgaatcgtgtttagagcgttttccggttcttaaaattattttccggttccattaatagtggacctacttccaacatgcacacacatatataaataataaataaatataatatatattaatttctcttcttccaggttttctttggatagattcttcaaggttattatttcgacgcaattaaatattttccacaaaaaaatcatcatcacttgagtttttaatttaacatataggtacacaaaaaaatagtagttgaattaaactaaagtaaaatatatatatgggggttaaaaatttaaaaatgcattctttgtttttgtgaagagattaaatgaaaaaaagaaaaaagaattgaatgttaaagagtagaaagtagaaaacttgtatgaaaataacattaggtggaaagccatccatgtgaggtgcaatgaagtaaaatgatgatgataatgttggattggactggtcaatccatgtttattattgatcaactaacccctctatttttatattttaaggtacgtaattaattgctaaacttaaaaataaatgcagctagctacaccctacaaaaaccgatgaaatattaattcaaatttgaaagcaaaagtacttatatttatatttataggatcattaaattcatcattgcttgccttgtcatgtatttaatttaccaaagttgtatcgatcattatatattatatgcatctcttctattaatttactccctaataatgacagcatatatcttggtgaagaagttaattaaactatatatagtcattaacactcactgactttttttttgtgtaatttgtttttttattattaggttataactctgttgcagtagaaatttccaaccttacatatggtgtttattagttttctaggctcttctctttgggtatataaaaaagaaaagaaaaagaaataaagaggttgtgttatgttgtgtgtgtcccagtcacaatactattatatactaaaaaacaaaacataatctgattctgatatatgaaacgctactcaacattatcatcttaataattactctcacacacacacacacactgccccatttttatttttatttatttataaatattatagagatatttataggctgtttggtaattaagactctacaatatatacagatctgtagtctgtactactactactactccatatcactattctttttcttttgccatttccatagaaaaaggatgtatagtctgttctctcaaaaatatgaaattaattaaattgaaacacttaaattacaaataatcaagtgatcctagcttcagctgagggggttttattgataaacatctaactaaggtgtgtatatatagcattgttattagaaatcagcactacttaatatttctaaatatgttttcagacataattattttatgattagttagtgatattttttttaaaattataatattaaattaaataaaatttaatacttagttagattgatagaaatattaatacaaagaaaaatgataaatactactggtccctataagcatttctggtttatatatgagagtaagagcagtagtacgttttagtacttttggctttaaacaataaacatcactttcacttgcctactaatattgtatggtatagtatagtattgtatactagtatagtatagtatgtttccttatttccatatcatgtgtcatcattctttcttttaacttttcttcttttatttttaagaaaataaaataaaataataataaaaataattaagtagacgcggtgacctgtcatgtaatgtttcatcattagttttagaccacctcaagggggctcctactattaatttcacagcaataatggtatatgccattttgtagatctctatttcaaataaaatctcaaaaaactttaaacataattacaataataataataataataatgttgtaattttggccacatgttaacaaaatgtcaatcctaagatttattactcgagctaaaccaaaggttatttagagtatttttaatagtggtattttttaaaagtgttaacttttttttacattatttaaaaatataatatttcattgtatgtttcttttatattgtttttaatatttttatttctaaaaatactctaaatatatataataatataataccctttaaaaatactataattatcatctcatactttattatttaatatattattcgttttaattataaatattattacactatttatttacctttaattttttattttttaaaaaagagatagcatcaataacatatagtgacatcaaacacaatttttttatgatagtaccaattaatatctaatggtatgatattcttatgttttgccaaatacacattccacataaataagcatccttcaaaatttaacccttggagatactcttatagccaagctttaaagtcatttgtaacacaattttaaaatttatccaaagaaacagagagagttattcagagagaaaagaagagagagaaatgaggaggcatgttaattaatgacatagtgtgtgtctaatcaccattgtcacaagtgaattcatgttgtaatcaacaaattgtgtacattatgtatattgtgttctctccaattcttcgagcttaaataaaaatctcgagccttagtgattgtttttggccgaggagtaggtaagagtgatttattatcacttttgttcgaaccttataattattgtgtttgttcttcttttactttatccttttgattgctcacttggatttttaaacttgtttattttttgagataattacgtattacaacgtctatttcaaagtatttatgatattatctttgactatttaattacttcaaataccgctaggattctctttcaaaacaaaaaaataccgccagtattcggtattaattttgacacgggtgtcgagattaaaaatgaatctcaaaagtatttattttcttcttattactttatatatataacttgaccttcttatttcttttacttttattttctagctgggagcatattataatatttctttctctttctttcattatttttctttttaaaatatcaaaaagtttgttccagccacaacatttattatatggattcaaaaataacactattgtaatctatttttcaa

SEQ ID NO: 23377 - DNA, 2456 bp, Cannabis sativa
atttatctattcttagttcttttcgaaagaaggaaatgacgtcggtttaagacaatgaaaaggagatggtaagaaagtaccagtgtggagaaagacgtgttcggtgggatgaataacttcatacaccagaaatcgtgccgtttcagtcgatcaaattggaaccactactaaattggacccttccaaacgactactgttgccatattatatgaacaattaaatcgacctctcacttaaaacttattatataatagaaaggaagagaacaaataatagaagaataatgtggaaaataatgaatagtattttgtcgttctacacataacattataagtatgtataaccaattggtatataaatttagaggatagatgcgtgtagatagatgtggatatataaatgggccttaaatatacgtaaactaacttttcttttgttgaataaattcacataatatattttcatcatcaaccttcagctacgtgctagactaattaatgttaaattaatttgcatatgctgggattaatttttacttagattgtttttctaaactttccatttacatactatgcagtaccattttttaaaagatctgcctgtacctatgacaaagtttcaaaccattctctgtctttaaattgtatctttttaggcgtcatagctctaattctagtctttacatcttgtttaattttttttctctactgtagctgctgtatgcactttttgtttcaaccaaacttcattatggcaccactatactcgataaacattttctttacttcgttttattaggtagatgtacatttattgaaaaactatctaataatcttgctaggcacggacccacgatctaaatctaccgttggcaaatatatatttttttttacaaaaataaaacatacaaaatataagatatttaattattacttcgtaataatttatattgatatataaaatttgtccaatacacaagtaaaagttatcagaatacataatattttcactttttatagctaagaaagatactacaacttctcccttcgatttctcggactctgaaattgttgcaaaatactttaatcatcagcaccataaccaatttctttctcaactatgaggagtgaaacctgaactggttcttacaaagagaaaagagatgaagctctgttttattaaaatggaaaagtcaaattacaattggaaaagttacaacaagaatatatacccatcaagaggggtaaaatggtcaacataactaatcaagaattagttatgtttaatcagccaaaataacaaaataacaaccccttaacaactttaactaaccctctaatcctaatagcccccgtcaagatggagtatagatattagaaacacccatcttggatacaatatgattgaaatctgacgggagtaaggcttttgtgaagatgtcagcaacattttgttgtgaagagacatgaagtaacttgagagagccttgttggattttctcccaaatgaaatgacaattgatctcaacgtgtttggtgcgttcatgataaactagattttcactaatgtgaatggctgtcgtgttatcacagaagggagaggcagggcggttgagtgagattccaaagtctttgaggagggcaattatccaagttacttcagaggttgcattggccatggcgcgatattcggcttcagctgaagactgagagacgacttgctgtttttttgatttccaagagacaagagcttggccaaggaagacacaatatccggaaatggatcgacgtgtgtcttgggaagctccccaatccgcatctgcaaaaaaagacaattgaacatttgaaggagataggcttgtttcagcaaaggctgaaaggtgtggacgtgtgttggaaggaaaaaaaagtccttgaccgggggtacgtttgagatattgaagcacacaatgagtggcttgaagatgtggtacccttggagatgtgagaaattgacttaggtgattgacggcataagagatgtccggccgtgttattgttaggtagattaatttgccaatgaggctcctataagtggtgtgatcggctaagagagctcccttgtctttgctaagtttgagattcatgggagtggaagcaggctttgctcctaggtaactcgtgtcagtgagaattgttgcaagaggaaaggtctttgagaaattgagatacctttgtttgatcttgcgatttctagaaccaagaaaaaaacgaagtggtccaatgtccttgagaaagaactttttatccaagaaggatttaaattgagtgatggcaacattattgttgctagcaatgattatgtcatccacataaatgaggatggcaagttggaaggtgggagttcttttaatgaataatgagttgtcagataaggattggtggaaacctttggattttaaggtggtactcaatttt

SEQ ID NO: 23378 - DNA, 6338 bp, Cannabis sativa
ttattatttggtatcagtcgtgtccaataacttttataggtgacaccttacgattgattagcgatatctctaaaagttattttgttaaattatataaaacttgatacttaattacacccataataatataataccaagaaatatactatccaccaataatactttctaacatttctcccaataggagaaaagttggtttcatatggttccgtatgtttggttgctttgaataagggttttaggattaggagtgataattattgttaatgataccaaaagcattccactaattaatatcattttttttttagatgtgacacaaggtgttccacattatgggcttctagaattaataataaaaaaaagagtttacaaagtgggctagaattattgggaataggaatgtgaatttaaattagaaattggagtggtaaaatgggttttcacagagcataggcacacgaacacgacacgaattttataagttaggatcaaaaaaattaaatatgggtagaaaataaatctacataacttaacacaaaataaaaacggatcaaatacgatataacccgcttagcacaaatttgatacgattttttaaataaaataaaataaaaattattcataataatataattaggtaaaaatatatatttagtgactcaatgttgagttaaaaaattttaatttaattttctataaaataattaaaattttaaaaaatctaatttttattatatatataaatataaaaagtatatcaacatatatgtatataagtttttaatggaactcttaatttatcgttttctctataactccagctgtgggtcaacatcaaaatgacacaatttttttttacagatcggtttaggattgaaaaaattagatgcgggtcaaaaacgaatcgacacgtctcacacgaaatataaaaacagttcaactaaaatatgacatgaatacgatacgatgacacctttcgccacccctaattaagaatgtcaatttaacctaatctgactcgaatatgtgggtacctacctactcttagtgggtgcaaaacataacccctcaatgacggtattccacgggagacgggatcggggcaatagacatacctcccgctataaacgtgtcccgtttatatttatatttaaatataattaaaaatatgtatataattttttattaaaaatattacaatattttattattctaaatataaaaattaatatcttttttattccacggataccgatagaagctcaaccccgattcaaataacgggacgagtatgggggtaagaattttgtagcgaagtggggctcgtgagcaatccctatctatttctaccccatttacatccctaaactaacatactatttatggtgtaatttatatttttgtagatcctacttttaatttgttttaggagtaacatcaaaatacaattgagttgcaaaattcttgtaatctcaactcctcaaaactaaaactaatcattgggaaataaaacttgaaagtagtattttgattaattttgggccactcatgcacacaacaaacaaaccacaataactttaataagtatgcattaaagtccatccactaatcacaaaattccaccttgaaatattgtaccattttatgcttatttttgtaacatcattcctaaagtacccttaatattttaaaatcccttaatattaattttgggacaccttgactttggtacgctatacatcgagaagtcatcgataacatattgaaaatttatcgaaatttaataaatacccagattatacgagaaaatcaaatctcaccatttaaaagaaaaagaaaaaaaaacagcaaaacaaaaccaatacaaacaacaaccatataatctattggaaatgaactatatatttttcttaatgttttagaaattgtttgagagatttctaagggtagatgtacttttagtatatggttagtaatattggtataaaaatggtataatataataagggggaatttatagttatttgagtgtctttttaaacatagttattgaaatttctctatctagaatttcctaattatgatgttagtttaggtgtggatccattcccataatgctcagctcatgtttaaatccacatgtgagccttttgtagcaaatatctttggaggatataggctcaatatatgaaaagtacattatagcaaatgaatcttaaagatcttggaaaaagtaggcccaataaatataaagtacatgcccaatgacaatagatccaactttgttactcataacaaattagaaagaaatagaatgattttacaccaccctaaagaataagtgtataatatatttttttttattatcaattagttttaataatgtctcatttgtgtttttctcgtaataatctcattagaagagagcaacacaactttgattagtgtcgttagtctcacttaatagaataaatgctataatcaacactaatagaatattagttgaagatgagggttttgtaatttgttcagtaaaattgatatacaagtatatggaatcgaaataattaatataatgataaataaagtattgtccactcgaaaattaattatcaattaccaattaattaattctttagttctatttgatgaataataattgttggataaaagtaaatataataattaaaattttaaaaaaataacaattataaagacaagaattattatgattcctaattatctttattttacttcctatatgaaaatttcctatattcctatgataagtttaatcacaaagatagtattaagcatagcaattaataaaatcatacaaacaacttaggtacttttgtcctaaattaattttgcatccatatctattaaatcgtattcaaatctcacattccagaattttaattcgaattcataggttacaattaaaattaatcagtcaataattgtaaaattaaaacagattgtatggaattgaataaagagaagaagaagaaattgaacaattacattaattcctaaaataaactcaagtggttaacataataatccttcaaataaattagctactaattaaagtcattctaaaacaatataaattaaactaaagacataaaagatagagatagaggagaaataacactatttgaaattctttaccggtgctttctgctttttactctccttctacactcagaattcctctcaattttcaaatgatgtcaaaactttgactcagcccactttaaatagagccaaacattgaagattctcattttatacgaaggtcacgaccttataaacgaatttccacactcttcattgattctggtagtttcccgtttcaatttttcttccagggaacaggggtaaggccgtgacctttcttactaggccgcgaccttacaggttaggtttcctttttctttaattttccaccttaaactttaaaagttcccatccaagttaaaaatgcaatctttgactcattttaagcaatagaaaatccatccaagttaaaagaagcttttttttttattatattttttcatttttgctcaaaaagacttgcagaacactaaaattactaaaattgaagatctccaaatatttctccttaaaagtaaataaaaactaaaaccaagcataaatttacacaataaaataataaaaatactaaaacacaccctaaattagactataaaaatacataaaaataaacttaacatatttgttgtagacaacctagaagagggactcacttgtatagaaaatctcaaaagtgtcactcatgaggtattgcaacacgctacaaaaaattttagctccaaaagcaaatttggtattgaagtttctagcgatgtgtacaagaaaagactagagatagaactttggttgcggtgtattgtagatattatcttacataaaataaatagtaaaatattgagttatatattaaaatatagactactccacctatcattaattagttttaaaatataacttcatagttttcaacatggtatcggaaccataccatgattttcaacatgatgaagcaactctttccttgatgcttttcacaacaaataacttgttaggactttagaaaatgctttaatgaataactcaccaaacatcattatttcactatataaaattataacataatgttgcattttactgttttgggtcatttaagttgtttgttttagattgtataagtaatttttttctttttagaactatttctacattacatagtttgtactcaattttaagatacatgattcatttatatgttaagttaagtgatgtattaataaatagtaagtttttaataccaaccattacatggcaaaacaaatatctcttgctaaaataaaaatactataaacatacttgcattgtatcaacattaatttaatattagttaaatgtatattttctaatttaatgaggacaactccttatcatagacattatggtaggtttgataacatttgttatgatatttaaaaatcaaaatacacattaaaaaattaaaaattaaaatactatacgtgtattgcacgtaacattaatttagtattacttaaatatatatttttaatttaatgaaggaaacaaggccaattctgagattgggtggccttaaggaaataaaaattattagactttttatttaaaatatatatagtatatttaaaaattactaatatatatttaaaaagaaaatatttttgttgggcccctaaacccggctttgaaggaaaactcgccatcttagacactatataagtctgtcaatcaatgttcacaatacataaattttaaatcgcaccacaaaaatgtcaaataatgagagcgaattataatttatatctattgccaaataatttaacagcaagttaaattaataatgaatatcattataaaattcatgtattggtaacataatttataaccaatggtgtacagtgtgaataatttaatgaacactttagctaataaacttttgttagttgtgagcttcagtcaacagatactcatttaaaacacatatcaaacaaaggattttttgttgactaatcaaaatcttatactttttaattaaagattttggttggtaacaacatcaaatcaaataatatataaaagtaaaattatcactttatacctactaacattgtcacttttgaagaccacatggtcaatagaacctcattccacatgattattacttattagaaccacatggttaatagagtatttggtattgtatattatatggtgttaattcaaaaaaaaattattttaaattagattcaaatattggctcctaatttaatatttacttaatttaattgtgcaaggtattaaaattgatgactagttaggatctttgttctgaatttttatatgtatcaaatcatgctcctaaattttttaagttgttaaaaaaatttcatgaactattaagaatgttgaatttatggattttgtctaattttattcaatttcactaaagtggcgattgtccatgtactaaagtgtgccccttaaattttaatatctaccgaattgtatctcctgaatataaacatgtaccaaatcgtgctttctgaatcttcatccatattacttagacttctgttagtaaaattagataaaagtttttgaatcaaataatctcagtagttcgagaaaaattttaaacaacctaaaaaattctagaagcataattggtatatatcaaaatttgggagacaaaatcttaattagccaaaattcaatataaacatacaagtgtcactacaaaattaaatcttgtattaaaatgagagaattattaataaagaatccaacaatattgtaaagatcatatggttataatatgaaaataactaaccacaaccataacaatatttttaaatatagaaatgctatttaatttatagggaaagagtgtaacttcaaccataaccatgttggggggactaccatatactacaatatattgcaaatatttgcatatatacatatatttttatctcatgttaccaagcaaagaacatccaccactttgagcaaaaacaatgatatgagttaatccatggtaagttattttaaattgaaatatacaatacttgaattgaagtgtaccaattcatatcttatagcaatatttagataattgttatcaaacattttcaatttacaagtaatatacaaattttgttaatgtcttaaatttatatataaacttatttttgaatttattaaaaaaattgaaaatcattgatatttgatactat

SEQ ID NO: 23379 - DNA, 3692 bp, Cannabis sativa
ttatagatttatcactagatgttcttataatgatactcacactgtcactaacttgcgaaggctgaatagctctggcggaattactcctgtaagttgtgtgttgtccattgatctgcctcaaaagattacaagttgggaaagtattaaggtcaaaattatttagttgataaaatatgaaagtatgatgagaagatgagagggaataatgttattgaattgtgactcacaagatagttaaattagtaacatttgctagtgtggaaggaatattgccaccaagtttgttaccgtccaaaagcctggaaaatgatatgaattagtgcatttacgaaaaaactactcactgtagcttttttgttaatgaaatgacaacattatagatttataagagaacaaattcgaacacaatgtttgttaatcttacaagtgttgcaaactcatatttgagctgaaaagttcctcaggaattgggcctgtgagattattctctccaagatggctgatgaggaggatagcatacattacaggtataatttcaaatattgaatcataatatatagttagaaaatgaaatggaaaaatgttatatccagaaatgtattttgggtatatattaagaagagcatacaagtgctgacaaaggtagagcatgtcaagaccaagaccatcttgagtagagactgggataggtccctcaatgttattggctgtgatatctagccacgtcagtttggaaagattaccaatggaagccggaattgaacccttgaagtaattagagtttagagatctgcatttcccaaaaaaattgtaaggaaattgaatattacaaatactataaaggacaaaacaaacagttcattacatttgacagttaaatttaatggaaaattctgatagtaggttgtagtaccacttttgtctttattggtaggagtatgtttatttttggtattttttttatggatattattttttttgaaaaatttacatttggtattttaagttgcatctaatttataattttaacgttaatctttttactaccgtgtattttaacgaggaaattacgtaaaatatggatttttttttttttttttatgtttgataaatacagagaaattataattttatttaatctataatttttttttttctaatttaagttagttatgtggaattatatttctatattttaaagtttctatgaaataaaaccatattttatttgttaacttttttttttgaaaatgaaagttatcattttattaaacgaatatctccgttaccaaattaggtaacaactcaactggaacagtatccaagttgaacaagcgatcaggatggaatatagaggtcctcgcaaaggaatgagccgctacatttgctgatcgttttacaaaatgaaaagaaacatttgttaacttattttgtggagatttgtattattttttaagaaaaattattatttaatcttaatattaatgttaaacttgtaatttaatatatttatatatatatatttgtgtttcacaatattttcatgttagttttgtttttagattgggaaaaataaatatttgacttattatttgaattgttttattctatattaactttttgataccgaccttacaaaaaaaaaattactgaaagattattgtattgtaaacgaaggttattcgtatgaattaattattaccacactaaaactaaaaataaaagtactaggttactctataaactaaaaatgatgtctaaaattcaacaaccatgttactttttcaaataaacacattactttgtgcaaccatagcacaacacactacatgtactaggttacttttagaagaagaattgaagctaaaaatttaactacgagattatttttttttttttttaaaaaataacaaagttatttgttaaaatatacaattaaaactaaacacattcaaccatatttaaagatagaggtatcaagttacttacaaaatatataacatgttactatatgcgaaaatagaatcaaaattaacaaactatacaaaattcttaggtaaaagtaccaggttacaatttgaaacaaaaacactgtctaaaattcaacaactatgttactttttttttccttcaaagtaacacgttatttttgtgcaaaaatgttactttgcaatttgaacaggttacttttgtattaaaaccaaaaaaaataataaaataacgcacatcaattaaatttaatattctagttaccaaaaatagaaaacaagctacttttgcattaaaatcagtcaaaatgttgcacactcaactaaattcataattccaattactaggttactataaaaaataggataaaatgcaaaacaaaaataataggctactttttcaatttgaacatgttacattatacattaaaactaatcataatgtagcacactcaaccataattcaatatttcatgtaccatgttactttagaaagcaagatagctttaaatatagataaaaatttagttttcaatttaaacaaattattttctatattaaaaccagtaaacatagcatactcaaccaaattcaatatttcatattctaggttactttagaaagcactgagttgttttttgatgctgccaatagtttacatgtgtaatggttgtgatttttaaaaagtatcaggttacgaattttcgatgttgactctgctacatgtgacattttatgacgttcgaaagtaccaggttactatttgttattttttttgttatgcatgtaattgttttatgttactttaataatgttaaaataagtactaggttactttttattattatgtttgttatatttgtaattgttctaggttacttttatgatatctaaaaagtattagggtactttttgttacatttttttttgttgtttttaattttgttaatgttccaagttacttttatggtgttaaaaagtattagtttctttcttcttctttttctttttcacaagaaaaaaaatactaagttactttctgttactgattttatttaaactggtaatttgtaatatatatagataattttgttaaataaaacataaaaactaagattagtgaaaaaacatcatagacgtcggtgtagtattttaaaagctaataatgatcaaataaatagaaactttaaaaatttattattgggtgtgagaattaggcaattatctatattttctttttaataaaaaaggataaaaagagtttgattgttggaggaagaaaaaaatcaatctagcagaattttgacgtaagcaaagaagagaaaattgcattctatacccactttactttatttgttttaatttttaccttcatttccatattctttgagatatacccactttttatagataatgttcctattataccccttacataaatataaattatgtgctacacctaagtggagtttaaagatatattagacaactcactcataaaagtgggtagattttaataaaataaaatataaaagtatttttagttaatggataaaaaaagaggtattccttaacttatcccagaaaagaacacacctgaaaagtggaggttatttacttcttcaaaatcattagatccgagagagaaataataagcaaagattctatatataccaatttaattatgggaaaaaaacaaaaaaa

SEQ ID NO: 23380 - DNA, 2652 bp, Cannabis sativa
tgaaatggtacactttgatcaaggataactctgtaactttttggctttttcttgctgatgaaaaaaaaaaaaaaatttggatactattctgttaggtagatgaggctaaaacttgtaggctttgatcaagccttttacatgtttatttccattgttgatttcaccgattgagttaatgaataatatttttccctttattattttagtcacaagcttacttttcattcatgtttttttcagttattttgtgaaaaatttacactatactagggctgaacattttgatcgggtttgatccggacccgcttgaccccaacccatagaacttgactatgtcagaaaactcgttcccttcgggcgagtcgggtccaacccgaacctttcatcgagcatgtttgggtttagattttgcacttcgagttcaggtcaaacccgaatcagcccgctaacccgcatttttattatgtttattaatttttattttcttataaacttaaaagttaaaacctaaaagaaacacatctcctcaaaccagccacaatccccctccactcgaccctctctctccaagccaggcaaccactaaactgaaccaccacccaccccctcacggtatcgcctcgatgacggcatcagagagctgaagattcgacctatccttgacaaagacgacctagtcctcacgagttgagatctcttcttctctcccaatcgtcagtcgaccaccacacgccaaacaacaacaacagccgctagctagccagtgaaaaaaaaagtttgaccaaatctgttaatatggtcaacataaatccgtgagcttaaaactcgtgtgcttgaaacccgcgaactcgaaacactttaacgggtgggtttggattttcttttttggatctaacacccatgaactcgaaatttgccagttcaaaactcagtcaacccactctacgttcaatcctacattgtactacattttagaaaggaaaaaaaaagtctgagaaaattgaaacaagtggttttgtgaagcaagttgttaagttgtataaaagaatgttgttttctttaagatcgagaggaagaagttaccgttgaacttgaatacttaacacacccgtatcactacacaatgtttaaaacggtagtcatttaaaaagctcaaaatttcagatttaaacccatccgacccttattcggatcttggtttcactaggaatttgaacccgaaaattcaaaacccgtccgatatgcacccctaggtggaataggccatttgagattgtattttgtttttcttatattatgcatatactttggaaatgatgagatgtatttgctaatttaatggaggattaataagtgaaaatagatttttctttttaatttcttttttatgaagtagtattatacaaatgattgtgaaaattattttgtacaaacttaatcattttgcagagtaacttaaagacaaatatgattactatgatgtgtaatcttttctttttctttcatcaagaatatactttcattattcaaattagctgattgcaaactaatttagaaatcctgctagaggcatattacaccagctttacaaactccttaaacactccataatgactattaattttcctctctttacaacataaattctagtcttaatattctcttttatacacttgttgatgcattcttgtgtcaaaacatttctaaagctggtgtaatgagaggaaaaaaaaaagatgatatgttttttctttttttcctctctttacaccacctttagaaaggttaaaagtttggttaaaattataaatttttattaatcaaatttaactttagctattagattagaacatttttaatgtagtgcttaaaaatagtgtataattatattttagcacagttaaaaaaattaatactctaatgttgttttaaaaagtgtgctaaatttaacacatgttaaaagtttgtcaatttggtcttaaagcattgctatttgacattttaaagtgtctaacactacactaatgtgacgctctataatttgttagcggtttctcatattatttactaaattaaaatgtgtagaacctgatattgaaatgtgttaaagtgatatgtcacatcttgtggtgcttgacaccttaagaccatctctaatagaagatttaaaaattgtactacattggagtttgtactatattatactcactatttacaattgtgaagcaataaacaatatgtaaaataagaaaaataaatttgatagttatttaatattttacaagaatatatataaaaaaaaaaattattattttttattcttttattatttaaataatggtaatatgttaaataaagaatataaaatttagtaaaagtgaataaatcataataactagtgacattatagtaaataaaaaagtagcatctactcaaggctaaatttgacacaacactatatcttgtattaaatttagtacaatttttaacatatgtcaaatttaatacatttttcacaataccattaccattagagtaatagtttttcttaagtatgttaaaatatagtaatatactactttttgatacttcattagagatggtttgtgcctattagagcatctccaatggaggtgtaaataagtggtgaaa

SEQ ID NO: 23381 - DNA, 1943 bp, Cannabis sativa
ccgactacgattgtcaatctctgcatgatgagcccttaaatgtaacgccctgacactcaaggacgcgacgtgtgtgcttttacaattaattaaaaaaccgttattacaaaaataggttacatttctaatcaaagaaaatgggtcaatcttgcaacctggaagccaagacaccacgactgagatgtacattactgggagacctcaggctcagggtagaacaaaactgctttccttcttacctggaccacaaagcatctatgagtcacaatgactcagcaagaaaggttactagatcatatgcatgctgaataggtattgaatcacaagtatgtttattattatgtgatatgaatacttatattttcaatgcttatttgattagcatcaatactaacccataaaattcacagtagaagaaaatcatagtaactcactatgaacaattttatcctttcacaaaacagacattcattcagcatgtcgccacataatctcaatgctttgtaaagtattctaattatacattaccataaacacatagtttcagtgctttataaaggactctaatcacatattctcagagcttcattaaggctcccctacaacttgttatttacgagctgtgtacgtcactatcattgcccgataaagcgaacgataagtaagaaacctatccatggtttcaacgagtaattacttttaacagtaatgaccgttaccaatcttcacaactcgttatccacgagctgcgtatgtcactatcatttcccattaacacaaacgataagtaagaaacctatccgtggtttcaagagtaagtactcataacggtaatgactgtatcataattcattcacaaaaacgttgataactgtgttctgcgctcattcataaacaattcataaacaaaaataatcatttctcatcattacctcgattaccatcgagtcacaacaaatacatattatcaatctcgatgaaggttcacaacaaatacatatcggtgtctcaatcataatcgagaccataacaatcatatcattaatcataaacagtgcttaatacttttcttacctcaattaaaaactcaagcttgcgggccgacctaagtggaaatcaagataggcaatcccggtcctatgtcacgacaattgaaacttaataaataccttaatctagaattctgaaacaaaacactaattctaaaacaaacataacctaactcccaacaactccaaaataggtcaaacaactcataagcaacttcaaataggtaccacgcaatgccccgagccaaaacagaaccagaagaaaacctgagaattcttcctgcaggacaaccagtcgaccggttctggtgcacccgaaccaaccatccaccggtttcggcagaccagaaaaacataggttttcttcctcaattttgagccaaacttcttccaaacatttccaacagctccagaacagtatatttagcataaatcaaagtattcaacccatcacctaacaacaattcaaccattgagttaaaattacatatttaagtgaagaaaaactcattttaacttcatctaactaaaatcatattcaacagccatagaaaccattcaattcaaactccagcacactcaaaaacaaatctaagaacacaacctcaacccaattttccacagcctcaaaattaaaaaccctaacctaaacccaactcaaaacttacaattctcaattcacaaagcatagaacttacctcaatagcatcaaggttgagtttaggtacaaaatctgctcaaattcaagaaaaattgtgaagaatttacccctggttggctggtgctatcatgctcgagaaagagagggagaggtgatgcattgatgttccttagtttctaagttactaggttattctttcaaaaatataatattcatttactcaaattccacta

SEQ ID NO: 23382 - DNA, 2619 bp, Cannabis sativa
tgggaggtaggtagtcatccgcgttaaggggaccagcattacgaataacgcgttgatgatgatcccattgacgaagatgagcagcaaggtcatgaagatgaccctaagaatgaccacaataaaattcacaacaaggattatgaagaacaacactacaagcaagaccctaaagtagtacgaatgaagcaagagcttgcagacactcaaaggaggttagtggatcaagaggaagtctcgcgtcaaatgcaagaagctcttgcacgattataggcacaggctaagctcattgaagaaaaccctcttactaaaaagtttaattatcttagagttggattgtctacccaagtaaatgacaaacggaagggtgtaatgggtgaccctctgaagaacaaaagagcagtcggcaaccccagcagatagaatgggatgctcaagcctcagaacttggccaaccaattaatctgcggggcagagtcaagcaaaactataggccatgtattaggatttatgccctgaaaagcctgtaaagacatttatgtttataaatataagttgaacattttcatatatgcttgaatgttaaattattaatattttatattgaataattatatataagtatcaaaaaattccttattcatacatgagggtgtaatttgtattgtacggagaattaagatcacttagccatatataaaacattcaccaatatattaaagttatggaattttaatcaacagttgctagtacgacccattcatgccctataacgccctgatacatacgcactacgtgattttctaattattgtaccacctttgctaatcaaagggtttccttgaaaatcatgccgaattaaatttttaatttaaactattaaactttataaacacatatatatatttacataaattgggatcctgtgtttaaactttacaattatattcaaaataacttttatagccatgtcgcacagcgactacaaaatacagcctaagttgtcccgagaccgaactctccaggtcgcatcgtcttgacatgtacaatcatccctcaagctcggaactcactcctattcaagttttgtctttcctttacctacacacaaaaataatatctatgagttaacagactcagtaagaaagcacataacatacaatatattaccaacttgtacttaggcgcccatacacctatccacaaggcttatcaaataagtaagaacagtctttactaaggtacgaccattgtaccacatgcactaggtaccactaccgtacgagtgttggtagggtttgcaccgtacctcgagtaccactaagtgttgtaccatacactccgtactcaaccctactagtgttggtaacgccgtattgtactcgttaaacatgatacactataccaatacactcggtaccgctaccgtactagtgttggtagtaaacgaatcacaaatagcatataatatatcacacatacacatattcatatataaatacgttctacgctagtcttacctcgcttctaaattcaagtgcattggccgacctgaacaaaaaatcacacgctggatggatgccatatgtcacatttacgtaaatgggtaaataacacgctaaaacctaaccgaggaatctaaactcacaacaaaaagtttcgccatcgataactaacatgacaataacctaattatcgagaaaacatagaaactaaagctctgaaaatgacacaaattgggaaaacatgttttttctgagatcctgcatgttgatctgggttaaccagttctacacggacctgtagaaccggttaatcggtttatactaaaaaaccccaaaaatcccaaaacttgcacaattcgtacctaaacctcaccaaaccttctagaatacctgtactaacattcaagaataaataccaagcactaacagcatgaaagcgccctaaaactaaaagtgccatagatgagctaagcttgagatttcaaactaaaacttatctaaaatcaactcaaaccaacacaatcatcaaaaagtaatcaattttaacttaaaataaactccgatatcaaatcacaatcaaacctaactctaacagcaccaaaaaacctcatatttcatgccacaactaacaagaacttagataaatcatgaactgggagtttctagggcttaccttggttagaattcccttaaatctttgatgaattcatagaaatcagctgtaattgaagatgattcctctagttctagctatggtcaaagggaagggagagagcaagataacattttctaatttttctttgtcttttctttaattgattaaatcaaataatacttaggattttaggctaaattaaaaataaatggacagatttccaccccataatcagctacctaaacctattaaccaaatgcccatttacttccaacttaagaaattataagcctaggagtaaaatggtccaacaccataattcatcttaaacctggcattctaaatatcttaaatatttgtcccgctaagaaatatgttttaaacttacccatgtgactctattggacaatcatcgcattttccatcgtcaccgagaaaaaattataaaaattacataattca

SEQ ID NO: 23383 - DNA, 3704 bp, Cannabis sativa
ctttgtgaatttgcttacaaaatggtcaagaaaagattagtaacaaataataatcaaatatttgtttatcatcaaaataagtgagtgattgacttttggtcaacaaaggctagattagtagtcaaaggattcacacaagtagagggagttgattactcagagatcttttcacctattgtgaagatgaaaactataagaatgatgcttgcacttgctgtacagaatgattgggaaatataacaaatggatgtcaagacaacattcttggcttgtggaggacgtgtcttaggaattattgaattaaaatatagttgacttgataattaatgggacaagttatatatatacatactaggcttgtggaggacgtgccccatgcaggtaatccctatcaaaatttattggtaataatcatatgtcttacttttattaattatatttaaacaattgttgaaaaaaaaattatatttatataaggacatagtgtggtataggttcacttattgagagtcattcataacaaaaaacaggacaaaagaaaaaaaaattacatcaagttttgtaattacacattggagcataatgctaaaaattgatctaaatatatcacaagtcattttttttgtcaaatatagtacaatttttacatatctcattaaaaatactcttgcaaacttatatataataataaaattaaaattctaatcaaagttaataaatatatgtacatattaataacgaaaatattaagaaacacattaagatgcaaagcaccacaaaaggtaacatattgttattgatgcatttaaatatcagttcccacaatataatacgatttaaaaaaatattaactaattattgtatatgtgaatcaatatggtattgagcaccacataataataatagtacgaaaatcatttataaaaaagtaatacaaagatcattcataaaaaataaaaatcaatcaatatatatatatataaaggaagttttaacaaatgtgaggtggcatcacatagattttttattgtattttatctttttccttattttttacatttttaatttatttttatacttttagtagtgtgagatttcttttgaaaaaagtcccacatggtttagaaactattgtgggtgttatgtttctaagttatatatagacgattgaactttcacttggattgtgtaaaaatcaatattgttaatttttatatgggtgattaataaatttaatcttacctaattagttgtaatttttgtttttatacttttagtagtgtgagattttttttgaaaaaagtctcacatggtttagaaactattgtgggtgttatttttctaagttatatatagatgatggaactttcacttggattgtgcaaaaattaatattattaatttttatatgggtgattaataaatttaattttgcctaatagttgtaatttttgtaaatgataaatttaattttgagtattttttaaataaatacaatacatattttttacacatatacttaaataagtatgagtgatagttttatattttttatctttaaaacaaagataagtttaattttttttaatgatatattaatttgatttagttattttatttatcatttattttaaaatctaattataattcttattttaatgacatttgaggaatatttttttaatattttttcatatatattttacacttctgatatttctcactcgctataaataattattttaaataccaattttaaaaattatgtaaacgtaatcataaaataattatggatatatataagtctaaataatattttttatctttcatctttgaagaattaattagtttgatttaattattttatttatgcatttgcttataaaatatatatatatatatatagatataaaagaaagtttaaacaaatgtgagacgacatcctataaattattttcttaacagatgattcataaaaaattaaaagagttattaaattgttaattgcacaagtagtattaggtagtgaataaaattatgatgcatgaaattatatatttatggtacttataaaaataaaaggccaaaatttaatatttatactaattaattatttttttattgaaatagcacattatttaagatataattttattttttcatataagttttaattataaaattcttaaacaaatattcaaaatgtagtttatttttgttttaataaaaagaaatcaggtagcaataatatatatttcttttatattgtgtattttttctatttatattttatatttttttggttttactattttatacttccaatctttcattaaaattcctttatgttattaatttttatcaaactgtaatttcatataaaaattaaataaattattcaactattaatatataataaagcttcttaattttttttttgagttgcctctcaattactttatctaattatttttttcgaaaaaaaagataataatcttttaaatgaaaaaattacaccattaatcacaaactgatcagtttattaaacttataaacttataatttagtattttaaaaatactaaattatgtttctaataacttaaaaaattttactttgtttaaaaaatacacattaaaatgttatatttttgattatatcacaattagtaaaaagaaaacaaattttgaaaaaaaattgcaaaagtttgataacgccgcgcaaagcgcggcttagttctctagtaaaaaaataaaaacacaaaagataaaaaaaaaatactaactaattattaaataccacatcggtatgacattgaataccttaaggtgccaatagcaattacgccaatagcaattacaagagattatttaccaaaaaataatatgtaaaaacaaagttaaaagaaaaaaagctacaagacaaaaacaagtcatttgtatttgtttgttttataacatctattatatattgatgttataaatttatacaatatcttacacaaattttataagagcttttttatttttacacttcaaaatatatattttttttgtatttttatagaattctaaatagaaacctatagtaactatcggaacaacttaaatcgcaactaaaaatcgtatagcaacccacatagaaactactggataaaccattttagaaattcaagccgtaaatctgaaaaaagttaaaaaaaatattatagaatgtaatttcactatattattaaattataaaaatctaatggtcaagaatatagcaattgaaaaataataaaaaaaaaaaatctagatatatataagtggtaaaaacgatatgaatataaaaaatagaataaatatatattgtatgtgtgaattttaaaaaagaaattaaatcaatctagaaacttttatttttgacaaaatactcttaattctttttttttagaaaagaaataatcttaattcttataacttacattttatgatcttatatattttattatattgtggcataatataattttctttattgcaatataagttcgaaaggttattagtcaatacggtagaggtttttttttttttttttgagttatatttgcacttcataaaatgataaaaacaccttattatttaaaagaaaaatataaacttaaataatttttaaaaattactctagtatttttttaaaaaattttcctcacattattttat

SEQ ID NO: 23384 - DNA, 10832 bp, Cannabis sativa
tgtgtgtgtgtgtgtgaatgagttatatacatactcggtaagaattcttcctttcacataagctatcggtaaatatgcatcccctactggtatttccgaccagtgaaagtgaatccttccacccccaccgccgccaccgccataaggactgccatgtcctccaacagttgagatggtagaagaatcaccaagtgtcaatgtttgcacaaataaaagaatcgttccaccagagccacccccaggacctatttttgaaatggtattttgttttctcaaatcttccccaaagctttccccatcagctttaagtgagccatcaacagataaacttaataaggaacgctccattgaacccatcactaatcaaaagaacagaaataacaaccacccatcagaagaaaaattaaataacaaggataccaactgttattcaaataaattacaaaaattgagtattaaaaagaaaaaataacatgactagtcaccaatggctagtatgattaaaagtaaatgccaaaattggatggggaacgccataatacctaaggctacatgtctaggtcccaggaacctatctgatctagcctaatacaataattctatatcatgaatctgatttgactagtacttttatctctagaagatatgataacaccttgatttaggatgttaaacagtgttgacatatctgaaatgatttcagataaatttcttttcaggctacttcaaaaatcagaattcgatttaaaaagtacaaatcttcaagacaatgataaacgtgattaaactggtaaacaaaacaataaggttcgcgccaggactttgtccattattgagcatggcccatatttttttaataaaaggtacaaatcttcaacacaattatctggttaaactgataaacaaagctgtaatgttcacactaggacgttctctatcgattattgagctctggaatttaagccccataataagcactgtgattttaagtacaaatatccataactagcaaaatatgaatactgcgataaacatgcaagagtatttccaccattttttacaagtttaaatgactgcaccaaacacagaatcagtttcacctttcaaagcacatcgatcaaagaccaaaaattcatcacataaaatacttaccaatgataccaccacctgttgttgcaccagctaaactaacatttccactaccgctgccaagttcacaaggtaaaccagcatttccatatgcaactccaccctcaatgaaatttccattataatatccatgcccaccttttccgccatgccctcctccaccagaaagaccattttcaaatatcttcccttggcccattccatcagtgcaacctagcacccaaataaaattctgttaaaggtttgccaaatctgaaactggacagaaggattttttttgtctcttaaggtggacccattccttttactgataattcatatttctgatggtataaaaattgttcagcaaagatgacgcggaaggcttacccagcccagatgcactaattactccagaagaagagatggttactgctctaacccagtgaaaatgaataatagatcctgtaagggtgccttcaacaacaacttgttcaactcgacatatctggagacacaaaccaaaacaacatcaaatgcaccgagtcaatgttacaataaatcaaagtgaagagagcataagtatcaatctgaatcagtgaaaacctgaatagtaaaggccaatgtagagttcacattacaatcttcaggtggatgaattagctcagcggggcaatctggaagattgcagtagagccgtggtgtcctacgattgcccataaaaaattataaaaatgaagtagcttgtaaaagaataggtttatatcttatacttacatataattccttgtatgtatgtgtgtgtgtgtatatataaaaatataagcttaccctaatttgccatcagctgtctccaaaggacctcgtagaaaagatccagaatcaaccttcaaataagaagagaagattagcaaatgcatgtctagtgatgctacacagttagagctcattcaagcaaatatctaattacataggaaaattaggactataaacagcaaatatatttacagcacacatatctacaaaattatgtaggagttaggacagacatattttgtgtatcatgtttattcatacacataaagatagccatttcacataaccatatatatacatatatatatatagagagagagagggggggagggagggaaagttataaaagtagattcaaaatatgggttcacagcaatactgggaaaatgaacaaaatattaatttttttattattattttaactaggatccctgcctaaccctacgacaaaatatgaattttcttttttaacacttcattaagcaaggaaatatgagattagtgtcagaatttcaattatttgcaaagtgaaatgagaaaattatacaatgtcctacaaatcttttagtaggtgggtgtaccacctcaatcagattttgaatgcagtacactgtgtactaaaacactttttaatcatccaacaggatgcctgtacagtcagccataatgttattcttcaacagcaaaatgaaatatcaactactgtatgtataaaatggcaatcatctgtcagtagaaattccatgtttcaaagcatggaaacatacctccaatgctccaataatggttatttggaaaataaaaattaagtactgtgaattttagccatcatatttcactgacttaaataagcaaaactaagaaattttggtgtcaagtctcagcttacattgacactgtaaaataatgaaagaattaaacgctgagcttcaatcaaattccccggtccagataaatttagaaagccttgtccatgaatgaactcccaaatttgcattagttagaacgtatcctggatgattcctacaaacaaaatccaaaattgtgagttcaggcataaaatctaccaaatatatgattgacagtagtacaaaagaaaaaagagtagaagatgatgatataccttaagaaccactaaattgcttgcctcaagcaaagatgttgccacgagtgtatcattaccaccatctataacgatttcagagttccacatcaagttcattttcacaatcatacgaagggccccgaatatctgaattaattatgaaaaaaaaaaagtaagagtaaaggtgccaatgccaacaatttaactgtttaagatttgggaaatgaaattaaaagaaaagggttgagagaaagaaacagaaatatataaagatacaagtgacaccacactaaaataaacaaaactacacataattatagaagatggcaccacagtacacaagagatcataattaacattataaacaagagcagaatagaaaaccacatagagagggagcaaccaaaataaaatacaagccacttgccttaacaacagagtcactcatcaaaagctcttcggccattaactcaaatgctgatgatgaataatgagcaagcccaaaactcaaagttgcaccgcaagtcaagcgaatttgtccttggacctatataatttataaattttttaaatcacaagcataaacagcgtatggaagactgtaattcatatcttacagcttttgaaaaagccctgacgaaaggatctattggtaggttaccttaccctttcaatacatcacttaatctacacaccagtgaaattgactggagattaaaattcctaattaaattaccagctagaaaataagcatttttgtcttagggaaggcaaagatcacctaagaaacaataagcaataaaccaaagttatagtacagtaggagcacaaagatttcagctgctaaacctgcacacggctccagaatagaggaaccaaagccttggcatgattttgaatataaacatttgtccaaagtggctgcttgggaaaatccatcaggagcgtgtcagtctgtgtggtcttgttgtgattgctaactataagaatacgaggcactgcatcataataagtccctgcaccacctgagttttcaggacagcctaaactccttcctcctgaaaataacacaagatagtgaaactggcaatcaaactctctttttttattttatgagaacagaaagatataactgacaataaaataattattttaaaaaaaaatataaaaaaagatatcaaagaaaaagataacaatgaataatctcaatgcttacaatgaagtaccccaataagtgattaaattaggaaaaatacaattctttaaaatatttagaattggaacacccactgtcctaccaaacactgacttgactagatcccaaaaaggctccaaggttcccctctaaatgttaaaaaaccccattattctgttctagccacaaggaccaacagataaccacgataaccacattccacaactaaaaccaaaaaacaaaaaaatataatgccctccgcatatttttattttatttacttaacaacaagttcttttcctaatattggtgctagaaaggaagactggtccttttataaatagcaggacacaacatacatgtcaagggtactcctgcacaactacatattataaaaacaaacaaaaaagtattaccatgtattagaaattgtgtatcatcatgcctgctgaaaacatggattgaaattcttccacctccacctccagcaaatccattacctccagctgcacttatcctgccaatcccagtcctgttcttcaaaaaggaaaaagttttttacaacatttcaaagatagctatgaacaaacaacaaagacaaatcttaaataacataagttcagccaatctaaaaccatgttttgatctcctacttttgattagcctccctcttttgtatgtatatcctattcatgcatagaagcctaatctcactattatttatcacatgaccaaagtctgcagttcacatgcttaccaagttggtaagtttcattctattcagttttaaaacttgcaaacaggaatcaatctaacaagtaaagtctctaaataatataatttccaaaagcatagactgctgaaacgtggtactaacaaataaagtagatattcacatgcacagaagtctatagtaccaataaacagaaattttagttcggcgcagggggggacctcggataagaaagaaagataaaaaaaaaaaaaaaaacatcaatcgatcatgctcccaattatgttagaaacaaatagcatatgacatatatggaaaaaagttaccatgataaccaatggaaaagccaacaactttgactattacagataccatcataattttcatcatcaactagagaaaagtcttaatcatagggtcacggttatcaagttggttaaacagaaagagggatagtccttacattctattagctttgataaaaatgcttcccccagaacctcctccacccttcaagccaccctcacctccttccgccaagagactccctgaaacatctatggtaacattcacctccaaccaaatcctcccacctccttctccaccatacttgacctctttactagtcgtacctcccctgctcccataactatctgggtgctctaatgacgtccacgagtaagtatcaccaccccatacatcatcaggaagcttcgtattatcactcacacagctagctcctctcccgccatgaccaccaccagatccctggagaccatgcggcgtgccactagtctgctccggcggctctccagctaaacccgtgacgtttatcaaagacccatctgataaatttgcatttaaggcattcacagacaccaacccagccacaatagccgaaccccgacccaaagtaaatgatttgcttacattaacccaaattgagcagccgaacaaagggcaactcaaattcactccagggagtatatgcaaactacctttcccctctatatagacatcgtcttcaaagctcaagctcgaattaagctcgcacaaggtgttaagcgacccaacacctttgagaccccccacacatgtgagcgacggggggtgtggcggcggtgctggtggtggaggcgacggcggtgtgtaatctccacgaaacgcgtcgacatccaagctggcgatggagaattcatcgtcaaaatcggaacccagacaagggtttacggtgaaaagtgccaggaaattgagaagaagaagaaactggaaatttgatgacatttcaagaaggtaaaactcatcccacagattatctcaaattctaattcaaattatacaaaattggattttggcatggaaatttgcttccttcttgggatgtgtgtactgtgtgcgtatatattgtatatatatgtgtgtatgtaataatatatatatataggttcttcgttcgatcagagagtgacactgggaatgagaaattaagatttaatttaacaaaacaaaaataataattacaagaaattaagtgggcctatggctgtaaacaaaaacaaatcttcgcgaaagagatgaatggagaaatgaaattggcgttaccaaaatcaaatgtgaccgagaaacggaaaggagcggagaatgacagagtttcagttgaggagagaagacacgcacgcaggaggagaagcttcttgcaccgtcttccaatttgggctgggccttggcctttaaagggccacctaagattgtataggcccactagataatactctttttatcattatgaaaatgatatgaatatgatgtactttttattattatttattaactatttaattattatgatttgttttcttaaatttatcattgtcgtcatatcaataaggttttcagttatgtgggatgattagacaataagccaatatatagggaacaactcatgttgtcttacatggtgtagtttagtacaaagggataatcataaattacttgaagattatattatcaaatttaattgcccaaatatagtacaatggtcctaataattgagatcaaattatacgtgttgtgtgttaaggagtccgtttccaatcaaatgttaaaagtcactttaaaaaatagaattataaagtcttttttccacaaatgacacaaacattttgatgatacttgtgctagcttttttgtacacttgattgattggatggttggcaatagggagtctggcttacatttggaaaactattcgttaattaaaattagatataatgactaggattagttagattaatttggataattaaatagttatatctatattttgataaattgatgagaatcactcgagaaattacaataaagatattagtaatcgcaaattaagatagcttaatcgaaaatttttaagttattatcacaaatcacatgatacaaatcacaaatcaccctaaaccctaaaccctaaaccctaaactgctccttaaatttaataaaactattacatcatcaaaaataacaccaagcttattcaagtatacattcctattattaatagttatgcttgcttgaataaggatataacatgaatgaccccaattaagtcatactaaaagataaagttttaacttgtgacattgaaatactatatgaaccatatcaaaataaaacataaaaaaaaaatgattggaatggctatctcaaaacaggatatcatatcattaaattaaaatcaaagtcttatatccagttaaaaggttagttagagtagaagttagttaagttgtgtgggttgttcattgagttagttagctttggtgagtgagttagttggtcttgtaactaactctacctactataactgataatcacttgtattagatggtgagttcattgaataaagattttgattcttcttttccttttactctgttttctatattacttccgcactaatatggtatcagagctccccattggtgtgagctccttggttcttgttttcttcatcctttttgtttcattctttggttcgtggttatggcacggaaagaaggagttcaaactcggagcagtcgtaatcctgaacataacttgaatgattcgaattgattcttagtgcttagtgaaaattcaagatcgacgaatgctaatgatatttctaacccttactttctttatactggtgacaatccatgagttgtgttggttccaaaaattctcacagaagtgagaattacaacatctggaagcgatcgatgatgatcacccttgttgctcgaaacaaagcaaaattcgttgatggaaaacttccacaactagatgaggatcatgaagattatgatagctggtgcagatgcaacagtactgtgctttaattgatgaaggtattcatcattctgctacaaatcactctttgttcatcaaacacttcaatggaggtttccttttcttattggtgtatgtggatgatgttattataaccaataacaacttacaagaacttgaagccgtgaaagtcggattaaatgctagattcaagttgaaggacttgggacagttgaaatactttctaggcctagaagtcgctagatcagaaaagggaatctttgtttctcagagaccttatgttgcagctgctacaagagcttggatacgtaggttgcaaatcaatgaacacactaattgaagctaacctcaaacttggacgagatgagaaagagaaattggttgatccaactctgtatagaagaattgttggtaaattatattacttagtaattacaagactagatatctcatactcagttgataaactgagtcaattattagaagcacctcggttcactcacttacttgcagcacaaaaagtgcttaagtatgtcaaaagcaatcttggtcaaggattatattttactgccaatacaaatgtgaagttgcatgcctatacaaattcagattgggcagcttatccagatataagaagatataccataaggttttatatcttcattggaacatcaatcatgtcatgcaaaagtaaaaaaacaacaaattgtttctagatcttcagtagaggcagaatatagagccattgcaaacacaacatgtgagattttttggctcttatctatcctaagggagctaaatgttgagcatgaaggtcctgtattgttgtactgtgacaataaattagctaaacaatgcagaactacttcgttgattacataactactttgtttgggaaacaagctacaagcaagtgttcgaaaggacttgcaggtcagtgtgagaattgtctcgaatgccttacaggtcaatctatacttgaagttgtgtatgtgagagagagagggtcttctttgctagcgtatggatgccacgctaaatttttaaactttgaggggatttccaaagccttgattcgatttgagagaggagaacactattgtcgatctaactcttactatgttagatttggagtagtgatacccttaaccagagcggtaagggtgtcaaatttagccctacacactgtggtgatgtgtgcatcagttggctgcttcttgttgatgttgttatgcatgatattttatcttccaagttaatcaaaagaattcatcgacctaggccttggggttgttgtctggtcgtgtggccttgctgataactatggggatctatcccgtatgacgatagagtagtctctcgaacatttacttcatgaggagctgctcacattactataccgactatttccttcaaaatagtcttccttagagtgacctgtgtggaggaagttggattgatttctcaagttcaacaatccttcatgcacctatgggaagtattcatattgttggccatcaagacctcaggcaaagtacctacatcaagcaccttgttcatcatggaagtacttctgagtgtggagtagttcattgatcttcaccctctgaatctcatactcttcactttcttgatagagattgtgcgttcttcctctatgtttgactgtaggtccctttccctttgtagggtcacaggatgattgagattcatcagacttgtgaagagaattcaatggaggagattggtttccctcattgttcaaattgcttcgagcagaattacggttggtcttatcagttgcatgtggtggacctataggtatgggatctcgagtctgagtcctttcgaacgcttgctcgtagctcgtttccctaacaagtgattgcttcatatcaggtaaaggacccgtagatgcacgttctcgagttcgagtcatttcagacgctcgctcgtagttttattccttatggggaatctcagtgcctgttgcttgttgagtagtagcctgactattaggagtggtagtgttgcttcgcgtgttcatgatgattatttgcttgaacttatgaattcctttctaaacaaagttcttagcaaagaattcaaattgtagttggggaactcgaattgtggctctcaatgaaaccaccaaaatgttgacgttgaaaagtggtcaataccagctcgctagattggcgagatgaataatgagtttaggtaaaaaaaaaaattagagagagacacacaatttataatatttactccccatgtcgtgatggtaatggagctacgtcttctttgagtttttatttctcacgagatggaattacaaaaaaaaatggctaagtgtttaagctctaatttctagagagagatgctatgaccttgtgggtagttctctgaatatgaaaaatgaactaagggagctctccttttgtaagtgaaggagatccttaaaaataggaataaaataataaaaaaaatacaagttagctatttttgac

SEQ ID NO: 23385 - DNA, 2661 bp, Cannabis sativa
caattgtaggttaattatttgtgtaaatgatgaatgtcaaaggaacacaatgatgaagtcaatgaagaagaggttaagcttttgtttagagaggtgaatgggggtgaagttttcttggcaaggagttcgtctgagatgagttctctgggtgaaggattgctactaaaatggggaaggaaatattatttcaatcgccaagacccctatttatatggatggcaatggttcaaatgtttttgaaatgcacggtccatattaaattgatcaagggctacgccatccaatggttgaggatatgaaaggtttgcatttaatgcacccaaaggaaaagaatataagatttattactcatcattttgtgtttatgtccccgatgtgcatgaagtttggcatcttttttaatccagtactcactcgcttcacatgagagatgcgcttaaatttagagcataggcttcacaactccacaagcaccacacctcaaaaaatcgacaacaatattggaggacatgatatcccttgagataccagaggcaatgaattagagacataaggcaagcatctaggagaaacctacaagctcccaacactcataattcttgggatcttgggggtaaatattatccgtattctcagatgaagtgtacaagtgaatcacaaaaggatgccacgtcagattacacattgttcatgtttaatttttgctttttcgagtcatgaaaggtgcgataatatcagactttatatagtgtccctccctgctagcatcgacagaaaacaccccatgatcctcattgttagaaccactacaaaggagcagaagtcacacatgctctaggattgtagcagggcagttcagtctgagaaagccttagaaagacattcttggaattctcttatactatatccgaagccaaacttgacggttggataccttttgacaccaaatcagaccttggtagtgcacatatgtgctttgaagcccctctttgtctaacaacatgtatatacaccaacttttcaaggtgaaacctttgggcagcatgcgcccttggccacacaggttgggtaggaatatttgtgaaccacacgatgaggaagttccctatctaccaactgtgatattgtcaagttgtaaacggcaactaatgaggcgtgcttaataataaaccctaggtgggtgaagggtatgccctcaccaacacatgtgcctatcaatacccttattggtcatatgtaaatggtgaacaatttacagttacattgcccaaatttctataaatctttgttcttattcttcaagagaaacgaaaggaatacaaagttgttatgcatactataaacacttgtaatacttaaacactcaccggagaggctaatacaatggacttgtggactagggattattagaaccaaccatgtaaaaaactatttgtctattagttattgttttatattttccttaagctctaattaatctaattccaaaaatctcagtaaacaatatgttcttttggaaaatcaacaattttgagttgccttccctggaggaggtcttgttctttcatggagtgaaaccttaaccaatgtagaacaattgtaaaaaagtaggtttttataagctcaagaaaactcgaacactcatttccccacaagccacacaaaaggctcccacgacattaaggaatatttgtttttctctactagtttctcggtgaagagggtgcccactataacgccctgactcacagggacgccacatgtgtacttttacaaacttattattaactaacctattagtttaagaaaaattgtgatttaattaaaaacttttcattaaattaaaataagactttaatacaaaatactgtcataatacggggatcccctatttagaaaattcttttacatccaattacaaaaaccatcattacaaaagtaacgttacattttcaaatatagaaaaagggttgatcctgcttcccggaagccaagacaccactacagatatgttcatcactgagagacctctgactcatagccaaccacaacttctatcctctttacctgcaccatgaagcaaccgtgagtcacagttactcagcaagaaaagctacttgatcgaaaacattgaaagtgcaagtattctcatcataagatagtatacatactcgtggtttattacatattcaacatgcatatatattttaatgtctatacaaacacatttattacacattaaaagaaaatcatagcaactcacaatcatcaatttcatctgttcactaaacagatattcattcaatacatattcacatattctcaatgcttcataaagcatcctaatcacacatccctataattacataattgcagtgcttcataaaacacccttatcacccgctatatacgagctatgtatggcactatcgtttcccgataaagtgaacgataagtaagaaacatatcaatggtttcaacgagtaattactcataacaataaatgatcgtatcttttcctcgatcataatccagccataaaagataatgatcatttctcatcattaccttgattttaaatttagtcacaaactgttggaaattattttacgtggatcttagatctactcaaaagtatgctgattaacaccctaaatatga

SEQ ID NO: 23386 - DNA, 1825 bp, Cannabis sativa
aaatatctctatactatacagcaatgaaaaaaaaaattactgaaagattgtactcctctcttatttatcttatcagtagaaactttttgttcgatcgtgatgatggtgaattaatttgaccaacttaatgattatcttttttaagaaaaaacttcaaaatgtaattaaagtcttttttatatattattgacgcagcaatgcaagttaagttgcttttgcaacatagatgaaagacacacgtccctataactataagagagtaagagacatgtacagttttacgatttataaaggaaataatacgaaaacgacccatcatttttattaatagtcctaacaaacgacatgtcgtaaagataacgacgaataagtaaaacattggagatattcggtggttaattacattattattacaaatattacaagaagacagtttggccgagtggtctaaggcgccagatttaggctctggtccgaaagggcgtgggttcaaatcccacagctgtcaaacttcatctttttttaaattttgaaagagcttaagagcattaaaatgaagctttagaagaaattaaacacactaataaaaattaattctgaatctattgctacaataatgaatactattagttgaaaaaggaaaacattattctcttactcttttatgtgatgatatatatacagtgatacaaattttgtttggcttggaccaaacatatgtagctgagatattattaaggaaagcagtttttatgaaaaatattgaaattacagggtgctccttacagctatatgctcaggggcatgtctaatggaagagagaattattaatctaacaatttgcaattttttgcatattgtcaaatttctggatagaatgttgtatttataatgtatttggtctagtgtcctcacctcataaaagagcaatattaggagtattattgttgttagcaacatgaatactggttttggatgcatgataaaacttgtatgtactctggcaaaacagggtacaatttgctgcagaatctcaaaggcaacagctctcaaaatccaaactttgggttttggagtgatctttggcagcttaaaatctcaaaggcaacagctctcaaaatctcaacatcacttgtccaatgtgttcaggagcacccgaatcagctctacatctttttgtggactataatttcgctcgtcggagaaaattctttggcacttgcgctagatggtttggtaatagtcaagtttcagtaagtaatttcattgacattccttattttgaatcagtggaagtctactcaaaattcttctcagaatctttctcacaataataaaaacaatgagaaaggacaacactggactaaacccggttaatctatgatcaaagtcaatgtaaatggagctaatttctctcaagcaaatagttttggctatgctttgtgggaagagatcattaaggtaatttttttaagcttttcaagcttgtaaagttggtgctattcaacctgagatagcaaagcagtaggcatcaaagaaacttttaactggataaaaattcatgaatagtcgaatgtggtcatggaaacagatagtattaatgtggtgcagataataaagagtggagaccgtatgattacttcatatggcattttaattcatgaatctaaatttttattgtctattttattaaaagtgtgttgaatttgtaaagcgattagcggataaggtaacctattatcttggttttactatagcaagaataatactcctactaatgtaatgttgttattattgaaggacttttaatttatgaaaattgtat

SEQ ID NO: 23387 - DNA, 3006 bp, Cannabis sativa
atgttttgtttgtactacaaattaaatatattactattttaatattattaaagaaatatactatttctctccaatcaattctctctaatctaatataaattaattatatactattactattctctttgtcattttttgttctctatcttaatctcacaactcacaataaatcaaaataatatcttatttcttcaaaaatttcaaatatcacccattctcacatcttcattctcctccatgactcaatgttagtaaatatttttctctcaatattcatcataagtcaaattcatctctcatacattttctttatttttgcgaaatataaaatagaggagattcaagagaagaaattgacaacaaataagaaaactcttattttatagattcaacaaaaaaaaaaaaaatacaaagttcggttttaggcaatttgaactgatcgaaccgcggtttacaacggtcggttctaaggaagtttctggattcgtaggtcagttttcgaattgcaccaatttagaccgaaaaccaaaatttggatttttatatgaaaaaatctgaccaaaccgaccgatgttcagcccaactttctctattttattgttttaaaaaaacattaatagaaaaatattttggagtgagtttttttttttaaaaaaaataataaaaatattctttagtaaaaaaacaataatagaaatatatttttcgaataggagcagtgagttttaaaaaaaataacaataaaaagatattttttaaataatgtccaatgagtttaaatttaaattgcaatgtttaaaaaaagaacaaatttgtagccacattttttttttgagaagattagaaatttgtattgcttcaaactttttaatctatacaaataaccaacactttctttttgaaagcctgcatacgaaacttacacacattaattataattgttcaaaccattctatatctattctcctcatcttttttggccaaatcgatgagattctcatcttcactttctgttgaattcgttagtgactgactatagtgtactcagtttctggtgccatagaactgtgatgaaatgatttttttcttattttattcaatgaaaaagggatacaatttataggacttttgtactaaaaatagaatatactaattgaatttagaaatcactaattgatttgtagaaatcactaattgatttgtagaatatttcaacactccccctcaagttggtgcatatatgtctatcatgcccaacttgttcacaaattttgaaaatatgcgaactgagactgctttggtgagaatatctgctagttgatcttctgatcgaatttctggtagctctagacttttctcctctaatttttctttgataaaaaatcgatcaatctcaacatgttttgttcgatcatgatgaaccggattataggccatatcacgagcggacttgttatcacagtataaccgaataggtgtaattgtagcatagcctaaattctgaaggagtaatttcaaccacaatccttcacaaacaccaagggctagtcctcgtagttcagcttcaccactcgatcgagcaaccacactttgtttcttgctcctccaagacacaagattcccacccacaaaggtaaaatacccagaagtagaacgcatgtcatttttatcgccagcccagtcagcatctgtgtacacatcgatggtttgttcttctgtctttctagagaacaaaattcctttcccaggggctaacttcaagtatctcaaaattcgtgtgactgcatccatatgctgcttacctgggttgtgcataaattggctgaaaatgctcaaagcataagcaagatctggtcttgtatgggctaagtacattagtctgccaacaagtctttggtatctctctttatcaacgggaacttgatcatcttccattcgtaattttaatccttcttcaattggcgtatttattggttgacatgcagacatccctgtctccttcaagagatctaaagcatattttctttgggacaagaaaatacctcttttagatcgagatacttctattcccaagaagtatttcaatgggcctaaatctttcatttcaaattctctcgacaagtaattttgaagagcctttctttcaactggatcatttcctgttactaccatgtcatcgacatagataataagtgcagttaatttgccgtcttgcttcttcaagaacaaagtatggtctgaattgcattggtgataaccaaatgcaaccatagactttgtgaatcttccaaaccaagccctgggagattgcttcaaaccatacaacgatttcttcaatctgcacacttttaggctttgcttatctgacaccatgcatcctgggggaagatccatgtagacttcttcagtgagttctccatgtaaaaatgcattttttacatcaaactgttgtagaggccaccccaaattagcagctaaggataataagacccgaacggtgttcatttttgcaacaggtcaaatgtctctgtgtagtcaattccataagtttgagtatacccttttgccaccaatcttgctttaaaacgttcaattgtaccatcagctttgtatttcaccgaaaatatccatcgacatccaacaattttctttcctgtaggacgatccacaatctcccatgtttgattcttctgtaaggatgccatctcttcattaattgcagcgttccatcttggatcagctaaagcttcctgcacactgttaggaatagatacagtagataattgatatacaaatgactgatttgattttgacaattgatgtgtagacacataatggttcatgggatatcttactttactagacaattcaggttcatatgttggttttggaatacctcttgtgagacggtgtggtaattgtcttttagatgactcaggaatatcctcaactaacgattggtttggtatattaatcaagagatcctgcaactctacatctgaagtt

SEQ ID NO: 23388 - DNA, 1698 bp, Cannabis sativa
gagaatcaactgaaacaccaagcagttcataataactcttctctgtcttcactctcctccagtctttcccattacagcatctaatcacagagtacctctgtccccatcttgaataataataaattaaaaaaaaaaaaaaaaagaaccaaaggagtttttatttgctgaatagaatcaaaggagttaatagtgaaatttggacagagttggggtttaataatgaacaataatacttagtgtatgtcactataaactgcaaccaaattgagctgtgaaaaaactgagaatataactattatcagctgaccacttcaaagatcaaaacatgaagtggatgacttatgcaatatatcatattattacctccaagtgggattgtttgctgtgaaattttgtccatgaatatggaaagttcttggcagggacgattgggagatgggaagtactgaaattgacatttttttctttcttaaaagtgattatgggatttttgcaagtcctttgaaattcataagaggagatatatacatttactatttagtgttaggatatttttggtgggttaattctcactagcaattcggatattttctgaatggctttggtggtttaaccaattgtagctctccaaatcagtttagtgaaaaggtaattgggaaagcaacgtttataatatacgacaagttgttttgagaattatgtgctatgttttaataataaaaacgacaatttttttttttttttctgaaattcctcatattaattgaaaataacatggagattcacctcctaaacatcaacaaaaccattacagttgttgttaagaccccatttagccaatacatgggcaggagcattacaacaatttcttggaaactaaaaaacatcacaagtcagatcaacaagtaaatctaacaactgaaaaaatagaaaagataatctccaaggagaggaattccgctcaatagcctttaccagcatatcacagtcgaagagcagatcaaactaagggaaggagagctttttcgagacaaagacacttgcaacaagtgcattcaactatgccttcaaagaatctcgcgcttgaaccttctttgcgaaaattgacctaacatttccctcgtcatctataatgaccactccaactgctactcttccatcagagaaacttgcattaactgaaacccggaacctcctagggcgaggaagggattgaagggtgtttactgacatttttggaaaatcaattataaataattagaaccgaagaaataaataattaaaagagaaagagtaagaacaatacaaacagtttttaggtggttgggacgttaacgagccttagtcctcgagtcaatgttattatgtaacttaagctagtaaagcctttgggaatacaatgagcgtaagttctcaagtttgcctgaacaaatattgcaagagaattcaacccttaattcgaaggattcatcgggtatttatagtgttaagagaattacacttagtttctattttttctctattggggagtttacattgaattacttaacttgggctgtcttgtgaagtccaaaccacgaagaagatgaactactgactaggcagattagatacggttgaattagtcaaaatcgtgtcctataatcatgaattaattgcttgatctttgtttaggaagtttttccttttagcttgata

SEQ ID NO: 23389 - DNA, 5346 bp, Cannabis sativa
aacactttaaataatatttatgttgattagttattaaaaaatgtgtttttaaaatataaacgaaattataattaaatgtgatcttatatttataaacactatgtttatattattattaataatatttattaattattagtctaatatatttgttatgataatgtttgtgatgatatgtttcttctgactaagtatgcaatgatatgttaatatgtgtttattaaaatttaaatacaaatttttaaataaaatatgtatgtttattatttatttttaccatatatagtttgtacataaaaattaaaaatatatttttcatagttaataaaatgtataataaattataaatattttttttttgcacatataatataattaagtactataatgtatataaaattaaaaatttccctattaaaaggagtaagattttattaatagtttgtagcttttggtatttgagtgttgttttcattttagaacatttgatagggtatttataggtgctcacccttatactttgtggttaaaaatatttcttctacattcttcttttattagaaggaattgtattcatacatttaatggcacattttttacatagtatttaaaatcagaataatttaatgaaaaaatgtaaccgaataaatgaagaaaaattgaaatcaataattgtaatatattgtttactaaaattatttataaatagaataatattgatttattttgactaaataaataaatgtttaaattaactaaatttttaaattgagttaagaacaaaaagataattctgttatgttgtactgaaattacaattgtaatgtttatataccaaacaaatcaagaaaggagaaagtggtttttgttacactccagctcaacagcttattataacatcgtaacagaaaactaattatggaattaaaactaactaattgtctagttatctctaataaacacgtcttgtttattacacaagttagactagtcaatttaaacacgatccaaatccatttaaggcgaatttaaattcactaactttagcgtgattttcaaatcttgttatcgtatcttgcccgtttggtcagtactatctgagattttaattaaacatgtttgggaggtgaaaaaaaatgagaagaagttgaatgtttttttttttggtaaggagaagaagtggaattaatgtttaaataaaattatctcttgtatggacggttatattaaaatctagttcgtaacattattaatggagttataggttaataaagcttaaagcataaccttttaatcagcaaaaacaggaaaaaagccaaacctttaaatcttattattattattatgcttttaagtacactaaagacatatgttcatgatatgatctcttttaattctttttaattctctttttctttctttcccttttgaccaaatttaggtcctccatcgtcaaacccagctgatcaaccaaaaagactgtctttatccacctacaaccaaaaactccttttaaaaaaaaaatgtcaaaaattaaaaaacaataatggaaataaagccaagagacatgcaaaaatattatatattaccataaaaatttcatagtttccatgtgctttatttgcaccaatataatttgatctttttaaaagcacacaattaataaagctaaaatatataaattcaatgaaatatttcgaatagcataatgaaatattgtctttgacatcaattatcattaattttaatgcataatattatatatttatacatgtgtacgtgtatgtgttacattcaagatcgtaaataaatataatatattttatatattttttcaaacagacaaaacacaatgatatgggtttattcgggctttagggcatcgttaatatcttgataagatgtggatcaatcccccttttgggcaaataactttctaaagatgttgccttttttatttttatcgtggctaatggttattaatcgatacatatatatatatatatactaattattttgaaggtcaactaatttttataaagacataattaatggaaagaaaatagactgttgtaactttgtgtagtgtgtatattggtatctattgaaaatgaccttggtcaatttgaagctatcttagatcgacacgttcttgttcttcttttttccattttgacttgaattttaataaagttaatggatgcattttgagtccacaaaagataacctaatatatatatttatataaatatatatataacctttgtgaaaaaatgcaccatctaaggttgtgatgaggtgatgatatagattgatcttcaatttattgtttttcgttgaccaaaactagttaaactaatatataatttttcttgataaatatttggacaaatggtagtgaaaagaagaagaagatgttaaaatgtggaaagatcttctttcactaattacggttgtttttaagaacacgtgtcgttagtttattattataagatccattgttgactttaaaataaactaagttttctgattttggtggtatggattttaatgttatggccaccaaacactgacagtaataattttatttaatttgtatgttttttgtttttttaaatatagtgatgagaggaattttttttacgtacttttattataaaaataataaataatgaaaacaaatgagaagttgtgaccatatgatatatctatgcaatgcaaggtttattggttttctaaaatttagtataacatgggaatccaggaccactaatacataatatttagtgtttacgttcggcacaaagtgatgatatttatatattattattattattaatttattaataataaaacttaataataaaaccttatatgtacataaattcatcttagaaaagacgaaagaagattcatggaccacatctcattctctcatgtgaattatgaccatcttttttcagataattttcagaaagatatatatatttatatatatactatacatattcgatggggaagtactataggcgcacgtgcgcacttgatgattttttctttctttctttctttttttgaagtgtgtatatatatatagttaaataatatacacatatagctaaactaggctaatgggttaatcaaggccaatgtttaaatattggaaataaaaataataatatgtctctcctaggttctgatgtaattaattatgtaaataatggtgtagctaggtcattcaaattcttctataaaaacaatctctttctcttctatatagttatatcatgggtaaacatgagtcatgactgttgtttttaaatggaaatattatgtgtatatgctaatgctatatatatagttcaaaaaccatgcatatatatatgtatatatatacattaatggattctttccacatgatcgatcaatatatatagactatagtatttcaaaagggaaaataaagaagtttgttggattctcttatggcaatgataagttaattaattcataaaattaataacgcatcaaaccaagggactacttcttatctctaaaaaaagttctagttttgacttcaaaagcaaattaagcacatctcagctgttctttactaataaggtatgtatgaatatagtctctctttatttatatattatatatatagtctcttagcttattgttccataatttttagtcaaaagaaacaaaccctattcttaactttttggtttgagtaattagaataataaaaatcatataaatggtaattataattaggcgtatagttttccctatatatactaaactattgggtcatcagatgagtccacattatgatgaagttctctagtaaagttcactttagtcattacatcctaattaaagctctgcgacaaataacaatattaattataattatttttatttttaaaaattataaatagaaatgtgtttctattgataacaaaaacacaaagttagagttaatatattttcaaaacctgatgatggcattggcattggcatttgccttaaagtttttgatccagttttgaggcttatctctctcaagatcaacaatcgaaaggtactcaaagcttctcttcttcttctttttatatatatgtacattttttttattcaaaataaatcctgtgttgcaacacaaaataatatatccaactcaaagggaaaaaaaaaaatcacacaaatataattaaaggagtaggtccatatatataggctagccatatatatatatatagagaataagataagctacagttataggttattctgttcatttaatctcactctcaatgacgtactcaattaataactgagatgataataaccgttggatgagttttgatatataaaagatccaacggcgcgtggtgaaaacagtatgtgtttgtgtttttttctttaattgcatatatggaaataagtaaatagttttttatcttcaaataaaaaaaaaagtaaatagtttttaactgaggcaaaggacaaacaccagcttgtcaggttttgtggaggtcaatcaatcaatcaaaaaacaacccattcccattttgaagaccaatcaacacaaacacctttctcttttttgttttctctcaatttgatttgatatcatttacatatgtttttacattaactttgaataaatttttgggaaattttttgaagttgaataagttttagtttttagttaaacaaaacacattttaaaaagttaagattagaagtataattatgttgattaaagctttaaaaaatgaatttcaatttttcatactttgatttttcttggcaagtagtaaattagagttgatgagtttgagttaacactttttctaattaataatttgactttcctttttgggggattactatgacgggtacgttttacttggcccacaaagtcaaactaaactcatttaaatttgaataaacaaattacttaaagccactaaatatattatttatatactatcattaattagtggttaagactaattttttaaagagaaatgttaaaggacaccagtggtgcctagcactcttctatgtgtcagtatcgctattggtccaattaagtatcgactcccatataatttaatatagtagtttttagagagtatcgctaactaatcgtaatgtgacatgtcgagaaggtgctaggcaccactggtgccttatagcaatgctcttttttaaaagagaaaaagaagaataagcaatgctctaattaataaaataatgtactttagatttagaatatttgaattacaattttgggtttaggcatgtattaattagtggggtatattattg

SEQ ID NO: 23390 - DNA, 2653 bp, Cannabis sativa
ttctattatgtttctcaagaattatttcatgtttcaacaaccaatccaagagaagagtaaaaccatttattctccttgtataacaaaaacaaacaaacaagtttttaaattgtcaatgaataaacttcttaccaaaaaaaataaacagatattttgcctcctaaattttttcactaataaaatcgtgctccctaaattgttagggatgttaaataccccctcaaatgtgaatattagtgaaatatgaggatgatcactatcatattttgcctatcgaacttttaccactaccaaatttacttgttttaataaaaggagcacgaattgataattataaaaaattcagaaataaaattaccaattatttaacggaaataccatatttcactaactctaatagttcaaggaactatgtaacatcactaataatttatggagcttcaagaggcaaaataaactatcatcaaaaaatcatccatacttatttatatttatactaattaggaattttatctccttaccaaatcataatctctaaaatataattaaaaaatattcagattgttagacttaaaaggacaaaatccctatatgattcaccaaaaaaatcatacatacatacatatatttgacaacaatgtgaatgtagtgtgaaaaacaaaagtttaaaaagttcttaccccatcaaacacttgatatacaaagtcattgtaagtgccagcagcattgccaaaagcatcagcgaaaggaataaactcaaatgaaacagagtaaggcagagcctccaacacagccttaaacacatctatactgtatcctgaaacggtgtcgtttgagaaaggaaaagaaacattcacaaactctttatatccttctttcaccggaaccccaattctcaacttcttcccattcaccggaatttgccaccctttaggagctgtggtcgaatcaccaggccatattataggccccaaactggtattcaaaccagagtgtttgctctttcccttattatctccaaaccccaaaactctctccaatccattctcaactgtccaaaatccaatctttctttcaccatttccattcacattaataatctcaaaagttgaagtttgtaactgcccattaacgagtttaaactcacccgaaagccctttaaatctcatcttagataacgcttgagaaagattaaaaccagttcgagaaaccccaaaagatcccaaatcagtagaagagttaactgaattcacactttcgaagctaaagttcgaagctttaccaatctcctcaaccgattcagccaatccgaaaacggcgtcgtatgcccaaagcccaaaagtcaccaaaggagggttaacaatggtgggattttcgcgttgaaattggggtttccaccgagctgtaaaattctgaagctctttcgatttgggtacgtgagttttaaaccctaaaactccttgcatcgaatcaagaaccgtagaattagccgagccaagaaaatcagcaatcccatcggtcactatccaaacgtaatcgttacccatcataccaatcttctctgcaatggcgaaaattcggtgcccaagatcaggcaacatatgaaggacgaaaaccctagtctgcattgtcatgagcttgtaaagctcgccggaaatgtggtcgtcggtggcggtcggaggaattacagtccggtaaggtacttgggcatcgacgttttgtaaagcgtcggttaagtaagggatgattccttcgccgtactcgttgtcgacgtagatggggactacttgtctccatccgaaagctttgacaatggcggcaatggcttccacctgagatgagtcgtttgcggctattcggaaaaagtatgggcttcggagtgaagttagagatgggctttttgctgagaatgttatgattggaacttgggctttgtttcccagttcgattatgaaatgggcctgcattgacgtttctgggcctagaattgcttggactttaacgtttttaattagatccaaagctttttcacaaaaaaataaaaaataaaaattaatcagacttgttacaaaatacaaacactttgtggattaatttactaaaaactttgggataagttgaggaataccttttgtatctattaattaaaaatactctcatattatatttaattaaaatatacctacttttatgagtagattgcctaatatatcattgtcctccacttaagtgtagcacatgatttatattaacctaaggggtataatgggacatcatttataaaagtgggtatattttaaagaatatagacatgaaggtaaaaattaaaacaaataaagaaaagtaagtatacaatacaatttcctcaaaaacttatagaggcacccaaaaataaacgaggaaattgtattgtataccaattttattttattattttaatttttactttcattttcagattctttaagatatacccacttttatgatgatgttctcattataccctttaggttaatgtaaaatatatgctagacttaagtgaagagtaacaatccactcaaaaaagtggtatattttaataaaatataatatgagagtatttttaattaatgtatacaaaaaaaaaattaatagtattcctcaacttatccca

SEQ ID NO: 23391 - DNA, 2364 bp, Cannabis sativa
ttatcttgttaatggaattacataatgaacctatgaggagtagggttaagtggtcaagttcatagtttgctcctatgtgtgatttctcttggggagtttcttgctcagcaagaggagcggtataaatgcatgaatagtgttaatgataccacctcatcccacgttttgtcatatgtcaacagtaaattggtacatgctattcaatctatttatggtgaattttaagtctccgtattaaaacatgaaatcaacatttcactctagatagcactacataaaattaaaaatgcgagatctttagaagtagaaagtataatgtgaatcttggtatatgactacgtgttgagcatttttgtgttacaattgtcattttgctcgtcagtctttcatgtttcagtaattatttcattttgttagtgtttatttaaatcttctatcgactttacttgcttttatttataaaggaggcctatggaaatgttccttccgagtcaagtgatgacgaagattggagtgatagtgctgcaacaaggaaaaggaagaagaaaactactgagcaaggtgctccaatgttatcaagtgatgataaagagtggaatgatagctcaacgagaaaaaggaagaagaaagcaactgaacaagttgctccacagttgccaaatggaaatgcttcagttgagaagagtgaagcaactgggggaaaaaggaagaagaaagcaactggacaagttgctccacagttgccgaatggaaatgcttcagttgagaagagtgaagcaactgggggaaaaaggaagaagaaagcaactggacaagttgctttacagttgccaaatggaaatgcttcaattgagaaaagtgaggcaactggggatgccataaatcataaccttgaaaaccatgagcatataagtaggagaagatcacgcggaaaatctatggttaaagatacaaatgattctcctagtaaattgaaaaaaactatggctaaagatacaaatgattctcctagtaaatcgaaaaaacctatggctaaagatacatatgattctcctagtaaatcgcctataggctctccaaaatctgcttctactggtagtagattaaaatcagcatcatacaagagacttggagatgccgccacacaggtaaaatattaatagttattatcttttacttctataactctggtaaatgtataaattatgttaatggaaatatttttacgtgagtatcaagtgtccgcagaatcttttatttgagcttttattgcttcttcatttcagcaaatggttaaatgctcattatctcagttcttttttcatttctgtgacaatggaccatttctcaaactcaatagtatatttattctgccaatgcaagcctgataatgttattggctttctaatactgcgatagaacatagccttttcaaggcctcactccttactggtatgaaatggctatccttcagttatgtagttatcaagaacaagagtaaggaagcaacttctatggagagaatgagctttgtttctctcttatttacatttgtaatgctattcagaaccctttgtcattaatatacctgaattgtgggtgagtttatgcagtccatccacactgtccgcatggcttaaattgccagttgcttcactggaagccactattgacagctttttcttgcacgaattcctcctttattggattctattgcatcccttttctttaattcataaagggaaatgtatcattattgttgattcgtttgttcttgcagggcctgtatacatccttcaaggaaaatcagtatccagaccgagctaagaaacaaagtttggctgaagaactaggactcacccctcgacaggtcatactttgattacaggaataacgattacatgctcttctaattcaataagaaacagaatatgaatttgtagtttctttcataatatttctcttaacattttcaggttagcaaatggtttgaaaacatgcgatggagtgtacgacatccattaggtagagaagcagacaaaagtgggagtgcttcaaagagaagcatttcatcacctcaaccagacaagcagctacttgaatccaaacaaaacattggagcttcaaatggggaactacccgtgatagttgttgcattgccagaaacctgcaccaagaatgaaggtgatgacaaagccaaattgctcaccaacgaaagcagctctcaaacttctgcagcccggacgtctggaagaaaaaggagtaggccaaaaatcgagaaaccaaccacgcctgttgtagtggacactaacaaaacaagtggtagtagaacaaggagccgccgcaaatctgctccttgacaaa

SEQ ID NO: 23392 - DNA, 3985 bp, Cannabis sativa
gttggttggaatattccttttgggccttgggcctttcttatttagtgaggaaacgctgatcgaaatctttgggcttaaaattgcccttcaactccagtataattgaggatattgtcatcttttaaaataatagtgtttgttgtaacaaatactttcttttctttgtggttatataatagtccaaccctactctcttcaagataagtaataaataagaaaatctcagtttggatttctagcttttcttcctttttgctaaggacatgagcagggcaacccaatattttaaaatgaggtaactagtttggctacgattacaaaattctaaaggtgtcttgggaacaaacttagatggagtaaaaattaaaaggccatttgatgtatgtaaggcatgtcatttccaacaatgtgttgttcagacgctccaacacaccattttgttgtggactttttagggcagtaagtttggatataattgcaagttcaattaaatgataattgaacttcatattcaagtattctccactactatcaacttacaagatctttaacgttttgctaaatttgtttcgcaccatagcaagaaattctttgaacttctttagagtttttgattatctgttcactacttaaagattagagtatctagagcaatcatctatgaaggtgacaaaatactcataaccactcctagcttgttgattgaatggtccatagagatttgaatgaaccatctcaaggggttgtttggctctatttccctttacaacgaagggtcgtttggtcattttgccttctaggcaggtttcacatacaggtaactcaccaaaggtgagtttgtttaaggttaaatctcttgtatatctgagaatcctatcatagtcaatatgaacaagatgcaaattttatagatatgtcaatttatcgttattggtcttttgacatttggcatatttaggtctagttattagggtttatggcatggaaagtctgtaatgatattttagttttaaatataagttgaacaattagatatgtatttgaatgttaaattctttagtaacaatttctatataaatataagaaaatttcttattcatatacgaggctgcaactttgtaatgtatatagaattgagattacgagatatgaacaaaatagtcagcaacatatttgttatccaaaattttatccacctgacgtgacatgtccacatagtcaaaactaacgatacgtagaatataacttgtcaataaaaggacaaagtcaccttacgcgacatgtgaactatcaagagttctaaagtcatcgagcaaagttgtcaataaacaaaaggagttgagtaggccatcaagaacttggctaaccatgtctggctggccaagggaagcttgtaggccagcccgatcttgagaacaagctggtgtgcaaagaatggatgtcagtccaaagaggcctgtttaacgaaggaggccacacatttgcaaggaaagttgtacaaagaagctaaacaacatggaaatggctgggcgaaccatacctggccgacccatagaaggccataggccggccaggtcttaaaaatagggctgggcgactaacttgtgcaaacgattccaaaaagctgaatgaattacgagacaagtccagcagctcatgaagatagggatattccctcatgttaatatccctattttaaagggatatctttacctatttgaatcaaaatattttgtaagccctgcactataaaaagggcattggataacataaaaaggggcgaagcctaagctacacgtatgaagcctgtctctcttgaaccacatactccatctatacctcctagacactaagtcaagtttttttcataagcttttcacaagatctcatcagttctttatctgtaatacattgttctcataatcgtaatattgaagagagccatagctagaaatcataaggtttaacctatgatcttcatggtataatctcaagagtgaatacaactatgagtaggttattacttgctaattaaaggggaaaaacatctataaatctctgtctcttttactatttgttactattatttacatgtagtgataatgaataattaataaggctctactgtcaattgaccaaattctaagtttacaatttagtgccttcattgagatcattgtttgtcattctaactaatgactatggttataactaggagagccacaacctccacctcctcgggtcatcctcaagattctatgatggttgatcctagtgtttgagctcctcccactacagaaggtctcaccgatctgactaaaatcgtcaatcctacaaaccctacaaaccccataaattcagcaccactaatcctgtggatcccactaaccccgtgaatcttgatgatcagcccttacggaccagaacagattcaccaacatcacctcgaataaaaggtcctctcaacacggaacaaccttcacaatgcacagctgggactattcctcagtattatgtaggtgacataggaccaggaattggcgaaccaactatttacgaacctcatgtagacctgggagaggatattgagctggccaggctcagagaagctgtaggccaggtcacccagacaaaagaaccacacgttattggttgcaatgctttttcccaatagagacatgaattcctaaggtggatggatgaccaggaggccatcctctgggtccatcaggcagaattgaactgctgtaatagggaggccagtgatgtgctagggtagtttaatgagagaactacaggaagaggccaagattcgataagaaatcccttacaaggaaggctcattaataggttaggcaccgtctaccagcaggtagaatacagatagatagtccaactaggtccctcgaacaaaaggaaagacctcaccctgcctgaggacagacaagtcttgcttgacagaccgtacgacaagaatgatcgattcctaacacaaggcaacaattaaagatgagagaaccgaagtgactttgttccaccactgaacaataatttcaagaatgtggatccaccaacctcaagaaattggtacaaatcaaccctcccattaacccatagactagcctagccgggccaggggaatctagctaatttggtcggccaaagaagagcaactagcctaggcctgtcggccatagccaactacctagccaagggttggccgcccaagggtatctatccgtctaggaaaatttgttcgggcaagagccaactagagtagatccatctgtgcaagcacagttggttcaactcaaaagacatgatcaaaggcttaattgatctaaatctgtctgacctacatctagacaagtgaaggggaccaccctttacaacataaattaatgcacttccccttccttagttcaaaattcctacttggaagatgtacacggggaaagaagatcccctagcacacataaaatactttgcgatccaaacagatctccaaaaagtaactagagatgtgcgatgtcaaatctttccagtaactctgttcgaggcagcccatcggtggtatttcaagctggccccaagaaggtttaactcttgggaagaattctctcgagaattctatacctagttctctgcatcaaaataaatatcttgacaactggaagatcttgtcaaaatataaaataagacaaggtgaacccttgaaagactacagtcaaaggttcatggatgaggccactgaggtcaaaggcctattagaagaaggttgacatacatccatacttagaggcatattgtcgttgagtgaattctagagagatattagaaggatctcaccaaacaacatgaaagagttccttgagcaagttgatggcttcataaagttagaaaaagctatccgccaagctcagtcaagaaggcaggctagtggtggacaggctcagggggtcaaacaaccccatgttctgttcaa

SEQ ID NO: 23393 - DNA, 2191 bp, Cannabis sativa
  modified_base (1100)..(1102): a, c, t, g, unknown or other
ttttgggccctccagttgtaaagaattgctgaatactggtattatggtggtggtttgtcatgcttatcaatttatgaatttatgttatgaaacctagttttttacatcggctgagttttcattcactttgaaatttatgttatgatcttgctgctcgttctttacatggggttcttgggtttttatgtctctaaacaaagatatacattagatttttaatcttgtaaatggcatcaagatcctgttgattcgattaggctagtccgataaaactgcacataatattctctataatggttattgcatcggttcgttcaaaactgaattggaatggcacaagttttcttgttttctttattatttaccaatgagataagcgggtgtgaataaataaaacgtctaacgtagctctaggctttcaattttgaaggaagaacttgtgtgcttgcaaaactggtcagagtaatattagctagtgtttaattatagtgtttccactctagagataaaccgggtgttcttaagtgactgtttgatattgaaatagttgtaataacaaatagtggtgcatgttgcatttttttttaaatagaaaagaaatttaatataatttataatatagaaagattcaaagtttcaattgtttatttctcactggtataaattaaaagacacatgcattaaaattatctggatattataaacaccaagagggtgcattgatacacgtacacccctttacatataattatacataaaatttccaaaagtcgttgatgtcaagtaataactatacatacattcctcaagccactagggttactttagtggtgagagaggaatgggataaaaggagaggtcatgtatttggaaacaatacctttaagctataaagttattaattgattttaaatacttacactaaaaaaaaaactatacattccttaaaaataaaaataaaaaagtaataactatacataaattcttaatgctcatgtttgtcaaatggatattttgtgcaccagtggtgtttatcaccctcctatgtgtcaatattgctattagtccaattaagtatcggatcccatataatttaatannntagcttttagagagtatcgctagccaatcgcaacgcgacatatcgagaaggtgctaggcaccactgatgcgtaatagcaatgctctttgtaattgcatctaattctcaagaccgactactcaatttcttcaaattatatgattatcgtgtaatcatttagttaaataaatacatcaaatttaataattacttcgaattacatttagtactaattaatgtgactttccaaacatattttttatcactaaataaaattacatattaaatagataaaaggacatggactaaagattgtgagggacgaagttattcgtcatttccaattttcttttctttgtcctgaagatggttttaggctctttgttttatttccaattttgttagtttattttttctttttgattcagtgtggattttctgagttggtatctcacaaattgctataaggtagtgtagtctccaacacacactctaagaactcgtttagatcgtcatattaagtagtattatattgtattatattgtactatatattatatatttatataatactatgttaaattttaatgtatattaaaatattatatatttaggtgtccataaaagttaataccacatataattttacataaaaatattgtataaaatacaatttaatataatacaatacaatacaatacgacttaatacggcgtcccaaacaagccctaaaagaattggtaataaaatatcaagttctacataatttaatttaaatataatatgtaagatttatagcttgtatgtcagttgtattctcttcttgttagctttatttctattagttcacccctattatgatttactgggaagagagctagattttatctttattgttaaataagaatgatagttattataattacataaaacattattttttgtaaaaaaattatgaaagtcctaatttctacgaaagctaattgatagatcttaacatattgttactatgaattgaaacagaaatcataatcaaagaacacaaaatttacaagcttcctctgcattggaaacgcattccaaccgagtagtgcttgggttcccttgaac

SEQ ID NO: 23394 - DNA, 2108 bp, Cannabis sativa
  modified_base (1435)..(1445): a, c, t, g, unknown or other
gttgggaaaacataaaataaaaaaatgtgtttttttaaaaattataatataggttcatttaagtctcaattcctagctcttttggaagctagctatataggtattataatttaagaaaaatactaaaaagtagcagtgatgtctagtatttttttcggtgtaataagttttaagaaatatcgataaataataatagagtactatttttatatagtgttagatactactgatgttcaataattgtactcatgatttaattatttatgtattaatttatgtgtgtgcatgtgtcataaagctatacatataaggtacctaataagatgagtttaattaattattaattatattgtacataataataataaattagtttactactatatatacgtttcattcaaataaaattgcttatccaaaactttttatattatatatatagtttagttatctcaaccgaaaaggaaagttttgttagattatttgagaataggaagagttgattttattttacattaatatattgattgtgtgaaatgtgtatagtcaaagttcataatataatttccatggatatcattatcaatggcttgtttagaagaacactatagtttggccactagtaatttgaaggcttcaacatttcttttttattaataattagtagaaactaattattaattgggtgtgtgtatatatgtatatgaagatgggttgaaattgaattatatatatatattgatgcaactctatatatatatatataggtaagttggaggagtaatacataataatatatataatagagagaatttattattaacgtgttaatttttatattaatgatattagtacaaaaataattaaataggacggtgtgatatagttacaataaatatatacctagagaattgctaaaaagtcaaatattgttattaatcacactcagtagtattttttaaagacagtgttacacaattagttagtgattttttaaaagtaattttcttaagttaatatgaaattcgatacttaattataaaaataatggtatgacactgaaaagaatgctaaacacccatagtactttttagcaattctcctacataacactactgatgtctaacactctccttggtgtcgctagtagtgcacgtataattaaaaaagtaacttttaaaaaatatcaataagcaattataaagtgcaacttataaaaaatattgatcactaataatacccacaaaccaaaaaattattagaaaggaagaaagatatgcagatatgaataaattatttttaactagacatggataaaatgttgggaaaaagtacaattaataaaatatgtttttaaaaatataataggtcgatttataaggtctacctaactcgtttggaagctttctctaactactatatatatatatatatnnnnnnnnnnntatatatttatatacatattaatttatatatatgtgtcataaaagttttttatatataaatatatgtttgaagaatatatagggatgtaccatgagtttaattattctattcacaaacataataatataaattaattaagtatgacttttgttcagttatgctttctattttttttttttttttgcgtgaaaagtcttccaaaactaaacaaagtgttttaaatatttattggttattataaattacatttattattaagtatacatttaataattttaagctatttgaaattcgatttaagttaatatataaatattagctcagagtacatacatatttttatatgtaattcatttttagattgtaatttatgtatttactttttgttttaattttagaactgagatagattaatgtcatgtttgtatgttaacaatttattttaaaagattagcaaaatgcaaatgtaagggatgttttcaacatttttatataatttaaggggaatttttgaaataaagaaatgtaagaaaaactctacaaatgtcataatttaggggaataaattctatttattattatttaaaacaaagatcagaaacgtagattttgagagtaggaagaattgatcttattattttacattaatttattccatgttt

SEQ ID NO: 23395 - DNA, 3126 bp, Cannabis sativa
taactatggccgaagctgtgatttccgtggttgttcagctgttgggttctcttcctctagaaaacataatcaaacaagtgagcttgctcaacgatcttcaacaaatggttgaaaatttgaagagaaatctcaggtcaattcgagctgtacttcatgacgctgagaacaaaagatggacaactagtaaccaaagtgtcaaggtttggctggagactctcgaagatgattttcacgagatgggtgacgtgctcgatcgatggaacacactcattctcagatctcaaattgaggaacaattccggaagcgaagtttggtcagtttcagtttcttaaacccttcttcttgtttttatttccccaaattaaataaggtgatttctcaccgtgagattgctctaaaaattgaagaactcgatgaaaaagtagctagaacagctagtcaaataggtcaattaggccttgtagaaaacatgatgagaattagcacttattgtgataataatgttaataccctagttgttgctggaagattagaaactacctcatttgttgatgaaattgaaattcatggtagagataaggatgagaagatgttgttagatatgttaataatgtctgatagagatcatggcattagcccaggaggattacttgaggtcatttctattgtgggtatgggaggacttggcaagaccactctagcacaattggcattcaatagtgaaactgttaagaatcactttcccaaaagaatttggataagtgtctctgagccttttgatttactcaaaattgcttcagcaattattgaaaatcttcacaaagattatcaaactcaaatccaaggagaagatgcaggcgaaggcgaaggcgaaggctcgtgtcgtacccaatataagaagccaccaacatttcaaaccttagaagcagcgtttaattggatttctattcgcctaggtaaaggtcgatttcttcttgtgctagacgatgtatggaacgaggagtacagaaagtgggaaccattagagataattttgaagaagttagcttctgttggaagtaaaattttggttacgacacgaaaggagagtgtagcaagtgtgatgggaaccacaacttctaagatcattaacttaaaagagttgaatcatgatgagtgccaattaatattcgaaaggcgtgcttttaatggaagaaaggatgaggaaatcaaagaattaagagatattgttgtgcaaattgtgaaaaagtgtaaagggttacctctggctgccaagactttaggtggtcttatgcatttcaagagaagcagacaagaatgggaagatgttttgcgtagtagattgtgggagttaaatgttcgtgaagttgaacaagatctctttggtccgttgttattaagctatctcgatttaccttctttagagaagcgttgtttgttacattgctccatatttaccaaagattatttgattgataaaagagaactgattgtattgtggatgtcagaaggttatctaaattcagaggaggaaggggcaagtgtttttctaaatctgacaaggcgttctttctttcaagattttcaagaggtagaagatgtatttgatgagggtaatgtggtttgtaagatgcatgacatattacatgactttgtcaaatatttgacaaaaagagaatgtgagattgtagaaacttttaatattaattcaaatgatcagaagagtagactttgtgatcaaaggatccgacatttgaccatagcaatggaatctaaagctgagtttcctgctttggaattgacagatgagaataaaagatttctgcactcctttctaattttaaagaaaggtaggtatccctctctcaacaacttcaccttctcaacactaaaacatattcggacattaaatttgtccaaatgtgggctcaagagattgccagggaacattggtgacttaatatatttgagatatcttgagttgtcaaaaaatcctttgattaagttaccagacacagtatgtaacttatgcaaccttcaaactttgaaattagagtcttgtagatcattactacagctaccagaaggaatgggaaagctaatcaacttgaggtatttctattattacagagatggtgctttcgagagacttccaaaaggaatttcaagactaacttcgttgcgagttttaggttggtttcaagttcccaaagatgaaacgaagtacttgactcttagagagttaaccaagatgaactgcaagctcaaaattggtcaacttactattgatttgatccgtcttgttagtaaagaacatgcagctgaggataacaaggtcgatctaaccactttggaacacatcaatgaactcatcatcacatgccctggagaaagtcacgaattcgatgttgcaattgatttctttgaacctcatccaaagttaaagatcttaaaagtaggtaattttactagccacacattttgtccaagatggttcatgtcgttgcatcttttgcgagagattgaattcttcggttgccatggtttaaggacattacctgctgctttaggagaactaccatacctggaatcactccatttcaaaaatttcaactccacaaaaattggtcctgaattcttaggaataatgatagaccaagctaaagatcatgaacaagtgtcatttagtactactctgtacccaaagcttcaagagctttgcttcataagtgcagaaaattgggaagagtgggaaacagaagtaccttgcagtgtgaaacttatgccgtgtcttcgagccttggcattttatgattgctgtagtcttcgagtgctacctggcttccttcgaacagttccgttgcaatttatatacatatatgtttgtcatactcttaaggagcattgcagaacgagggaagagaatgaatggcccaagatttctcatgccaaaaacattcttgtcaacaacgtccatgtgcagaaggatggctgttacgtctatgatacaatttgaacaacagcgttggtttcatggagccatgaacgtacaggtattatcatactaaattgaattatattatatttaatttccattttcttaaataatttaaagcatgcctatt

SEQ ID NO: 23396 - DNA, 5045 bp, Cannabis sativa
aggagccaggacttcaatactagggggccaaccataaaagtttctggaatatttatattacaccccttaaaaaattgttttggtacacctcttatttgtttcatccaacaaaaatttttggtttaattttttttataagcgcttacgggttcaaaagatatctaaatattttacaatgccgaaaataaagttttaaccgttgcttaccacatgtacaagaaaaaacagagaggcatcaacaaaataattgaattttattttaagcactgtaaattattgatgcgatatttagcacacgcaagtgtacgtatcgttataagtagtaaactcaccaagagtgaggtcgatcccacagggagggtagttaagtacgttaaaattaaacttttacttctatttgattgatgattgtgcgaactttgtggttgttatttcctgttaagagaatatcatcgacatagacaatgaggtaaagttcagcacctgcattgtgataaaaaaagagtgatggatcagatacagagttacaaaatccaagagaaaacaacacttgtttgagacggtcaaaccatgcccgaggtgcctgccgaaagccatacaaggccttttgaagtttacagacataattagggtgtgtcttgctcacacagccaaatggttgttccatgtagacatcttcagtaaggacaccattaaggaaggcattatcaatgtccacttgttgtatatcccaattgttggtggcagcaagagtaagaatgacacgaattgttgaacttttgaccaccgggctaaaggtttcgaagaaatcaacaccaggttgttgttggaagtctttagcaacaaggggcgccttaaattgttgaaccgttccatctcgattgagtttgacatgaaaaagccaacggttgtcaacaacactcataccaggttggcgcagtacgagaatccatgtgttgtttttctttaaagcaaaatactcattatccatggcagacttccagcgaggattggctatggcagtccttgcacaatcaagttcaaactcggttatgagagccaaaggagatggtgagaaggcagtgaacacccgaggcttacgaataccagccttagctcttgtaatcatagggcgggagggctggtttgggtgagggggatcggtgatgggtgagtttgatggctgaagtgtttgtttggattgagtaatgggtgatagaggaagatgtgtctgtttggactgagcgataggtgatagaggaaggtgcacatggaggggtataggtgtaggagtgactgaattttgaaggggaatttcttggtgggctgggagtagtgtattgtggagtagtggatggattcaaggactggttttcctgttgggcagcagaggaaatgtcattatcacttgtcacaatgccattatcacgatccgaagtcacagtggaaagatagggtagccattgagggtagaaactaggatgcaagggtggatcggtgtgtgcactaggataggtgaaaccactagcaaatgggaaatcagtttcatcaaatgaaacgctactcgcaatgtagactcgaccggagttgtgaaggcacaaatagcctttgtgacttggactataacctatgaacacacacttagcggatctaaattgaagtttattagtgttgtaaggtctaagatatggatagcaagcgcatccaaaaacttttaagagcttgtagttgggtgtgagattaaagagtttttggatggggcacttgtatttgagaacgggtgtagcaaggtgattgattaggaaggttgcagtttgaaatgcttcccaccaaaatctttgaggcatgctagagtgagctagaagtgtgaggcccgtttcgactatatgtcaatgttttctttcggctttaccgttttgttggtgggtatgaggacatgggtgcctaaacttgacacctatggattggaggtaaggttcaaatttgcggtactcaccccccaatctgtttgaactgttttaatagtggtattaagttgcttttccacttgagtttggaagtttttgaatgtgggaagggcctcatctttggttttgagaggatagatccaggtgtagtgactgtagtcgtctacaaatggatataatatcgatatccatgtctagaaacagttggggatggaccccaaatatcagagtggattaattcgagtggctattttgattcttttagagaagttggataaggtttgtggtgtgctttgccaagttgacagctttgacaaaaatgtaaatgagaaggtaaagacttcttttcattgattagaacatgtttgagtacattagaggaaggatggcctaacctatgatgccacaaacttgattcactagcggaaataaaaaaaacaagacttagtagacctaggactaggacatttgttaggtgactttaggacaggttgttgagtggacttgtgactttcagatcgtggtactagtgttgtgagttgataaagaccgttgctaagcttcccttgaagaataccttctcgaatccatgtccttcaaaacacacgagttagcatcaaatttggcataagcattattgtctctagtaagttgagagacactcaagagatttttagcaatgttaggtacacataagatgttgttcaatttgacagccttgctattggaattaattacagagttaccaatgtgagatatggcgagggattgtccattacctactgtgatgcgagtcttaccattgtattcagctggtgtttgtatgttgttggtatgtcagtgatgtggtttgtgactccactatccacataccaatttgcatcatcggttcgagtgtgctggctggagttagctacaattgcttgctaattattgccctgtgactgagtgttgatgttgtaagattggttctgattgctgttgttggctggtgggatgaaggaaacatcgaatcgatagtagcatttgctagcagggtggcctggtttgctacaaagttggaagatgacacgcccctgattaccacgccccctgccacggccacgaccacgaaacccagtggatctgccagagttaggagagggctgatttctccttccacaggcagcaaagttggctgaaggagctgcaatatctggtgttgttatggagttgagttggtcgatgcgcatctcttggctttataagagaaaatgaacttcagaaagggtgagttgattagccctggaggtgagattgatgaccacggagtcatattcggagccaagtcctcccagtatgtaaaggatgagatcatcatcgctgaaggtttgtcctgcagagttaagaccatctgcaatagacttcattttgagtatataatcatggatagtcatggacccttttttgagggactgcaattgaaacctgagttgaaggattctggcacgagattgagtggtaaacaggttttccagtaatgaccatagttcatatgaaacacgacagtgaaggacatgaccaagcatggcctcagagatggaatttaaaagccagcttaaaatagcttggtctgtgtgaacccagaccgtaaattgagggtttacctgttgtagtggttcttgatttacctcgttgggtggagcttcgatgtactggggtggaatgggccttgtaccaaagagaaacccatccaaatcgtgagcacgcactgctggaatgacctgggagcaccaatatgggtagttgtctctgtccaggcagattgtgataggagcgagggctgcaacagaggcgcagacagtggctgagcagctggtgcaggggctggagctggaggaggagcttcaacagcttgagatcttgcgttgttgactgaggagtcgcctggggatgccatacccgctctaataccaagctaaaaagaaggatcgaatgaaaaatattaagaagaaatagaggagaggcagagagacaatcgagagagtgtaataatccttttttggtatatttttctcagtgaatatacagtgtaataagtgtacatatttatagtacaaagagaaggaatatttctgtaacaataatatattcccttgaacgctgattggttccaatagcaatagaatcccaagattttagggaattctaggataatactgacagctcacaattgtagaaatatctagaatgacagcacaccaaagagggttgtgattaggtgtggtgaattccattcacatattttaacaaatcctcattttgacttcttgatagtataaactacaactgatgctaggctgagttttttgcactagaaagcttcattcttgcacttccaaaggttatacacagcaaaagctatagcaaaaatatgctgctgaaattttaaaactttgactcttttaattggtttcagaaattgggataaggaggtggctgtatagtcttccaccccagccaatctttaatggcttcaataactctcttgctgtaaaagtagccaaagaaaagatggaaaatattctcatcttcttgatcacaaagaaaacatctatgatccgtaatgatattgaacttcatcaacaacctatctttcatttgtaagtgatttaggacagtgagctatataagaaatcgatgcttggggattagtgcattttacttttatgattgtgtaccattgtagctatttaaaatcacctataaactttaaaatttccaaatgataatgccaaaaataaaatttaaatatttgattttacttataactttatttttttatatatgcaaataattatattatacgtttatctgtaaatacgcatatataatttaactacactacatatattacacatttatatgtaaataaggtatatataatttagctacactatatatattgcacatttcataaatgttagactatattataatatggacaataaagcatatataaacgatatgtaatgcggaataaactgtaaacatatcgaaactatatatgcaatgaaaggatcgaaatacctccagcca

SEQ ID NO: 23397 - DNA, 3448 bp, Cannabis sativa
tattctttacaaaatacttaaaatggaatccattgatttgaaggaatctaattttttttcatcttctttatcggaaaaaagtagttaaacaataaataaataatctcctattattttgagataaattattaattaatttcttaattatattcagttaaacaagacaatttctattaaatattcttatacataaaaaaaatcgtacaaatgaaactataatgtgtagtttttttaataatttttgaggcataaataaatttattaactctcattataaaatacataattttaaattttagttgtaataatattacttaaattatatttttggaacctccgtcggttaaatatcgtcattatccacgtattatcttgcattgaaatgaaattgtgtgtcaacttatttcgatcgaaatggaatatttattccactgaaatagtaaaaatcaatcatgtattttaaaatgtaactaattaaataaaagaataatataaaattcgattctatttcattccattaccccaaccaaacgtatctttaaggtggtggttcggagggatgaaaacataagaatagaaatgggaatgagaatataggaatagaaatggaatagaattgaataaaatttaaaatacataaaaaataattaaatttttttctctttatgcatttgaatggtctttctttctaaatagaatagtcattctactaaaatagtagaaatgtcattccattagaataaacaaaacaaatgattagaatgaagattatttcatttctattccattccacttcattaactctaaccaaacgccacagcgaatattcttgagctggaatatttgagctttcataataacatttactttatatacaggtcagctctaggcacatggcgggctagactagacccgtatttatagcccacatattttggggttcaaaataaaaattagaaggtcttattaaatttttatttaagtaaatattaagtatattataaataataaatatttttaacttaattaattgaggtgtataacacattacacatagagtgagttcgagatattatgatcataatattgtcaaaacaaaacaacatttttttatgtagatcaacataaataacaatatttgtgtaaggaaataaaaaccttacaattaaggattggtatgtttcaggttgtttaaggatagattatgttttattaattggtcagcttgccttaattatatttttagttttgaaatagactacttaatattttatttaatgttttatattaattagttagattcagtttgcataatcaagacttaatttttttcaaatatgatcaatttcatttgttattaacattgattatggcaatttggaacgcaaggaataataaagtatggcagaacaagacatgggggttgagagcattgtggtttcacaatgaactatcttaattatcaatggtttattgctcaaaaatcaagcaatgatttgttgttcactggttacatagcaggggaggttgagcaatggattgctctaggtattaatagcattaaagttaatgtcgatgcggcggtgttttgcgaaacctctaactatggagttggctttgtggctagagactcccgtgatgtctttgtggaaggcagtacaaagctgttccaaggttcgatatctcctgaggtggccaaagctgttggggtccgtgaggcgttgagctggatcaaagaccatctgtggcctcatgtgacattggaaacagactgctttttagtggttcaagccatctgtagttctatggtcatgatttctatgtttggcaaagtgattaatgattataaggccttacattatgtgctttgcgtaatgtttcttttcactttgtaaagcgatcaacaaatatagtggctcactctttcgctagagcctccatatctcaccctaatcgctttttcaaattacacaatattcttgttgaattgttaccaagcttagtagttaatcgtctaataaaataatgaccttcatttaaaaaaacattgattatggagtgattttttttttacattttggaatatattttacatcattatagtgtatagtattatctaataatatgtgttactattgtatatatttacaataattgtacagaaatgaataaaaaaaggacccttttgtatttttgacaaagacccttctttttagcccaagttttttctgttgaaatatatcaaggcccaagtaacacatttttgtgaaattctttcaaatcggcccataaaatatattatgattaagatcataaacaaaggagggcaaatttattattttttaattatatttaaaaaaaaaaaaacaagggtaatttttatagcttttatatatttacactttgcaaaatatgggattataatattttctccttttttttgacaaaaaataaaataaaatttatgagcaaaaactactaagtatcaaaatataattaatagtaaaactataacttaactcaaatttcgtacaacttaacaattttaattaaaaaaatcgatagcttaagaatttaaataataaaaaaaatggtcataaaacaatccattaaaaaaaaaaagggggcttgaatgagccattatgattcataagagttgaaatgggactaaaaaaaggttttatgtagtattaattaattatagggccaatgtgaggaccactttttggttttaaattaatgaacatcaagttagtgaggagtgagatggatttttaattaggattattatttatataaggatagggattaatagtacaaaaaactcacatgcttcatatctcaagtcacatccaacctaaaaaaatattgtggctaggaaaactctaaattgaacccatacatagatttttaatctatattttctgtgtatatgaaaacaaataaacaataacaagacaattagggccaagtacttttatgattctcccaaattttggacatagtgtcacaagggaaaaaactatgaactttccattccaaaatatataatttacaatattgtatgattttttttgaaataaaacataatatttatttatttatttcaatattaatcaattatatatatacatgaaaaaaaaatcaagaaaaataatattttgtaagctaaaatgccattttgattcatgcgtttttgtcaaatttttgctaagttatatttgattcgtatttataaaaaaataatcatatatagtactataaattttaattaatcaacaactttaattaagtctcgatcatttaaaaatgatattaacactttttaaatatacttgtcaatttgaagaattgggattttgatctgtcgccgtctgattccttgtgcttcctagccttccatggctcacttgccttttcttgattgggtgttggtcatgtttggagg

SEQ ID NO: 23398 - DNA, 4895 bp, Cannabis sativa
cactccttttatagccgaaaaaagttgaaaaagataaaaagctgaaaaaaatcactctacttgaaaattgaaggggcgagtcgtgacataggattcccatgttgcggccgtgtttgcaaatttcacgtctccaagttgtttagacatgggcctaggcatgaccccctttttatgggcagtgagcattctatgaatttatgcctaggtataaggatccaatgcctaggcacgcccatgccttggtccaatacgaccttctctgccaatttttaagcctttcatgccctggcatgggtttttcatgttgaggcgctcctctaaattttataattccttcgcctcaaaagctctaattgtaccataacttttggatattttcttgaactaatttccaggtgcacttgccccaagaattgatttatttgactattttttttttttttcatatttcttcaatattttctatttttcttctatttcaaacatgcaaaataaaagataccgaaaagcgtaaaattactccaaacaagagtaaaacataactaaaaacacactaaaattaacctaaaattagtactaataaaaacctaacaaattcccctaaacaaacatttactcgtcctcgattaaaacactaacacgaaaaacacacaatttgaacaattcaatccacagaacatgagtaattttcaagtagactcaataacatgattatgaaaaatttcaactatgcataataattcagaatttcagttcaattacacccttgacacactttaatattttttctcattcagctcatgaaaccatagaacgcatttaactaacaattgaaacaattaatttatacatgccaattacatccatcaatctactaacccaaaatattcgatatgctttaatttccatatatacttactattctccgctaatataaatcaatgcacaatcaattcgaatcaaaaggtctttctaggcttgtaatgttaggcttaggtacgggtagttgaaatactcatttaggcttgcctataccataagcttctccaaccatgtcatccaatatttttttcacaaacaatcctaatacctccttttttctaattccattccatgagagaatttttttttctttttcgacaacattgcaacactttatttatttatttatttttttttttcgaatttgacacttactgtcagatttttcttttctttttcttcttgttgccaatcaacatttttatatattctctcaattttcacacttatttccacacacatatcacaaacttttcatccaaattcctccaaactaaagatccacttatggtatacttaaggtcaaattttggatattacgggtttatcttgtttatgctcaatatgtatagaaataaagaaatcaagttaaggatcaaaaaggataactaggataaaattttagggatgacttgaaaggaacaatcgattcaaagaatgtctaaatcactttcctagtcatgcataatttattatttcgcctcaaatagcaagcaagcaagttctagaattttttcaaacaacttttcacatatcacaattagcatacataaaccaattcaattgctagaaaattacctaatatgatttcatgttcttttaaagcacaaaatcgaacttagtcaagaatgtaatattaccaagcacataaattttttgtaaaataaatgaaatttccaaaccagctatctacctacaactaaaaagaaacaactaaaaattaaggactaaaattttctaaaacaaacaaaaaactaaaaattttaagttcaccccctagacttagttgacacattgtccccaatgtgagattaaagagaataagaagggaacttatctgagtgtcatatcagtatggcagcggcgacagtggtggtagttggtatggataccatggcagtggtggagaaaagtgatctggagcatcgaggttcatatatagtccacatggagaaagcgaaatataactcctggacttgcctatgagcaaaatcatgctgctgttgaagataagagttataatagccagtttgggcttggttagactagattatttactgattttgcctgaagatataatccaatctatcataagtgccccgagtcctagtgtccaaaggtggctcaatctggagaagaggtagaaccatctcacttaggctcgcttcttcgtgttcctcttccttatcaccatctccatcatgtggcgcatcatctttttcttgttttcttgtatcttctagtggtgtcaaggatgcttgaagaaattcataaaaataccttctggagatgggttgcattggtgctttgacaatgtctccttctataattggaactccctgacttaagcataaagctataatcagagcaccatgggttgtgcctataatggtgtttatttgagaaacatagttagtatttttagaattacccatcctatatcgaaggtcagttttttcatgatagcagataccaccacaaaatgatcataatccaaagttaaaatatgtgatgtcggcataattctggcatttacaaataggcccacgctcttgccactggattgagtttccaccagtatagagacttctgattttgattaccctcaatgtgaaattgggtaccctcttgccccaaaactgttgcaatggctgcatctgtaagtgtgtctctccacagtgccagtattctctcatccatccattcccctactatgctaaggttaaagaaagctgttgataatattcaatctaatgggcacttgtactcctctaacatacacttcgtctaaaattgcttttgtagggataattggcaaagaattcatagagaatattatagttctcctcctccacatactctccggcacataatttttgccattgtctcctcaatctcacccctaatattttcatagccccggtccttggaaaaggttcatcctgaaattcaaagcccctctcccaaagtacacccctctttttgagtttttgatatctctttgtcgctttctcattcataaatatattaatgggttggggttgtttttcttagagattaggatctgttgatgacgatccttatacattgcgttgggctcgggtcccagttctcttaggcctagacgacataccaatttactagccaataacacaaactttcggtgtcaaaaaaaaattggggagcacctccaatgtattttgtacttcccctaaacttgatttaatcactaatttatgttaattaatcaccaatactatcaaacacaactatccaatattccgcaacaatatttatctctaatatcacacaatccacaatcaatcttcctcaattcaccaaaatatagtgagaaagaacacttacttgtagaataaaagctttgtaaaccttgaagtagtcctcctccaccaagtattcccaaaaattaagtgatgaacacaatggattaggtatttttaggttttgtgattttttgaaattttttagatgatttgggtgaatgtgggtgataaattaataaattgatgagtgagttttatttatgggtgattagaattgacattggatgaagaaatttgggttgaaaaggttgagaatgatgaaatttttggtttgagaggggtaggcccgtgtagaagaagatgaggaatgagaagtttttgaaaaaaattggaatggcatgattcaatacctctttgcctatttttagggggtgtatgccgtggcttggtaatcatatgtcgcggcccgtgtaaaaaaaatttcccctttatttatgcgattcaacataggtgtcgcagcataaggtttccatatcgcgattcatgttggttttttctctgtgatatttttttaacaatttttttttctttctaaagctacaggtgccgcggcatagagattctatgcctaggcccgtgtgtaatcgacttctcctcttgcttactgcctctttttccactcgcattcctaggcattgaattttaatgcctgggcactactattttttttttttttaaaaaaaatcaactagtttttacgattttcatggctctacatattttttttctaaaacaaattctaaaatcaaaattaaaatttactaaaaactaaaaactaacgaaaataaaaattgtaattgtctctaaaaaattgcaatagaaattaaaaataaaatttttttgggatgccacccaaaggcgctatcgttcacatcatttagttggactcagtttctctcatcaaagaggcaccaagaggatgacagatttggcttgatcaatctgacctcccaagtaaagctttagtctttgaccatagaccttgaaggtctcatgtttttctcctttgagttccaccgctctatatgggaatacttgaaccactctgaatggtccagaccatcatgatttcaattttctaggaaaaagcttcaaccttgaattaaagattagagcttgctgtctgggttgaaactcttttctgaccaagtttctgtcatgccacttcctggtcctttctttgtagatctttgtgttttcataagccttgtttcaaaatttttccaattcatttaactgcaataatcacttttctcttactaatgccaaatctatgtttaaggccttcattgtccacaatggtttatgctctaactctactcgaagatgacagtgttcggttttgtgccctaaataaaacccctttcaatataatcatatttacgaattaataaaggtcagaaattgcttttatattgcttggctcacatgatttatttcatgattataattaatgtataaattctattaagtacagaacatatataaatatatatatttattcatgat

SEQ ID NO: 23399 - DNA, 4373 bp, Cannabis sativa
tcttaattttatgagcatattcaacaacacctcaaaaagaattgatgccactctgaattctttcctaatacgaaacaaaatatgctgaagaaagcaaacaaagcaaactattcaataaaataacatctcccaatcaaacccacataattaaacttttatcttttcttttaaaagtagtaaatgtctttgttttcctaattgagcaccagctatggtatgggatcctgttcttaggtagacttaaaaaccaaaacaacaaaaagatgaaacattttgaatcttttccaacgacttagatatcaaagccaaacttgaacaagtgccctacaaatccatatagactattgattgaaagacatctaagatttttgacaagaacccattagcattttttttctttgttcctttatcattctacattttttcttggtttcactttccataattccacacatttattctcttcaaataataaaaggttggaaatgattgtaggcaacaaaataaataaataaagaattgaggcatccaatcatacattggaatatagtgcttcttgtcaaaaagggtcaagaaggcacaacaatggaggctcccaccaaataggcctagttaaccccacaacatttaagtataacctatcaactaattgcttagtgatattagttgttttgggggattaaatttttctacaaaagtgaagttcttattttatttgatttgattactaaatagctcatacgtatttatttgacaaacttaattctttgcttttgttgataccccatcaaatatgtgcttcacacaactaacattccatatatatggactagcaattaagcataatagtgaggtgatttgacaacacaaataatttactaatcaaattttgaatgaaaattattttatttcccttttttaaagaaactaattaaaattgtagtagataatataatttgagggcccttaggaatatgattgaaatcgtcttaaaactaaatgataagaagtagagtttatatctagttttgtgttcgtcatatatatttcatgtgagaattttccctcacatttaggtctcaaattgtcgacattgagaacaatacaacaagactgaacgtaaattgtttaattgaatcccacttcaaatttatcagagtatatttacaatacaaagttggttgggaatttacagatatatgcacaatatttgaaataggtcattaaatcaaacatgataaatcaacatacgtttgtctaaataccccaaatgcttgccttatcttttattagctagagttagtttcacattactaatgtgtggaagtaaattgttatttataaaataaataggctactacttttgttgacaattagttttgagatggaacctcattcagcttatcctaaattttaacatggtatctgagccgcttgtgatccgttgtgagcccaaagtgctgctggtctaaaaagacgacccaaactaaaaacttccaatgtctcctctttaatctctatttgggatattttgaccaatgtgtgtcagtttccaagtgttggggatctttgacctgttcaaaaatctaaaaaaattttgacgtgtgcacccacaaatttccgaatatatatttagcctggaggaattttttcaaatgtcaagttcggtcctctgtggtttcttaaaggttgttcgttatatctacaatttctaggcccaaacattagtcccacattgctaatgtgtggaaataaattacaatatataagattaatagagtactcctcctatgaaaatttagttttgagatgaaaccccatgcaccttaactactttcattctatgttctaacatgttttgcatgacactttttatttctccaaactcacctctaattaattactttttcacaatactctttatttatatagcatacacttaaccaagaatttatggttatttgagattataaaagtaacatagaaaagactattgaagtcaccaaccttgtaaacgataaatgcgtaatgaaaaatattgtacagtcatgtttcacttacattgacattaaaaaaaaaatagtaaataaaatgaaaagtaaactacatatagtgacaatttgtcagtcagaataatatttttttgtgactaaatgtgactacagcaaaaagttatttgtgactaaaatatattattttgatacaaattgtcactaaattagttttaatcacaacaagcagtgtgactaaaaccacatttaatcacaataaattgtaatttttataactaatatatttagcaaaacacctattatgaatgataatttataataagtgttaaccctaaaaattaatacggctaactctctaagctagttgactaataatcaagggactaaaaaaaagaattcgacaagcttactcactcggcatgcatttattaaagacacaatcaatacttatggttctcgggatacgtccgagagactcaaggaccaatcccgtggtgattgacaaacaaaatagcaaaaagcgaggatgtgaacaagtaaagttataaatgggtaccaagttgtggatgcatttgtgtgtgtgtgcattgtgtgtggtgtgcgtgagtggaggctcgcatgcgagcccatgagggggactcacatgaaagccatgaggagtgtgtgaatggggactcttatttgagcccatgtgagagtctctcatgggagtcctgtgtaataccctaagattaaggaatcggattagcaaaccctaactagttaaatgtgtattaatgtagaattataatattatataatttaatatatttgaatcatactgataaataacatgttaagaccacgttggtgagctaggggcattttcataattttaaccttagaatggtaaaactgtaattttaatattatagcatgcttatggaatatatttttctatagtataatttttttttccttctgcagatgttttctgacaagtcggcatggtgttgtcacaaccggatattttgggccgaaccgagttcggggctcgaaatacatttttggaattttattttggcattttataaataattgaataatctaaagtttattatagtttggtgtgtgacaaaatgacaatttttcccttgttgtatgcatatgtggtgtattggtcctatgggcatttcagtcatttgactttattttaaacaaaaggaattttggtaaaatagaaaactaatttttctggtttcttcaacccttagccacccccctttttctccctttctcatctcttagaaattttcttgattttaagagttgtgcttgaagttggaggtgaatttgtgtacgattcttggtgttaggagcttgagaatttgtggtaagcctctaagtttccttttgctgggtttcatttctgttatttgaatttgaatagcttgtgttgttgttgtttgtgtttttgaatgtatgtatgtgaggtatgtttaatttgaggtgttttacctaagttttattattagttgggaattctagttaatgttatggttattgggaaactttgattgaatttagagtgtgtgatctcaagtttaattttgatttttctgaggtggaagtttgaattgaactttttgagatggtgtttgaatatgtgaggttatggttttttgattttaagttcaagatttttgatggtggtaacacttgttgagcttgatttggaattgcatatttggatgttattcaaagcttgaattgtgtttttaataccctattggaatgactataatttgtggatattgaatttgggtttcggtatgtttttagttgagcttggtgcatgtttgggctggaattcgtgttgctaaattggtaattttctgggtttggaaccccggcgccgcggccccttctacgagcatcgtggcccgcccacttgaatctgggttgatcaacccaggtgccgcagcatgcttgggaagtgccgcggcccgccttggggttcttgggcaattttcaatgttaattttgattgttcataacttttgaatccggagtccatttggggtgttccatatatcgttggaaagctcgttctaagctctatatgtttatttgtatttgaatgccaactatattattatgtggaaatggatttagggattaacattatttgtgaattcctagaattgtgactagaattaccagcacttgttcattagcacctgggatttggaatctccatgtacttgggacatcaggtaagatagtagttagcacgtagatttaagtgcggtggtgctcttgtttattattataattgtgattaattgagaaccgagattaggattattaccctaaagtgag

SEQ ID NO: 23400 - DNA, 3636 bp, Cannabis sativa
ttgcaaaattgcaaaaaaggacttgggggtaaatgttgcctagaatttctcccaaaatacgtggcagttcaggagcgagtcatgtgggagtggggcccacactatgggatgcaccatcttaatcactcccgtagcttaatggtacaaaggaataatgacagattggtcatctctgggaggggctgactggacaacgggtatttcttgtctctttcttttcgcgagtgaatttgaccaaagaaggatacgggaggactggcggagtgtaacacactgctcgaggctaaaattattgtatacacatttaaggcagtatgggaaagagtatacgataccttacgctgaacatacgtgtttaagggtttaaactcataattctttaatttcacgagaccacatatatcaattgacgattgcataaatgaactatcaaattaatcataaataataaataagtcaagtctcaacaaacacctatagacagcctaaacacatcatgtaaagtaggcaattatgccataaaattaaatttagaaaattgtgcaaagcatgtttatacaaacacaacaatggtggcctttttactaccattacgtgtctatcaataccccaattatgtatagaaatcgaaaaaaaattatgcaataaatactctcattaatacagtaactcgtggactaaaacttgttaatgcctcaaccacgtaaaaattctcttctttactactcattaatcacttcaaacaactctaattaacagttaccaaaaatctcgatcaacagtaattatcttataaattgtaccaaaaaaaaagggaaaaggtaaaacataaaaaatgagttgatctatttttttttttaaaaaaaaaaaagaccaaactgagtacaatattaggcctacagaccatgtcaaacctattattttacagcactattggtaaatggtaagtatataaatatatatatttatatatgtacaagtgctaaaaaaatgtgtgggtaaatggaagaggcattgacgaagaataaagattgaaataatgagtaagttttgattatggattaagcacgtgcgtaaatgtgtccactgagaaaataattttttaactaatgccatgttgaattatatatagttagtcgcaacgtaaaagactcggtccttttttactgttttatatattaataaaatgttcctcattttgtattcaaagatgagaaacttcaatatcatattagcctttacattattgaataaaaatcattgtttttggaatctaacaataaattattaagtatttatattttttttttattattgttttacatattaaaataagagtttttagcagtttaatcttttcctatcgttttatctgtacttaatttccaagcttaaattttgacagtaaaattttttaaattactgaactgttagcaaatttaaagtgttattcgattaactgtcaacataaactgcatatgtgtacactcttgtacatttgacacgttaatactgatacacttaatattattatttcaaaattcattttaaatttataaaaaaaaatatttaaaaaataaaaaatattataaattttgaaataatattttataatttttaaataataatataagatgtaacaatataaacgtgttacgtgtacaatacataagaaattcatcttggtggttaattataaaaagtagatgtcaccttaaatttggtaagagtttaatagtttggggtttcaccgctaaaatctgaacttaaacggttaattgcaagcgaaatgatagttgagagggtttagccacaaaaaactcttaaaataataataaaattgatgataaaattactaattttaattttttaaatcaaaatattaattagactatctttaatgagaaatggaaaaattatgttatatttgataaaaaaaacactattatacattttcatcaattttaaaaattgtgctctaatgtgtaattataaaatttaatgcaaaatttaatacttctattaaaattataaaaaaaattaatatttttaaaactgtactccaatgtacaatttttacattttccatttcaatggtcttaacatgataaagatccttaaataaatttatttacaaaccccaacttaatatggaaaacagatctaccaccacgaactaaacataaaagacaaattacaaatatatataaatataaaaatgaatacaaagtagattagaggttttgatgtaaccccattaataattaattatggtgacaaagccaaggttggtaatggtctaccattactacttgtgtttgttttgtgtggtggttttccttttgtaaacttatatacaattgttactatttatataaaaatatatatttatatataacgagtgaagtgacgacgcagtagaataatttaaattaaatgatgtcatcacttacggaatatataaatataattattttctgtgttgactaataataattactgctgcctgtgattgtgtaatttatttaaatcttaatcaaacagctttgaatttaatttcaacttattagttggtcataggcatctcgtacgaacccacccttcatagtttccaattaaatcccacaattgtaataatataattcacataaaatttagacaaataccagtaataaagtttattcatatgaaatacacttttgttatagaggaatgctactagttgacgttaattatcattttttaatattatgatttttctttattattttattataattttatggagtcttataaaaacaacataaaaatacaataatataaattaatagtctatatttttgtataaaagaaaaatcttataataagtaaaaaaaatatttcaaattctatacaataattttttttacctaattatgaaaagattccttttttttctttgtaatttttacaccactttaattttttttaccttttactctaatgtagaatattttttcaaaaatactgtattttttaaaaaaaatacgatatgagttttatattgtattaagtttttatagttgttttttagttgttcgactattattttaattgttctcttttgttgttttagagctgttttataaaaatatagtacttttgtaaacaaattttgtaaaattataaaaaatttcccaaaattcagtattttttttgtaaaaacctctttttctttttctaatttataatgggcttctaatacattgggccaatttccttttaataaaattttattagcccaataaaaatttgtaggctgttcgtacgtttgtgtaatatatacacacattcttattcgttttcaatgagtgaagagacctatgtagatgtagttaaaaaaatggggcattttataaaaatactggatttggggtaatacttttcaattttactaccatacggcagaaattacatttatactgtcttctccctttttttttttccttttatactgtaaataccaaaacaaaaatatgaggcctccgtctttcacaactacagacaaaaccaccacaacaacaccaggacaaccggaaaacaactattaattccgacaaaattgaacaaaagtagtgaaatcgacgtcaaataaat

SEQ ID NO: 23401 - DNA, 5235 bp, Cannabis sativa
attcctattcccattcccattcatattcccatattttcattcctcccaatcaaacgcctcctaagtgtgcttcaagaggctgatggtggattgggaaaagaaatgagggaatttgatgaagggggaacaagtactgtttttattagttgatggataattgtaacattgcttgttagaacgttaggggtatcaataagttgaaaaaataggataccatattagacttttgcagtatgaataaaataggagttatggctttacttgaaacaaagcttaagggcaataaagtagttgaaatgatggagaataagttcaaaagttgggattactttactagtagcaacatagaaggcagattgttgattctttggcggaggaattttactagagtgattgtattggctgagagttctcaatatgttcgctgttaaaggaagctttttatgttacttttgtctatgaagttaataccatggatgagagaaaagatttatggaaggacctattgaagattcgttttccagccaagccatggctcattccagggaattttaatgttggttattatattaatgatcgaacatgaggtaaacaaataaatttggctgatattgacgattcctcttcttggcaagatcatgctcaagtggataaataataaataatgtaaaaacaacaatttctgctaaatttaaaatgaggacatttacttatggtgatatgatttaaagtcattataatttctctaaatttaaaacaatggggtttgctctctccaccgaatatttggtataataaaagcaagcccatacaaagcaacaagaaaacatattcggggccttccgtttgttgagagtttgaatcccttctcactattagtaaatggcatatgatcgaaataaagcatggaatctacacacacaaatgtggcagaaaattgagctccaaatgccagtatattgccgcaatacatgatggatcaataactaaaacaacgatccaaattgtttcatccatagtaaaagcaataaaggatggccccaacactgctaatatttacatatatttgtgtcatatattagcacacttttaagtaccatagaaagattattatgcaactccatgtgtatggtatgagtgaaaaggggagtcaacagaagaacatacaaacaggcaatagagtctgaaatgaaagcatgcacttagattaatatttaagcagcttctgcaaatccaattctcatgttgccagagtcgaacacagtgtggtagcgacccatgaacacatcccccaggatcctgttaaattacgaggataagtaaaaagtaaaaaccattaatccatgcacttactttcaggaaatataggtatttagtgtctaagaaaatggtggtgaaaaactaatactgacatagaagaagctatgatcttgcttgaaagatagtgttgttaatcaaacaccggaaatcagaactaattacaagaattgacgggaccaaacagtacagtgaaaaatatcaagcaaatgggtaccaaaccatatttaagatgttagagatgtaccagagaggtccgcgagggggtggcacatctaaagctgtaaatccactaatgcactgagctacatctccctgagcgattttgaggacgtactgaatacagtcacccaaaataacatacattattagcatataagcatatatacacagtaccataaaacgcaacttttatgaatcattttaattttccgggaaataactagaagcgaagataagaataatcatataatacctgttcaggagcaagctcaaatttcttcccaccaatagtaaatgtaacattaggcattgaagacaaactgtcacagtcgactgctgattctcccatagggctaggcagccgttcacacagctgtgcatttacaggagtcagaccacaaccctgtagatagaaaggaaaagaaaatgtacacaggaacatgaaaagagggctatttcacctgattcacatagtttagaatttgctcctgtgtttggttctgcttaagctggttttgcatccatacaactgccaactcgcaagcagagcacattgcatcacgcacaccactggatgcctttccggcattctcatctacaacactctcaattcccatgctgaccaaaagttcattccaaaataaacattaaattaagaaattttaaaacataaaataacaatatatagcatgactcatgatatgtaaaatataaattatagctgactgaatcttacctcacatctcgagtcccatcaaaagagcataaaccaatttgagagcacactctttcgggatgatcctgtcacataacagtatagtattaatacaaaatacaatagcagaggcacaatacatcaagcatagcatgttacatattgtacctttgtcaaactctcaattatggtttctccatattgtgcaactatggccttgcattcttcacttacaacacccgaagctccaatggcatgattcagttcagtaataatactctgtaaatgaaatttaaattcacttaataaaaacagacataaatactgaagcttgtgcccgcagcagttgacaaaagagactattcattaagagttactagtgccatgaaagaaagatcatccaaaatgttatccaagctactaagaagcatacaattgcaagtcataagcaatatgtgtttattttgtatttatttattaatcttgatgaagtataagcaaagtgttaatatatactgaatgcactaagctgaatttagaacacaagattgttaaaaaaaaggtttctcctgtttgtatgtataaagaaagcaggtaaaacataattgcatgtaagaataaaaaacaatgtcactgataggtgagcattccagataagttctagaaatatacaactagacacatgggataccaaaggtagtgtactccagatacaattaaacaagtaataaacaaagagtggcgtaccgtgggaccagccaataaggaggttccagaatcagcaattgcggagcaaccaccggcacagaaccctgaagtatggacgcttaagttaaaatgggtacaaatagagaaggaaaaaaaaagaataaattaaactaacaaatgattagcaaaaataatcataataacaaacttctaatttgctcaccagttgattgaccaccaaccaaaacatcacccatatcaaactgccaatggaaaagttaaaaatcttaacagttagctaaacagtaatgctatgtattttacaagcattatcaagttgtagaaaacgaacctgccagtagcctttccgggtaacaggaacataagtgtgctcacccttgtaatgatttggatcaactccaccgaagacaatttcaccaccttcttcttcatcagcattgcggttgaaccaaaatgagaaaactggttccctaacaagaccttgattaaccatgttgtacctgcattaattctgatgttagaaatattaaaaattgattacatgcccatccaacttctgggagacaatgatctacagagtcacagccgaacacgatgttattattaacagtatggaagaaaaaatataccagacaggcacagcatttcctactgaaatctcctgaaacccaagtccaagtattccatcaaacttggctaccaaaaatgtaaggcctggttcttttgttgcctcaataaattcctagagaaaaaccaagttaactttagcaaaggaaaaacaatacctggcatatttatgcatttatagttttaaatacaaacacaaacagcttatactacctgatccttaaccacaagatcaccaactttcacattatcttcactgaagaagcctgcaatagccccagttccatactgaatagcagcaggtttacctgcaatggaagaaaccgtaatattgtctctgtcatccacaataaagttcttctactgaaatgcgtttaaaaagttacaaacagttgatgaaaggaaaatacggtataatgtccttcacaaatcaagtatggagttcaaataaaccttaaaatagtgaaagcaacataggaaaaaaggaatctcgtgcatcttaaactagataagagtgttagaagcaaaccattcttcttataggtactcgaactgcgcgacttgtacttcttgtggaaaaagcaagccacctgcagtaagatgcaagattgtaaaatactatttggagggattacttaagagtcaatcacaaattcagcccataaaggtcaaacaacaactcaaaccaaaccaaaccaaaaactcaccgataaataacacttagaagaaggaacccacaaattagaactaccagtgtcaaaaattacagtaaacttctggggtggtgaaccaataccaatctcaccataatactgggcatccatgtaattcttcagttcaataatatcaatgtcctcaggatcaccgaggttcgcatgaagacgatattttcgactagaagccttcaaagcctcggcttttttggtatcaatctgggaagcaacttggttattccgctcaagattcctcttcttaagcccaattctgatcaagccatcattggatgcagaaatcaccataggaaataataggagacataggaatagagttgcagccaccgaccttagttcagttcccatatcttaactgcaaaaacaaaagggtactttatataactggatcccaagtaccgaagcatcatataggaaaatccacatatgactaactaaagaaaataagttcacccccattttttactttttttttttttctttcagtgtaataaaaaatccactccagttgaggtcaacacagcacagcttcaaattcacttaacttagcctagcaactaaacaatctctaactacagattattgatcacaaagacaacttaaaatcacttaaaaaaattaattgtaatcaaaattgtaaagaaattttcatcaaaactcatatacacaagtcactagctatttcccctgttttcgaggcagaaagctattcaatcaactaaaaattgaataatcaactttttctcagcgacccaataacaaaaataaacaaacaaaaaaaaaccaaaagtttctatattaagacctttcgatcacccaaaataaagaaaaccaaaagtttgcctataaatcaatgagtaaatttaatcagagaaatgaaacgaattagaaaat

SEQ ID NO: 23402 - DNA, 2728 bp, Cannabis sativa
tttcccttttaaattatatatacagtaccgtttataaagaagttggatttatgtatacatcactcgccagctacattaacttatgtatttattatattaaccttttgtcatgtcaagggcaatatgtagattcttgactataaaatcacttctacatacaattttgatgtttggatttaattcatgtacattctttcttttatttttgtaagaattcatgttcaaatattcaaattttatttgtaagaattgttgttaaatttgtgttgtgtttatttattatcaaatttgtacactatataaaaattaaatcattacatagatatatagtagaccccgcatttctcttaattaattagattgttattattatataatacagtgtgtgattaattaatcatattataattaatgactcgatattgattgacataattaatcagttaatagaacttcttaaatctatcaaaaatatatatatgatttttgccactaattaattaaataaataatgtacattgacactgtcaacccttttttattctttccaactttttctgattaaaataaagactcatctgacagagagatcagtatagtgtaccatgtacaacatactacgtacgtgccacagccatatttcctaaattccttctaatgattacatattatataacaatattgtatccaattcagaagaaaaaaaaatattgtatcaaacgccagtaaacaatgtaattaatcaaaaacataattaatttttaattatttgggaactgatcaataacatcattaaaatatatataatacattaattactaaaggaattaaagcttggaaaatatgatatatatatatattggtaaacatatataaatgtgcctaaaaaacattaatatattatcatgtagttatagtagcgccttaaggccttaggattagttaacgataaatattttttaaaagttattttttaaaattatataaaattaatatttaattacaccaattacagtatgacatcgaaaaagatactagacattaataatactttttaacaattttcttttaaaatatatatttggctgcctagatcttgaagggttatatgaagagaaaagttaaaagagaaaactagctagctagatagggccggggtgctataacaaaattaagagtgggtgagagattgtgatgtatatttgtagatgtagtgtcctctatgtatgcatgattgaagaagagtctctctcaagcactaaataactctctctctctctctcccccattatgcatcggtttcatacttatcatttaaaacaaattttccatatatatacaatatatatatatagatgattcggtaattttaattaaactagagtactatacaataggaaaattatgtggttcacttctttcttgtttgaccttttagtttaatattgttaaaaggaagctttgttgtagacatatgcctttgcattgttgcttgatatggaccatttgatttggacagatatttatattattcataatatatttctcttttatattttatttataattttaagacttaaaattttaattatagaaatacatttgtaaaattttaaaattacaaaaatatatttaatttaaaaaaaattaaaatataattaaaaaataacaaaaaatcagacccacaataattataaataaactataaaataaaaaaaaataaaaaaataactccataattataattgtgataaaaaaaaatagtttctattttttactaaaaaatatatttttataaataaaaaaattcaaaaagtaaaaatataatttttttttcatactaacatatttttatttttataattattttaaattttagtgtgttatgtaattttttttatactattcataagtcatgatataataattaaggcgtgtaacaagatgattttgattcaacttgtttcatattctgtaattctattgtacatacactttataaatgggtattttcgtactcctttcatatgttttggcatctaataaatcttttgaatctaatttttttgatgatctagtaaattatttttatcttactccaacagatattgtctggaccggtaaaaataggagagctttttaattgttttttataattttatattatagttatttaaaattatttgtagatttttagaaaattttgaataattaagttatatttttttatacaaatagtaagaaagtatttcaattttgagtaatttgcggcaaaaatatctaagttttatcccgagtagcagataaatacctaagtcatatttttggcggtaaaaataccttctgtcacacttctggaacttccgtaggtacctcttcgttttcttccaaataagtgtccaggtgtcacccttttattagtccacatcataaatttttatattagtccacatcataaatttttatttttcattttaaaattcaattaaaacttatttaaaaatcattttaaaattaaaaattattttaaaattaaaataatatatttaaaatgtataaaaataaaaataaaacttattttttaaattaaaaaaattacaaaattaaaaaacacataaaactaaaatctgattaatattaaaaatcctacaaaactaaaatctcattcttctcccccttctcttctgcgattcaagagtctcaatctgaagaatatgatttgccatgt

SEQ ID NO: 23403 - DNA, 2557 bp, Cannabis sativa
  modified_base (1974)..(1990): a, c, t, g, unknown or other
atatatatatatattacattatagcatttcactgcaaatactgaaattcaataatttttgtggtgttgaaggtgttaaggtttgtaaaagtggatgagatagtgagagaggagcaataaatgcaataatttcatattaaattaaataccatacaaagtagacttattttatgtaatgttagaacttagaagttaaaagtcttgcaccactatatcttagtatcttacccattttatgtattttcatatcaatccttttctaattgactttactctttcttttctttcttttgattcttattaattgaatcccttactaaatcttcaaaagaatatgtccatttactttctaatctcaccaaaataatatatattggataaacacatttattgtataataaagatttgcttacatactaatctctaataaaattaatgactcgaattcaaaataaattatttatttgatttataaaaatctataatatatacttattttatgaatacaattaactctcaaatttttatatatatatatatatatataaatatttttgaaaatatgactttgataccatgttgagaataaatttatcatttcaaaattaattggtgaagtagaataacttatattcttatatatgactaaatactttactatttatttcatgtgaaataatatccatagatctcttccaaataataaaacttatcgtctatcttaaaagcatgcaaaaatattataagagaattagacaataaaattttaaagttttgtagttttaaaaagtattcatcttgcttttttcatcttagaatatctaaataataatgaattaactagtaacaaaactttaataaatatataaaaattctactcaaataaagtaattttaagaaaagaaaaatgtaattaaaacttatctcgtgaaattttttgaattctcgaatatataaccaagtgagttaagtaaaaacactccaacaaaaaaaatatatacatttcaaatgccacactactaaatgataatattaaattaaattaggaattttatttcaatgttgaaaaaatatttcaaactattatatttataaagaaaaaacttatttttgataacgcttgatcggaacgtgtcaattacctcaaataataattcttaagaaaccacaacttaacttaaacaaaccaccatattttaaggatgacaatttaggtcatgacatgtgagtttaacacagatgcgactcgagattttacgggtttgatacatacaacacaacaagtatatgtgggtcgtgttcatgttttataaatatttttagtgtcacacgccgtatttgtatcaatcatttaaaataaatttaagaactctacatgattttataggtttcgacacgacacaaaatttattcgagtcgtgttcgtatttgtgttttgtaaattttttgtgtcgtgagtcgtgttcgagtcaacaatttttcaataaatttaagaccttaatacgacccaaacacgacaaaccaacaaaaattatcattcctaccatatgtatcgatcaagccacactaagcacataaacatatacatagtataaaacaaatcacaacttaagaaaaacccaccaaattcatggtaggtcataattattataaaaagaaaaaaaaatgtgaatcaatcataaagagtggtgtttattgtttaggcacttattaatgttgtttgaattagaattaagaacgtctctctttactactacttttcatttttctgcactatttcttctttaatttaatgtatttgtcttttatggagaaaaaaaatgtgtgaagaaaccacacaacaaactctccaacaaaccctaaaatataaataattaattaaaaaacaataatctattttaataaattaaagagcaaaatctcccggcaacttgaacataaaaataaatagactttgtaataataataataatannnnnnnnnnnnnnnnnaataataataataatatgggagaagcaattgtaaagttcaaatcttattgaaaatatgattttttttttctttttttcaaacatttagaggatatgaattcttttagcaatatgattttttttattgatatataatattatataattttttaatcaatttatataattattgttgcactgaaaatattgaaaatagaaacaaatttaatgatagataattttggttgagtcgcgaattatgtcagtgtctttaaaattttgtggctctacccaaaatatacacgactgtctatcaaccacgatattcataagataaaacaatgtatgcatgattttgtctaccaaacagaatcgttctattacactccaaaaatattgctctaaaaaaaaattaagttttgaagagaggaatttttttatgtgtagaaaaagattttaaaacatgttaaaaataaataatttttatttaattaaattacgcacaaaagtgggtgaacataggactcaaggaataagtgtttctatctatgtgagactcactctatacttctcttattttttgcaaaa

SEQ ID NO: 23404 - DNA, 4008 bp, Cannabis sativa
aaatcattctttgaacgtaaaaatataaatattttacaaaaaattgtgtcttatataattattccatttaaattggtatcttctcctacgttttattttagtatacaagatttttatgtataaaaaaaatcgatctttgttatgtttgaatgtagcgagaaaagttgttgtctttacttgtgagaaaattataggctacaggccaaccaaatgagctaggttcgatcaaaatatagattgttcttggcttttacctaactaatccacaaaatcatatgaggtttaaatcgttttgaatatcaatcctcctcttactaactacctagtctttcttcttcttctttttttttttggcagtgcttgattttttgtcaatacatgtccatatgtgtgaagtttgtattagtgaatggtaacaagacaaattccaaaccttctttcaaccttcctcctcatgaataaatttatattattcccacatttggatattttgtccatttattcatcatcatgggtttcttatcctgttaactctttttttggtagcactaactctgtagcttaaaatgactttgtaaaccaaaagttaccaagtctaagactaaacagcatctaaatgtgaactaaaaagaagttttctttgactaaaattagacaaacagtttttatagtcagctttataattaattattttatttgtgtatgttgggtaactttttttcacttgataatagtacaaaatagcatagaggatcaaatagaagattgggaaacaagttagcttttttaccaagtttctttgactccatggcgtgggtttgtgtgtaccttgttctttctttgggtccaagggaaaagaagagcctggaaaatttcaagaatatatgccaaaatgacaacaaatatgtgtgtccttaccttttgtttcaatctcactaattacaaaatgaataaataaaacttccaaagtttttttttttcttcttttctacagcaacacattttttacaaggactagcacatatatcctttctcctttgttttataaagtttgtgttacttgtaaaaagaaaaaatatattattataattattattattagagtaatttgtgacataaatacttaagtttaactcccaatagtaaataaatacgcaagtttaatttttacagtaataatacctaagttataattatggaactattgttagtacatgactgttaagtgttaagtaaattgatatgtagtaattcctaattggtccaggtcattaaattttatttttttagaaaaattaatttaaatgtactaatgaaaaaataacatgtggatgatgacttgatatttaacggtcaggtacctacagagttccagaaatataatttatgtattattaccgccaaaaattaaacttaaatatttatttgcaaccgagagttaaacttatgtacttatgcagcaaattattcttattattattataacctactttttataaagttttacttttattataatcaacaatcatttgatggtgaattttctacaatccaacccataagcatattttgctaaaccataagcagtttagttagcatttctctttacatgagaaataataatttcaaagaaagaggatagaagacaacgaatatctaccatcaaaagaaaaataagataaacttaaagatgcattattatagatgttgagacacgtagggcatctgtttcaatatgaatgatctacaatggaagttgagaaatccaattaagggcatgaaagagagcttttgcttctattttatctgatttgaaacaacctttaataggttttgacatcatttggccctcctggttccttacaatcgctcctattcctaatacttttgttgatgtatttactgcaacatcaacattaggcttcaacccatttaagtgaggtggtttccagggagttcctctagttggaagtcttgtattggatgaagttgaataaggttcaacaacaagaaacgagtggattttagcgttatgataattgtccatgtagtttacagcatatgtagctaaagaggaaccattaactcacagataacagacattaatcatacaatttattcttaaatcaataaacaaacaaaatcatacatttcaacactaaatcacacagaatactataaaataaaataaaaaacttacattcatggcgcggtggtcgtggttcggagatcataggtcttgggttggtagtcgttagtgggttggtggttggcagtcgtgggttgttagagtcttcgtgtgtgtgagaagaagagagcgagagagacagagaatagaggaagagggagagcaggggtgaattatgagatgagtaattttgagtttaattaggctaagttttgtgtaccaattttgtccaaatgcaagatattaatttaaatttttttcatgtatttttttattgaatccccatcaaaatttaaaaatttcttttcactttagctttaaataaaaaataatccattaataatttttcgggttatactcaacagttttctttgtatatgcaaataaatatattttcaactaagcagtaatgcaattttttgttatatattttgtattttttttttttttttgaaaatatattttgtgtaatttttatctcttaaaattgatataatgcaatttcattcagaaagaaaaaaaaattgataatttagttttataaatgttacactgacatggtgaattaagaattattattatttattatttaaaaattatataaagaaaacattatgatttattcacaaattaaatttaaaaaattaaaagaagaagaaaaaaaatgtcaacactttaaaataataatgaatatagtatatggaccttagtctaagcttagcagtaagtaggttatggtccatgcacttagctttggcaattgcaattattattattattgttggatgaatttagacaatattaaaataaataatataataaagatataataagaaaatgtgcgagtattcaagttatgaacacacagacgtattggaaatataatgaacacaagaaaatatagtggtccagtcagatcatagtcagcttagtccactgttgtaagggatttttgtcttgtttatttcattagatcgctcatttatatacaaagcaagtgtcctttgattacacagagattgaattaattatcaatccgtttgtacgttgaatttaacatttaaatcaataaaaaacgtaaataaaataaatgaagaataattttggcccaatttactaaataagcaacgtatgcgacttctatagtacgagttgcatgttcagattctcgcataagctcgcaggcttaagatacacacaagactaatcgagtttgggatgtctgcgtcttgttcgagtcgagtcacttatacggacatcgatcctacagtaagttgataacttaagacatgcgagtcttcatcgggctatcgaggttgttggatcatccggaccatctcgctgagtatagaagggatctttacctcttcgcaggaagatctttatatttctcgcaacctgatcttcagtcctgcttcatgcaagctactcgaatgcaactagacactgtcaaggtcacatcatcccgctgaatctggttcaggcgaggtttgcactcaagagatctcctaataacatctcagccttcctcgaggagagtgagtccacgtatcatttttataggagcctagtctcaagtttttaggtgagatttctcactataacaattattattgttgttgttgttgttgttataagagtatatacaaatacaaaatctgtactacttcggtgggagttcatgtttgggcagatgtttgttctaaatttttatgtactcctgtaacagttgatatttaatggtaccacgttttctttcaaaaaaaaagtccactccaattgtatgccaaattatgatacaaatatgtcacattacaaaa

SEQ ID NO: 23405 - DNA, 2697 bp, Cannabis sativa
tttgattaatatttatttataattatttagttttttttaagtattatataattattaaaaaaaaaaaaaaaattagtgatgcctacagtgcccacctaaatatggtgggacactgtagacaaacccaaaattgatattacaaatatcgtgcagttgggcttgctttttgtgtaatatcacactataatagggtttttgcaggcccattggagttggccttagtgacagcaagcatgagaaccactctaattatttctggtttaaacaactaggcctaaaggtttcattaaaatcaaatccacattgttgatgaaaacctttagcaacaagcctgaccttatattgtactgtgctgccatctgcattttctttaattttgaaaacccatttgcaaccaatggagtacgtaccatgaggtaacaaaataagatcccagcttttgttttcactaaggctctattttctgaaatcatagcagcattccatttgggatcttcaagagctttcttaactgtagtaggcagagagatgctatgaacacttttggcttatgaatgccgaatttggctctagttttcataggatgttggttggtgacaaggggagaagatgtagtggatgatgaagaagagagagctggggaagatatatgagagggaagagcaacagtatgggaagaggaagactgagtttctattgaagagcttgacagagggagaaaagaattttaagaggaggatgatgaagatgactcaattggtatttcaggtgttgtagggaatggcacaataagtggggatgcagtaggtggcactgaggccgtgggggtaggtttgagagatgatatagtatgatttttatagggaaaagcattttcattaaagactacatctattgacatgtaaactctaccatatgtagataggcatttgtagcctttttgagtaaagctatatcctaaaaaggtgcatggtgtagacctataactcattttaattttgttgtaaagtctgaggttgggaaaacataggcatccaaaggtcttgagagctgaataattaggtttggaatgaaataatatttcatgtggagttagattatgcagcactcgagtagggagtctatttatgaggtaggcaacaactctatatgcctcatcccaaaattttaaaggtagacttgagtgagctaagagtgttaaactagtttttaccaagtgcttatgttttctttcaactacaccattttgctcatgggaatgtggacatgtgactctatgaattatgtcactgctctctaagagatttgtaaatgaactgaactcccctcctcagtcaaattgtaactctttaatttttaaattaagttgaagttcaatttgtgttttgaactttatgaatgtaggaagagcctcatccttagttataagtagataaatccatgtatacctagaatatgcatccataaaatttatgtaatatctataaccataaaaagagtctataggagcaggcccccatagatcagtgtacatcactggaagtggtgcagtgtaaactgtttttgaactagggtaaggaagtttgtggggtttaccaagacaacaagttgtacataggtcaaaaatagttttattgttattagagatgttacaattttccattatagacataacagtggctctagctggatgacctaacctgttatgccacaatgtaaagttgaaaataggtacattggaatagaatgaaaacattgaaaactattgttattaggacgaggagatgattgttgaaatggcatagtagcagaattgtggcttgactgagaggagacagtgggttgatcaaactgtaaaggccattttcaatattcccaaccaacaaagtcttcacattgacctaatctttgacacaacaatggttaggatggaattcaaaaaagacacgattatctttagcaaattgatttatactgattagatttttagtgattggaggaacatgaagaagattgtttaaataaaatggttgagaactaaaaggagaattaatagtggaaaagccagtgtgtttgatgtgcaaacctgatccatttcccatgtaaatctggtctaagccttggaattcttgagtattctacagattggtaacatctgaagtaaggtgatgagttgcccctgagtcagggtagtaactcgagtcattcacagtccctggagtatcaagcatagcttgcattttagccatatttactaatccaccattgaatgattgaaaatactcaagacctgtaaaagttttatcaaattgatcgaatcatttgttgactgtatgcccttgtttgtgacatagttggcactgaggttttgtggtagaagagcctcgaccacctagactaggtccacgatagccaccttaagagggtctaaatgattgagagaatggtggatacagtggtggaggaagtaatccatagctattgtgcagaagagtaggataggatccaaataagggatagctagcacgaggattaaatgacatagctctaccagaatttgatgcaaatgctagtgaatagtgagattcaagtctaggcgatgaggtttttgttgggattttatgccctaaataaaacccgttacaatacaatctgatttgttacaaatagaatattagaagtcatttatgcttatat

SEQ ID NO: 23406 - DNA, 2830 bp, Cannabis sativa
  modified_base (2467)..(2470): a, c, t, g, unknown or other
  modified_base (2795)..(2803): a, c, t, g, unknown or other
aataatttgaaattattttttaacatttagtggatgtctatcagttctcatttcagttctgctgcatatataaaagataaatggtagcatactcactccaagttcagaacgcagggaagaaatttccttatctactccaccctttgactgttttgcatccttaagtgcagcctgtggtagccataattttccatattccaaacatcttagtttcaatttaacaagaaatgacataaattcaatacatctacatcaagtttaattgactgcatgtgatactaaactaggtaaataaattacaaggaagccatcatgttcatgacaatctaagttcaaatacctctctttgacgcaatgctgcttccttcctgcaaattaatgatggtggaggtgatcacaggttcaagtagaaggaaaaggggatgcacataggttattttaaatagaaatcttcaacttacctgctcaaaagtttagcttccaaggatacgccttcccccagtgcagcaacctgacgactcgcaaacaagtagcaagattcatatgttggttctgaagcagttatatattgtggtatataaattgtttattaaaacaagatgcccaagacctgtaaaatccaatgactttagagattagaatgtaaaaaataaaaaaaacttagttacctgtttttcaagttcccgaaccctggcctctgcttcctcacatttatcttcctcagttctaagctgtacaagtgccagatatcattaagcaaaacaacaattttatcaagcaaaaagtgaataaactctctcaccttgtcaagaatattttcattttcttcttgcagcatatcaagctgcatggtcaaggggcaatttcagttagtaacatctttaaaaggaagcaaaataaaaaactcggtagaaaataagaaaaatgcagcccatgtgaaaataaaaagttgagaaagaacacatacttcatcacgaagtacagatgccccacgctgatctccagaatctttcgcgctatagggtcctgaatctgaaaaaagtctgaagttcacacctatgagtcattcactgttttatcttataccgccaatcatttcatgttaactccaatgagtgaactaagtttggtttacctatgtttactgtttttggcgggaggctccaatggtggcatagaaaccgcagtccttagagatgtttttgggggtaccatgggcgctggagctgtacgaactgattgccttccagttgaggtggatcgtacagatgtagtttcttctacaaagttccgagccaactaattaaataggagaaaattcaattagctttcgacttcaagctccatgttcttcgtataactacatggattcatatatagaaaaagaatcctatctagcttcattgatgacatcacaaatttaccaaatctgcttaatttccatttaccatatgaatgtttacacaaatgtattccagttgttctaataatgaaaaaaaaaaaacattagattctatgaatatccgatctcacatttgccaaaattaaaataagttcaattaaggatctccgcttaaaattctcttcaacaacattgaaaccgatctctccgaatttcgaccaattaactcatggctccacacattgcgagtcttgtagatatattagagctcaaatgttgcctgagttaactaaaaagaaaattctaggaagcttagtatagtaagtttaccgctggagaaggagatcgagttgtcttcgaagtcggaatcgatgatttagcaccattgttgacattcctggagagagcaagcggtggaggagcactgtaacgaaatcctaggtcaccatcgtcgtcatcgtcgtcgtcggccgtctgggaggccatgacctgagcaaggcgctgagcagcagctttggcggcgaagttctgagtgcgcttaatgttggagatccctgaggaagaggaagatcgaacatggcgattacgcgacggtgacattaccggagaggagtttccagtggtggaattggactcgctgctccattgacgagcatagacggggctatcggttcgtctttggtccatagtaggaatggagtgagtgagagagagagagagaggggggttggaaatggcctagatcggcgagcaagagcgagacatggacgctgaaacaactgcgagtgttcggagaagacgctcacctcatagacgacacttgactgtgatttgagtggtgattgtctttcctttcgatattttttgttatttctaaactacccttatatttcattaaatttttccaaaccaccctcaaatacaaataattaatatggtaaatactattttagaatttgtattttacaaaagttactgattgcacactctcttttgttaaatgacaaataaaccctttatttctaaaatggtaaaaataagaccatgaactgattttttgtcaannnnaaatttaataataatccgatcttaaagtgttttgataaaactgtttatattttctgtatctattcgtatttttaagttggttatattaaaagaaaattatcaaaaattaagctcagggtcctatttgtactattttgaaaaatacagtatttattttgtcattcaaaacagaaggtccaattaataacttttacaaaatacagattccaaaatagtatttatcctaccattttttatttatttttatttagatgaaataccatttttttctatttaattattcactaagggctcgtttggtacgccgtattaggtcgtattgtannnnnnnnnattatattgaattgtattttatgcaat

SEQ ID NO: 23407 - DNA, 1821 bp, Cannabis sativa
cttaggatcaagatcctaaagtctttggctgcaagaatcaaagttgttcagttagttagacaataattaacttaaccaactatcctatgagcgagatctccacgtcaacattagtcttagtgcatctatgaacatatacaagtttctgggatcatagaccaaatgcactcactgaagaggcttccggataggatagaactagctggagttgacaatctgaaactgccttctaggacgaataactagttgtccggaacttctttccggaggagggctggctgtcgtgaagagtgaatctgaagtggacatgatagtcattcgggaaatcccttccagaatcaactatcattgcataagactccttccgggatggacaagttaactttttgggaataacatctgggtgacaccaaactttctaggaataactttggaaacctttttatttggaggaactataacacaaaatatttataacaaaactctttataatataaaattcttacacacataatatttttttgcttgaaattacacacatgaccttaattaataaaaaaagtaagaatgagctctaatttgaggtaatcctacaatcaatcttattttcagtactttaagtgtgaaatcattatgtcagttccattggttcaagtcaaatagttgtttttctaatgtaataattaaataaaaaatagtttaaaatttaattataattgtaaagttaaagatacgttacttttttttctccttcgtcatcgtgttcaaaaaagaatatttgaaacaaatgggataaaattacatagtgaaacaatcaccgataaatatcattgattgaggaggtggagcctcttgtctctagactctccaccataaaccttgtgtttttgtttttctttggtatgaaattttcagattagcgaaaaaaaaataacaaataacagaaatacaagtattatatatgaacaatgaaatgatcatgctaaaaatatcattattaaaaatgagtggacctaaaaatgacatcatgtgaatgaaaaaaaaaatcatgtatgtggaaaataatttgaagaaaaaaaatgttttgttgttcttgtcaattgatttatgaaagacgtttaacaacattgggtctggtcgtgtgacatgacaactatgaaccagagagaaagagagagaatgtgatagagctagtggattggaggactcggtttctggcagagttgtaggagattttctcgaagggaaaaattcacatgatgttaggtttgtacaaactgaaaccctaatttttaaaatcatagattcgttttttgataagggaggaagatgggtcaatcaattctgcactgcaaaaaaaaaaaaatcaaattttatttttaaaactaactaattattcaaaaatttattgtagaaggggtggaagcctaatatttgcaaaaaaaatttaaagttttattgtaaatattataactaaatgttttgactgttaaaaaaattataatagggatttaaatagaaaaataaaattatttataaatattatttcttaaaaaaaaggttttatttaataattaaattaaaaattagatattttaagaaaatttttaattataattaaattaatttaaaataataaaaaaaattatctatcggtaacctactattagagattaaaataaatgtaactatcatggttacgtattatatagggtaaataccattttagatcctgtattttacaaaagttaccaattgaagattctattttgttaaatatgacaaaatgaatcttacatttttcaaaatgataaaaataag

SEQ ID NO: 23408 - DNA, 4933 bp, Cannabis sativa
  modified_base (265)..(276): a, c, t, g, unknown or other
  modified_base (4480)..(4482): a, c, t, g, unknown or other
  modified_base (4887)..(4894): a, c, t, g, unknown or other
ttggtcaatttggtttttaatatgaaaaagaggagtgataattacaatttcctattacaactttttagttaatttttactttcgaaatcacacgtagaaatattttttttttcatagcgttattcgttatagttacagtattatctttataaatttttaaaaaattccgaatagtttacagtattgaaaatagagttattgatatttcagtttactacgcgcgttcaaaaaatttcaaacgtatttttggcactgtaaactattnnnnnnnnnnnnaaaatttacagggatgatattgtaagcataacgaacactctcgtgaaaaaaaataaaaaaaaaatgtattccgacatgtattttcaggcgtagaggttgactaagaggttgtaacaggaaattgacggtagcactcttctatagaaaattgttgttcttcctgttttgtcagtgatgaaatttaaatacaggccaataaaactaattgcccaaaagaaagtgcccttgttagggtttctctttagctctaatatgcaaggccaatgacaccatagtgttaaagtattggtagataccatactcttaaagagagatttacattttaaaaaaaaattaatgaattataaaatagtaataatgtatagggaaattcttcaatagacactccttttaaaggctcactaatgtgtccaatatcaaacaatataattggtgacagctattaaatgtaggatttttgtggtaaggcttactgtagagaatcaaaactcagtaaaattggggtgcacctatacaacctttaaattattatttgattggcccatataattttagtgcacagtaaataatagccctaaaaataacaatctctctctctctctatttttgtctctcttcatcttcttcactccaagccgccgacgattccttctccctcagttccggcaacaccgacgactctctttccctcaaccccagagtccagcgagagattccttctccaaccctcaatccctcaaataaaagtatacattcaaagatgaaaattcaatattgaatcaggatttcaacaaagaaacaacactgctgccatactctcttttgatcccatgaatccacttataaataataatcaattactattattttattaaacttcaatattttaataaatcaatgtttctaataaatatatatattttgtaaataaataaacaaataatttttaaaatataaatgaataaatattctatgtacgacaatccactaaaatattatgtgtctcaatattataaccaattactatttaagattttaaaggtgtatagcttaaccaatattagagtgtctattgtagaactaccctaatgtatatacacataaatttgatatacatttatatgataagaaattaaaaccaattatctttatttagcatgggtctcctatgttaaaacttgtcacaagtttgcgtattaagtttgtatgtaaattatgtgtgtatatattattactaattatgaaataaggtaaaattagtgtgaatgaaggcgccttaaaacatctttaatgatacatcatttatcaaattgaggaagaatttttatattattttatttgccacactaaattatgtactaaattggtgtgcactcaattttatattattaatagtattgaattttgaatctatactaatttgaagtattttttttttgtttgcattcaaaccctaattttaatttttttaatcttacattttgtgttcaaaataaaatttatcacaaaaataagtgttagaattttatataaaacataaagcataaatgatcatgtaagaaaattcggaattaaatcaaacatatacacgatataacaaaaggattgaaatacctcccgtcattgattctttaagcttcaatcccacactaattttggatctgttcaagaaaagaaaattgattagtgtgggtaatcgagcttctaagctctctctactctatttagatagatttattgtgtttcacaaaatgagtagcgagctcggggaccgagactctatatttaaataggtgagacattccatcgaaatttctgtcacaattaattgtgtgaatattttaacaatctattaagaaattaaattggataattaacataatgatgaccatcaatcgtaatattttgtctataaatagaatattgatttgatataccaaattaatcaattctaattaggatttttatttttatttttatacttcaaagtagtttttttttatatatatataaatatttttacggaaattcacatagtaacaaacggagcaacttaaattgtaaccaaaattcacattacaacctacatagaaactactggagcaactcaaaccgtaaattttatagtatatgaaataattctccttataattaattgattatatatagtgtgaacaaaatattctaataaatagttgatttaacactaacatatatgaaaatacaaaataataaaaatactaatattaagtaaaataaaaataacataatattaaattataaaactaaattattttgatattttaaatttttaggagtagctatgacatgtatatattatttaatttgtaaacaatatacataattatattaataataaattagctactataaattatgtaaatataaataatataaaatgtaaaatatatttatttagtgtgtattactagagttgttgtactaaaaataaaaaaaactacactaaattagtgtaaaaagtataccaaaatagtataactatcggagataatttttccaaaccaaattagtatattaatatgttacactatgttaaaatgcagaaatgtatggttaaggtagtagaataagtaagtgtatggtaaggtgcattaagtttcattttaaaactaattagcaatggaaggaataataactcactcatttatctatcttatatatgataatttatttctacacgtaaacattaaataatgtgtcactaactcgaattggatatgtattttcttggctaataatcggttgtataatagttgagttaatcgagtggatagtaatcattataaacaaaagaataataagccaaatttatagttcattaaacttttgatcaaatgctttcgaacaaaatctgccgtacataacagaatgtattcatttttttttttacaaataatgacaatgcccactgtataatatatatgtatatatatatttatattttatttgtatttggctggctagtatcatttggaacaaagtgatatagaacaaaaaaagagggacaagaatttacatggtttgacaattaatttagttacgatcacaatatattcaaatggattacaatatcctcaacctcacaatctaggatcctatgtacatctccaactatctttttcacatactaaacaacaaagaggtcactcctatttttcttgcaacaaaatcattgcataaaagaaaagaaaaacactcaggtagtcaggtaccaaatttgttaatacaatgtattgtattatttaactttttatgtttcacataaaatatcaacttaagttgaattcaatttgaatattataaaccaatctctcaacaccataatgtaagtacttgcaaagtatcagttctcatgtgataattcaatgctaaaattcatgtgtattaatatgcaatgttgagtatatataacggtggattgcattgcacccagtaaaattggtcgtgaaagaagaacaagactacaaaagcacaacaactttgccattgaatcaaattcaatgatgtcctattgtcccccagtacaagtagttaggactactctaaacaaacaagtgtactataccaaataaatatacacaaacacagtgctatagacaactaagaaaaaactacaacaacgttaagactactaaaactaagaggactttaaggttacgtttggttgggagtaattaaaatataagaataggaatggaataaaatttaaaaagcataaaaaattgataaaaaaaattattatatttttttttcaattacattagaatggtctttcattcctttttaaaatgaaatagtcattttactaaaatagtagaaataccattctattataatgtcattccaatattttaaaatgcaaccaaacaaaagaatagaatgaaaattgtttcatttctattttattccatttcattacctccaaccaaacgccaccttaatttctgtattatacagaattttcttcgcacaaaaaaatggttatctttacatgggatactcgagccactgtttccatatctaaccaaacaaacacatggtggattctgaagtgtaaacaaacaattgaatatcatcactgttattattattcttgtttactagtaacatttagggctcgtttcgtacgccgtattataatgtattatattgtattgtattnnnattatttaatacaatacaatgtttgatattatgtttgatattgacttgtattaattgattgtataaaattataatatatttttaatacactcgatcccaacaccaactacgggtccgagtctgggttccgggtccgggtctaggtcgggttcgggttcaggtctgggaccgggtccgatccgagtccgagtctgggtctggtcctgttccgttccggtccgggtttgggtctgggttccgaatctgagtcgggtccgaaacttaggtccgggtcccgagtcctgggtctcaggtcatagaatggtgttgaccccaaatcttttgtaaacataataatacaagctaatatatgccatttattatgtattaaataatacaacatacattgtattaacaaatttggtnnnnnnnnttaatacaatacattactttatccaaacataatattatt

SEQ ID NO: 23409 - DNA, 3717 bp, Cannabis sativa
gctataaacaggcccgcccctgggtataagcggtctagttctgtgcctagggcccacctagaccaagggccaaaaaagaatatttcccttttgaaattatacaatttttttactgattttaaaaaataccacattttttttttctaaataaaggtccaaaataatttttttttatggcccactaaattacacgaccggccctagctataaatataaataacaaaaaatccaaacataaatttgagaactaaaatataatttcttttttattaaaatggagcaaatcaatatataattagtactctaagcaagtaactaaatagttgctttgatttgacaatggtgaaaagacacatgcttcttatatctcaaaataaccactttaatagattgccgtgtgatcacattgtattttgaaatcaaagagaaaaaaaaggagatagtgcaagtaacataattaaagaggagcgttttgtaaaacatactttataaaaaattttattaattaaataattttattagcaaaataactttgtagggtagaccatgaattacattgtacgattatcatggtcgcataatgatagagcaaattaagtgagattattttgtaaattttagtatttcaaattgttaatttgataaatttcacaacaaaacgataagaaaaaatacctttttacattcttttcttttttagcaaaaaaatgattgtaaaaaggtatttttgtaaattttggtaatccattctattgggccaaaacttcgtacaagtccaggcctgctttcacgaaactgggccgtcctgaaactctcaggaaaaccctacgccgtcttctccatgtatatagtttcttcagccgagtaaaaaccctagctgctgctccatttctatctggtaagctctttctccactttatccttcccaacttcgatcgatcgtcaccatttccacgctcacgctgggtctattatcttaatttttatgctcgtgtaggagttgattatgcctagatctgtaactatttctttttctcgactaaacctagatatgagaaattatgtgatgtttcttttctgattgaatgcgagtatttttattctcattgaatcgtagagctcaattgttttactttcaattgtttgtttgatttggataaaattatgatttttttttttttgtggtatgctttgtcgtttaacttatgcattttatttttctttaattcaggtggcatttctgtaagtgggttgtggaaaatttctaagcttcaaacatgaggtatgttaaattaatggcctttctagaaattcatacaagttattattatgataataaattgtgaaaatcagatttagggtctttattttacgttgtatgccccaattgatttagttaaggttcatttcaatatcgatatttttctggtttgaattcacaagcatgaatgatttgcaaaaaaaaaaaaaatcactgtttttccttgaacattttcctggttttacttgaatttttttgttgtcaccatttgcttaatatattttgatatgcttaaatctgtattgtaattgctatgacaacagtaagcttcagagtgaagtcctcagagaggcaattgccactataatgaacgaatcaagggagaagaatcgtaacttcactgagacaattgaacttcagattggtttgaagaactacgatcctcaaaaggacaagcgtttcagtggctccgttaagttgccccacattcctcgtcccaagatgaaggtttgcatgcttggagatgctcagcatgttgaggaggtacgtttttgtttgttaaagttactttaatattgtatgcaatctgaaacctttagttttagacttgcttttaagaaatgtttgggtcttttacattttgctattcctttgaattggtttattgttttagttgatctatatgaaaatcttcatcttaacattcaatttttattgttatatttctcaggctgtgaaaattaatttggactacatggatgttgaagggttgaagaagttgaacaagaacaaaaagctggttaaaaagcttgcaaagaaataccatgcctttttagcatcagaggctgttattaagcagattcctcgtcttttaggccccggtctcaacaaggctggtgagtattattaaccgttttctttcttaatctaagcgaggtcgagttgtgctttcttcgtttatcttttccttctgttgcaattctgtacaaagaatgaacttgtgattttcaaatgtttaagatttgggttacttatatatttgtgtgaaattaggtaaatttcccacccttgttactcaccaagaatccctggagtctaaagtcaatgagaccaaggccatggttaagttccagctgaaaaaggttctgtgtatgggtgttgctgtcggaaacctctccatggaggagaagcaggtcttccaaaacgtgcagatgagtgttaatttccttgtttcactcttgaagaagaattggcaaaacgtaagttctggtttatgattttgtgtagttgcaagctagagcattttcctttgaaataatttctggtgggagtcatttttagcttgaaaggttttgatgtttacctctttttttttcaccaaatgatatgatacaggttaggtgtttgttcctgaagaccaccatggggaagccacaacgcgtgttttaaatatttaatctatttttacatgtatggtggagttttgtagtgagatgttttatgaggttgatacttatataaagtattcagttggaattctcaaagttgcttttttacttaggtgtttcaaggtttataacatggtcatgtgttttgttaagaactttttattcttgttgttgcagaatcaatttttgtttacttattgccccctaatttttgatcacatcatataatatttattcttaatgagattgtgaaatatttctatcttgttaatggtgatagactaaaccaagtctactttattttaaatattttcaaatcatgttcatttttaggtactttaatcaatatttcatttaagaataaaccaagtctgaaatcaatttgtgtttgggagttgtattcgtatttataaatatattttgtttaagcatattaatcataacacattctggacacaactttaactcatctaagatcatagtcgttatcaaataccttgaaaacaaaacaagaataccaactctcaaatctctatcaagagataatccaaaactggaacaaaaaaccaaattaaaataaaacaacacaaacaacgacagtaatagtaataaaggttaaatctaaaacaaagtataaaaatatagccacagatggtatttaacagttaaatatggaacaggtggtggactttggcaatatgtgcctattatatatggccttcatgataccgatgataaatttgaggcaccaattaaatatcattacattattgagtacacacttatgtatattatgtatattattgagtacaaactttgcctccccaaattcctggggtctgggcttccgaaaatccaaagaaatgaaccaagctttcctcgctaagtggaggtggaatcttctgactgtgaaccagtctgccgtatccttgaggccaaataccttaaaggaaagtcctttctagattgtgttccgaaagcctcggactcctggttttggaagaatgt

SEQ ID NO: 23410 - DNA, 3264 bp, Cannabis sativa
  modified_base (549)..(553): a, c, t, g, unknown or other
aatatcaatttgtagatttatgtttttttattaaaaaaaaatatattaaaataatattaaaatatcaatttatagatttatgctttaatacaatattaaaattgaaaaaattaaggagatataagaaaaatagttttggagtgattttagaatgtaaagtcactgtttcatatttctcatttatatatattaatattataaaaagaggtgacgcctagctatactatacactattctacttgcctagtctttatagctatgttagagctatacagaaaatcttccaatctaattataatcgatcgattgaatcctaatcgattcaatagaatcagatatgcaatcatattggatcgaatcggatgtaaattttgaaaattcaatcaaatcggatcgaatcacttgttggatgagacatttgacccaatgcataactgaaccgaataaaaccactccaatggataactaaaccgaatagaactgatccagttatcatctaatagtcatccaattatatttatatacttttaaaatacatttataattttnnnnntttaatatattttatttaaaaaatttataattaattttattcttattgtgcatctacacacttgaggttaaagaaaaaaaaaacttagatctaattaattatttctcatcatcctataaatattaataaaattatcaatacgtattgaataaattttattttttagtggtattattataggatcatgataattatgttgcactaaactaatatttattatatatgttgaattattaggttttaaattatatatatattatatatatatttaatgaaatcagcttaaatgatagttaaaataaatttgatggatccaatccaatccaatagaaaaccagttgctgcatttaatggttggagtcgatccaatccaatatatcaattgaatcggatcagatcagatgactcaatttaattggatttgatcgaatgacaaaatctaatatcccataaataattagtttagattggttgggccaaatctattagatgtgatccaataaacacttctactgcaaagattttctaaaactacaggataaaaaatggctatctttgcttatgcacacaatgatttcttttatattctgtaaaaaattacatatttaataaaattgacaaaattaatgtgaattgtaatggtaatcataatcgtttaactccattatatccattacaatacaatagttattacattgaggtgatgtttagtttggtgagatgtaataataatggtaattgtaatagtaatgtaatggaataaaaatagtaatgagaattgattaaaatgtttggtttgttgttgaaataatattatcataaatgataaactgacaaaattatcctgtactttaatttttatatttatattaaataagagtattagaatcattttaactttattgtatttagtcttttgtaatgtaatcctcattacatagcttttctaatgtaatgagaatttctttgtataatgtataattacattgcaatcttattatatcatttttaaaagcaaagcaaacattataatggataatttaatctattacaatataccaaatatgccatgattattataatgataattacatatcaaaactaatgtaatcctcattacaatcaattacaagagtaaaataataatttaataaaaaaaatatagtaaacaaaagttaaaggtctatattatccctccttttgaatattttataattataaaataaaaatgatagaattattttagttcatacacattttatttcattacattctctcatactaaattaaatacaataattctgattgtaatgttcattccacctgcaattcaaatattgtaatcaatttctattactattcttattctattatatcactattaacattgtaaagtgtgaagagctcactataaatagattccttgaactcactgtaaaggggactctctggtagaaaaatattaacaaaattgtagtttttctaaatagtgaatagagtaatatttactttgagtattcatctattaagatattgaaacatcatcttaagttcttgctatttcgttgacgagttcttaccgtcaataatttggcaccatttgtgggaagcgacacaaaaaaaacaatgtcatttctttacctagaatcattgagaagatgtcaaaatgttctcattgttgccaagaggtggaggtgcgacttgatggccttcagctgattgcctcaaggcctgacacgccaacacccgcctctagggggaggtatgggtggccaggtgcctcaaaatggaggaggcacaaatagttatgaaccctcaacgggagaagggaataggcgactcgaggacaagcaagcaaacaaccagcaagatggagcgaccgcctccatcatgttggaggaaggaagaggagtgcaaaggcctaaggccccatctccaataagtgcagccactgagatcgggagaccccagaacctcacaccactagaaaagcaagtctactcggtgagttctagctctcagacttggctacacaatgaggagatgaatgagttgagaataagcaacttgcggctggaagaaatagtcgcaaacatgcaaagggtgttagaggagctcttgataggccattctgaggcacctctactcaggcaaagaggaccagaagcaggaaaaagaggagtaagtgggctggaagatgggggagtatcaaagtactcgaaaaataacacccccaaatcctccccgcaaagagctttaacccaaaaaaatttcgaaccctcatcgcgaccaaaaaagaccgagtctaaagcggtccaaggtgacttgagagaaaagctctaccagaagtccatgaccaagaagcagacgctcttggtagattcacttcaaaacgaaaaaaaacaaagccagccaccacgaacctgcgggagaagctaactaaaaggaggaaggagttagataaggagatggaggatcttcgacgggggatagcatcagctgctaggggtgttcgcggtgcgggtggtgcggtttttaaccattttctcaaacccacctgcacatgcggtttttctaattttgtaaaccgcactcgcaccgcgatactgaaaaaccgcaaaaattgcatcgcaaaaaatgatgcggtgcggtgcggtttctgcagtttatgcggtttgaactatcacaattttttttttgaaatcatcata

SEQ ID NO: 23411 - DNA, 4183 bp, Cannabis sativa
gcagattggattggattggatttggactattgtgcggattagattggatccaaaaaataaaatccgtacttagtgcggatcgggtgtactatgaataaaataatgcggattggataggatgaacacccctagccatacgtttgtagttataattttgtaatttttttttttttatagaaaatttattttttggccccctcaatttttttttttaatagtttgcccccctcataaacattttctgtctctatctctacccgtatgtaaatactgtacgtagttgtttggatgagaaatgtgagtagtttattcagtatggaggagactaattatatgtttggtagagaagaaaagtgggaggaacaaaaagtgagaaaaagagataaaattgagttgtttggtaagaaggaaaaattgagagaagagaaaagtgggaagaaaattatggtgtgagacccacccaatttttctcttccgatctcagaaaaaaagtggagagaaaagtctctaacaaataagaaaaagtaaaatgactaaaataattttataaaaagattgtgttcatacttttaagaataatgcagtaattttactaaatattaattttctttccttcttgtatatcaaataacaaagagagaaatatgctttcatttctttctttctaattttttatccctcttaaattttctttccatcttattttctttccttgctgccaaacataaaattaaaagttgggatgaagatttgttttgtgatgttttttaaaataaaaaaaaatgagagatgctaatattattttgggaatccctttaagtactaatgaggttgatgattcttggttttggactaaagaagttgatggaataaagattttgtaaaagtgtaaaataattatttgactctaaaaatgctaaaagtttgtcaaaaatagtattttatgcaaatttattacaaattatgttgaaaatataaaaaggggtatatcaatacacactttttaggatctttagggagaattataaaaacatcaacaccctgtatacaaagtacaaactactcacactcataaatcatgtttttaattagtaatcctctaataataaagataatttttttattacatattaaccaaatataaccctaatctccaaaataattttaaggctaattaacatttttgctccctgaactttccctgaacttttaacatcgttaaaaatgcccctaaattattgagattgttgaatttaaagacttttgtctaatttcatttaattttactatttcaataattgtttatgtactaaatcatactccccagactttaacatctatcaaaccatacccctcgaactttgacatgtattaaatcatgactcctgaactttcatccatgttaattttttttactaaaattggcaaaagtccttgaatccaataattgcaataatttagggaacatttttaacgagcttaaaaattcaaagaacatgatttggtacatgtcaaaatttaaggggcaaaaatcctaattagcctaattttaattgataaatatcctttattataatcaaaatattaaatataacacttatcaaagttagagtttttaatgcacataatgaggataagacctaaaaaattgagtataaattaaagaataataaaattaaaataaaaaataagtatacattgtaatttcctcttaattaatataagctcacagaaacttgaaagaatattgtcatatttggcaagcaagatgcaacatatttatatctttattgatgatgataagtagaatataacctataaatgtgactaaaacacccacaagaattctcatgttatgtataaaaatagattggaagacaatactcaaaatctaaataaaattgtcatttcaaccgcaaaaacttggttttgacaactagaagcaatgtgttcctatgtcaaaatttcgaaacaaaataaataaataaataaagaactcgtggcaaagaaaagaaagttcaatttcggttcggtttcgatgattgtacttcattgaaactcaacctaactgaaacaactagcaagatggcacacaccataatagtccaatatggcaagagtaggaagaaggtagtatacaagtgtaccaaaaatgaagatgactcatgaccacacaaaaaaattgagaagtaaagtaaccaatgatgcattggaggtgaatctctgggatccctcagcaagcacaaccaccgccaccacctctttgctcggtctctgtaacaacggtctctgggatgccctggaaatatctgcaaaaaataatgcatacaaagagaattaaatttcaggggctctacaacgggctaggtttgaaaagtacaaaactaattttcagtcttgtaatttatcataactatgcttctctttcgggttgaagagcagcgtcagaaatattaaatcacagtaacactcttaattagtactaaaggcactttcagctatacattaataatactaggtcatttgctgcagaatgtttaagcttccccgttgaacaccgcaaacaaaactatgcaccatcagcacaattgattaaagtttattaaagattctctactgtatcaattgccaaataagatcttcaagaaacagataaatatagtatggaccgcagttgagaataagctaaaacttgatattcatacaaaactatcaggttgtatcaaccacatcttaaggttgaaaaggcaaaaggaaaccaacttttaaactgtagtaacaactaagaagggaagggaagaaaggtggttgagatttgaaaaaaaaaaataaactaattatacaattcctctcaaaatttgagttacaatgcaagaatcttctcttggcacaatcaaggaaaacacatttcttttttaataaaaatgcacttcattaatcaaattgaatcagctcttaaaacagagatgtaagtaaagatacaagggttgctgtgcaaactatggcagggatcagtgggtacacaacctaatcaaatgcacaaaaaaatgatgtttcaaagatattcatgagaccatatgttaatcattctggattatacatctacataatgaaaatattttcacctattgtagatgattaatgccagagcaacacaatttgaaaagcctgcgatgctaattttgaaaataaaaataaaagtaatagcatatcaagaaaaggtacgaacaaatttatgtaagatagccaatggtccaatctgatacacatttcaagatctgatacacatctcaagttctaatattatcatgctcatgtgcagtataaaatagtgctgctattttcttacctttaatgggaataataagatgcttaaagtcaaaatagtgtgttcctatgaacaactgagtgctgctgccaatggcatcagcaaaatagataaattcatatcagaaatatgattgcttaccacttctacaatcatcatagagtgcctaataagtttttttaattcttttacatttttattactccatttgaatgtgatttaactgttaaaagaagtaaacattgcatctctgaaggtcaacttacatgtcctgttcatgctcattggctaaagcggtctttgcaatacacaagaatgcagcatcaacattgtaatcttctttagctgatgtctcaaagtaacctatgttccctttggaagcacaccagtcctttgctttcttctcagaaacctgtgtgaacagtagttagaccagcatcttaacaaagaaactaaaaaaaaatgaataatttataatcttaccactctactattaccaccatcgatatcaatcttgtttccaagcaagataaatggaaatgttgcagggtcttgaggattggcctaaaatatgataaagaaaatgtgactaggcaaaaatatcataaacaaaataaaaaaattagcatctaggcatatttgagaaataaatgtgactctgcacgtctgcattagtatatcataattgtatgaccaagctagattttgactagcgaaacccagatattaatttccacactaattcttctttcagtgaacaatttacaggaaacatgaaactcgtatttaccgggtgatgagcaaaaactattagaataagactgtgagagtatctcgtacggctcaaacagaaag

SEQ ID NO: 23412 - DNA, 4362 bp, Cannabis sativa
acatacgaagttacgaacacaatgagttgatggaccaaggtttgaaatttcttaatatgaatcataaatggtgtgggatggattaaaattgatcaactagacaagcaaacttgcaatgacacgacatgaacacagtccgatgccaagaattgctgagacttattaccacttatcgaaacatacagtaattgtgctcagacagctttcaacatatccggtttaattggaagttgttttcacaccaaagccgttctattaaaattgaaactgaatgaatatgacccatagaatgtatcaaaaatgaaaattctattcacttacaatagtaattgttgtagtattatattactgtaatttactagttaatttgatataagggtctcctctccgaagtcagttacaggtttcattacctgaaccatcaactaagatgaacttgtaactgacatcccgtaatcattcatgagcctcagagtcaggcaccaaacctctcccaagtcgtaatgtttggacaagtaaccaaacgtcagtcctatagcccagtgaaaacattatcctctccaaaataatagctcaactagattaccagagcttgtttttagcccagaagaggaggaacacaacaccaagaacaatggcaactggagcccactttcgaattaaagcctataatgaagttaaacaaagaggacttaagatggaaaaaaattacaatattggaaagaattaccaatgcatctaacacgcaaacgcaactaaactaaagtcagcataatattgatgaagcagacaaaactgacctgacgatttagatccctagccttatcagcatatatgcgcgattctgatgttaaacgactagacatttgactgacctctgcaaaattgatatttgactatcatcattcaaattgataaagaaaaattgcaccacacataggagatggaaaattatcttacggtctaacttttcaccaacgccaaggacttcctgcacatttcgagtcattatctggtggacttcatagagttcatcattcaacttcgaaatattccgctgagtacgagtgtcctggtacaatttctttgttttctgtataaatgtatctataaacacaaaagaatcttaaatcagaccaaattaattaaccacaaagtttaaaatacaaaaggattgataacacaccgaacttaatgaaggcataaggtctggcagcagtttcgatttgtgccccattaacatgctcaaattcattcttgaggtcttcaaggtattgaaaagcaagtttctttgggtaggcacggtcgcacattgtcaagtaacagacacgaccttctattatatagctaagaaactgtgtcaaggttacatacaagttagagttgactgcgatcaaaataggaatgcacgcagtaaaagttacaagtacaatccacaaagtaaattttgaaaatgaaatcatgtatctgtcataagcatagctgaaataaatctttacagataggtctgttaaatttattccccaaacattaacagttctagagttaagaagttaaatgatcaaatgtgaatgtaagaaaggccccgacaaccaacatccaaagcatgctaggatcagtagactaattaactacaacaacttcaactacatgaacccatcatatcatgtcatcagtataacactatttaagtgtctgaacacattgtcaataaaattgtcgtttgataataaataaggaacaagtaaagaaaggagaacagagacagaacacacaaggatactggaaaatgtaaggtccagtttcaactgacatccttgacggctcattttggccacttgagaggttcttaaacaaagctttgacttgctgtttgtaaaattcaacatctctaatatcacggccatcatcaagtccctctgctagtggaagaccatcagtaacacgagcaatcattgttagcttcaccatcctggatacccgaattcccagagatcaaactttaactgcaatctgtcaacagttatataagctcaaaattatatagcaagacttacagatttgagagagaaaagatataagtgaaagaagaatcaagagagaaaatctagaaaagaagaaaaatagcactgaacttttagactgaatgatctgtattttcattaacatgccagtaaaagtaacgagcatataaatgcctattaatagatggcaagtaggaactaatgaatcctcctagagcaataaagctaagaattggaaaagttagaatacttaattctttttttgaaggcgaatacttaattctaattattcgtaacttagataaattttaataaatgaaaagtactatttttaggcctggaattataaactatattccaatgtccatgaaatctcctactcgcacacattatcagataattagttgccaacttcaatcaacacgctgcctattttgatcaacctatcaattttaaaatttgaataagcatatgaaaaataaaataatggtgatttaacgctctccatctgataattttaattaaagtaacgaaacaccagtgtcacataccaaatgagataaagagttatgactaaaaccaaattcgcagcccaaatcccttaagaatggccaaaccagaatcaaactagaaaaccaaaaaaaaaaagcaaattgcttcagattacagaagttaatgagcaaacacaatgtgtcacagaacaaagcatatcacagaataaatttaagataatatggaaagtttaatagcaagcaaaataagcaaattacagaaaacaatttcagagaaagcagatcaatgagcaagcaaaataatcatatcacaaaaaacacttttcaagaaaataaaacagggagtaaataaaaaattacattaacaccacagcaactccaatgatacagaaaccaatattaaacccacaaaactaaataatagtgtataaccattgctattaggtaccctaggttgtccaacaccatgccacaccgtcatttgtattttagaaacgggtttgccatgttttagggtattacttcagcatttcactaaaaataaaagcacaatatcatcatggtataatgattaaaagcaaatcaacactaactaggagttccatgtaacacccaaagaaaacaaaaccccattatttaactaagccctaatcccataccacctaacctacttacacagtctgagatgataatcatatttaattataaaaattatatctacaactgttctcagattctagttgcgctcaaatgttagttttgtataaccatttcactcaaataaatgcacaagaaattaaactccacaattatcactatctagagccaaaaatctttgcaacctagattcaactatacgaattcgttttcctcacattaaactcattgccataacaaaatttgaaaaataacataatctaatgtttagaagaaaatcgccaaaatttcttttcctccattttctctatcccaacctctcatacttcttaaacatgtgtacacaggctcgtacaagagagagacagagagaagttaattggcttacttgtgtacggactacttgaaccattcctcctcgaggaactggagtacaaagatgtctttttcaaaaaatctttgaaaccccaaaaatgaacgaagagccaactcggaggccaaaggccacagaattaccaacatttcaaattacaaacccagaaaataaaaaatacgagaaaacaaacatcaaaaataaatttcaaaaatattcaacagccttagatttaggtattcatcgtgaaacttcagaatcgggtattttatcatcaaactaataattagatttagggtttcatcatgatacctgaatgatatgaatgctccaacacaggaacaaaaccgagtaacaggagaggaaaaggaagttgagaagcgctcaaattatagagacagatcggaaaagtgaaaaattcaaatggtatggatgaaaatcagagaatggggagaggagaaggatttaactagaaaaaactcaaatggggagagatggaagaaccggaagaagatggaggagagagatcggaaaccattgttggtgacttaattgtttgttttaatgaacatccatgtcatcggccgatgtgactagtgtcaaaaaaaagaaaaaggaaaaaaagaagaataacaatacaaaagaggttgatatgatatgtaagcatttacacattataattcacaaaagataaaaaaaatgatttaaaaaatagcaaaaaaaaataaaaacagcagagaaaaataggtaaaatatccacaaaagactatttttgaaaaaaaaaaatggagtaaaa

SEQ ID NO: 23413 - DNA, 3657 bp, Cannabis sativa
  modified_base (742)..(754): a, c, t, g, unknown or other
cggagccacctagatctgcagatctggggctttgcaaaggtttcacgctgtggaaacaaacaggtgggaggtgtgaacgctctggatgcaatgaaaaagccatgttcatactttgctaggggagagagaaagcagagcagaagaagagtagggaaaagtccgattatatttttttcactagttattggtacttagttggggagaaaatttcattactaacaaactttgataaataaaacaattgtaaatggactgtaagtggcaatcgtactagcactaatgcattagatttcattgtaagtctccaactaaacgtgacgagagtagtactagaatgtgtgactttcaaatttttttaacacgacacgagtccgggaggtacaaaaaagtatgaacttggatagggatgttcatcaaattgctcaaattgtccacaccgcaccacattaaaaaaatgcggtttgaaattttttgcggtgcgatcgcggtttgaacttttcctaaacagcatggtgcggtacggtttggttggcgattttgaattgttaatatgcgattcaaaccgcattgcaccacacattataaaagtaccaattttttatatttatttaggtccaatatgtgaatgtctagcccaaagctcactacttattgtattgttgaaacttaaaatttgttttcatatttattttcaagccttatggtatttttgagaagtgttgctcacgctttgttgtatttnnnnnnnnnnnnntatttggtgatagtccaaattgcaaaaatcacaccgcaccgcactatttttttttttttgcagtgctgtttctgcaattttttagttttgcggtgcgggtgcgatttggaaaattagaaaaactgcatgtgcggattagtttgaaaaaatagtcaaaactgcaccacttctaccgcgaacacccctaagcttgggtatacgacatgttagcacgacacgatacgaaaaaatatgaactcataacacgacacgacaaacttaaaaatcatgacatgtaagcaggaataatctattttgaaagtgcaacatgttaaaaacctcatatttgataacataagaataataatttgaatatttattagtaaatattcaaattttaatagttgtaatgaatcttttatataattttatgtgaaaatttgttgaaaaaatatataaaaataattgaagctataaaaaaatgcataactttagtaattattgttagaacttattttatcataattttaatttagtaacatgtatcatgattataaatttacaatctaataacttaaatatgaataaaactaaaactataaataaaacacataaatgttatagaaaatcttacattggttgtagcaaaatgacatgattcctccgttcattaccctaacccttgttcctttctgtcgtagagtagttttaagtactgaacctggatcttcttctcctttgactgtgttcatcacagtcttctacaaaggttcgagtattaaattgaatagtgtgggatgatactcaaaacatattcgaataatttagagaaagagatttactagtgaatttcgaaaatcaaagaaagagaaagaagagacattatattttttatattacttctcttttttttatataggcattcacttttttttttttttgaaagaaagcttatatatagttttattgcggtgagaactcgtcaactaacttgttagttagaaaatcaaactccacttcaaactcaaaactaagataaagaaaaaagtgaagtataaattcaagtgtctatctcaaagtagagagaaaatgaaaatttctattactctcaatatggtggttgcaagattaactttccaaccccctctcacatgtgaggaagaagtatttataggctctaatgacttgagatacatggtggtcccaaagggacacggtgtcacttttgagctggaagtcccaggtgcaagaggtggtcttgcgcctcgtactcttgtctggtgtcacgtggtccggagttgcaggggtagtggttgcagcgtacccttggtcaagtcctaaaaccttgtaggtgtggtgcttccactcctcgtacctcctcgctttcaaaacttgcaagaggtgtggtcatactctcctcgctaaaaccctaaaaccaatctctctctctcccaatactctttttgtttccctttgcttgtgcaacgccgacgtcagaccaggaaggagcaccgtgctccgacctcctctcataaatcaagtggaccacacccaaaaaccccggacccagcttctcaaaacctagaaccctataaacctcatgtggacgctgggcctgagaatccacagaacccgaaggttctttccccctcgcgaacctctactctctcgcttgctcaaactctctctatctctcggttccactcttggcgaagacgaagtgtttttattttgtttttgcctctatgacccaaatctctctcgtatggcaaatccgactttgttttgttttatcaattttgtatgttggtttgtggtatttgtaatttcagatctaaaattggttatgaatttttgtttctatttctgtttaggggtttttgtggtggtaacagtcgggtagtaatggtggttggtaacagtggggtggtgttggttggtggtggcggtgatgtggcagtggtgatggtggtaacatttgggttggatgatagtagtgcaatggtagtggtggtaatggtagactcacaaagaagaagaagaaagaaagaaaagaaagaaaaaagaaaaaaaatatatttttaaaattttacaataattttattttttttaattatttttataatatttaaaaataatgccatgtgtacacaatagcaagtctatttagcatttaacattaaaaaactaaagaaaaaatagagacaaaaaagaaattgaaattcggaggattttatttttaaaatttcagttcaagttgattataccaaactttaaatttaaaaagtttagtcgcaaattacccaaaataaaatgtagaaaagtaaagtacaaatttgagtctgtataagaaaacaggccaactgagtaaaacacgacatgatttatatattttttttatgaaatgacacgacacaacctgtattttttttatggtacgacacgatacattctgtatttttttatggcacaatatgacactatctgtattttttgataacaaagtacgacacgactcatatttataatacgacacgtatttatagctctagctcgtgttgcaccacttaaagaaaagtgaactgtaagtgagtgagtgaaatttcattactaacaaactttgataaataatgttactttgtgaagtgagtgaactgtgaatgattgtatgactttagcccccccaaaaaaagtgactgttgagctgcaagcttgattataattatgtcaaacacaatagccttttctctttttcttaaacaaaacccatttaaatcaacattgattaatcattaataagacccaccattgatcaatgatcgcaacagctattggcacaaattctacgaaattgccatgatgcttgtcaagaacaaagagacaccttatctcttgaataaaattctatgttgggaacatgtaaa

SEQ ID NO: 23414 - DNA, 2164 bp, Cannabis sativa
tagatgacatttattgctggatcaataggtaagagaaggggcagttaccaaatttagacaataatagagaaaaggggcgagtgattacattacatattcatacatcactttcaatttttccaattgatgccgatagctgaacagtgaccattaacgcagttggggagaacctgatcattatttttttatttttttgaaaaactttaactttcattgaagaagcagtgaagatacaagttacagtacaatcaaggtgaaagagagccattccacactaactcctatgagcatcagtattattattcctagggataaagctaactgaaactttggggaagtttgataagggattacatatatatatttctcactaaatcagagagagaaagattatgatcacaatttgttatcttattgacaagaattttagaatctgaaaacacttttgaaactcgaagattgactgctaaacaccatcttaaggcagagttgagagccaaagcttcagcatgagttgaatcaaacaacctgaaattggaacggccaaccctgcaattatattatcatgatcatctttaactactgctcccaatcttattttttttccttttgtaatctgttgctgcatcagtgtaaagtttgaaggagatccgatcagctaccccagtaacatgatccccatagacaatggttgagtgacagtaggggcctttacttgggcaatcctgtaatcttcaagataagaacttaaccacacaacagtattattagaagcaagtctttaccaaaaagagttttattcctactatcccatatgacccacaaaattcccaacacaaaccccaaatcatccttattcagcacctcaaaagcattaaaaagtaaactttaatatcacaaagtttattatttagatagaaacttttaaaaggagactcacaccaaaacttactaactctgaaacaatctagcaaggagtgtgtcacagtttccttgggacagttaaaaaaagaacagttaaggctagggataatgcgtttgaaaaagagattaaaagcagtgggaagaacatattggaaagcgcgccaaataaagtgttttatttttggagggatatgcaggctccaaagagtagtccaccattttttaactgaaaggaaatttgaagaggaagggggaagagaagccacattagcataatgataggcaaatttaacagaaaacacacctgaggaatgaagattccatattaaacagtcagggttagaaatatccccaataggtacttgaagaatttgggaaatggtatcattatcaaactgattgttaagtttttccaagtcctaattccccaactggttgataaaatagttaacaatatttagagggggatgaaaattattcttatagtgaatagttttattatttggaatctaaaaatcctctatcgtcgtaatagtacacccattacaaattttccacacaaggccctttttaagaagatctcttgcccaaagtaaacttctccaggtataagaaggagaatgtcctaaagatgcctcaagaatggaattatttttaaaatactttcctttcaaaatggatgctaagagcgactgagggttagagagaattctccaagcttgtttggctaacatgacttggttaaaactaatgagtgatcgaaagcctaaaccccccaaaaattttgaattacaaagaaaagatcaatttttccagtgtgttttagtatttttcccaattgacccgtaccaaaagttagccataagactttcaattttttgacaaatagttacagggattcttaaacatgacattgcatagggaggaatggcttcgataacaacttttgaaagaacctctttccctgctctagagaaaattttatggttccaaacattgagatatgaagaaaccctagccagttgccagtttataaatatcaaaagcctccctaatagatctgcatgcttgctgggaagctgtggaaaaaacgagagtatcatcaccaaaaaggagatgagaaacaaggggagcgttgcgagatatagatatccccttaaacccagagtatttctcgccgagcctaaaagcagtaaaaagaccttcagaacaaagcaagaagagatagggcgagagtgga

SEQ ID NO: 23415 - DNA, 2796 bp, Cannabis sativa
  modified_base (2700)..(2717): a, c, t, g, unknown or other
ggatacaagcattgagccactgtggcactttactgtgattttttggacggaggggtacagagaaaaatggaatgggagtttaggtagttttgccccaaacaatcgatttttgtggttaagtgttaaaaatttaaaattcaagtggtttagccgccaatatctcttttatataaaaaggtttgatgttgatatatatatatatatatacataaacctatatactttctcactaatttatagtatattttttgatttgattgatgctatcaccttatgaaacaagttttttttttatttatttatttttattttaaaattgatgatgataagatgagactcacatgttctcttttcatgttcatcccatttcctattttctcatggaatcttcttcttcatagatttctctctctgttttttttttttttcaaaatccatctcgtttctcttttttagttttctctccatgttcttattttatttcttgttcagttctttttctctttttcatttttttttctttatttttttttgaagttttcagtcgtatttttttttggaaagataagagtatggtttttttaatatgattttccagatctgggcttgtaaaaatatagcttttattgcatcaggggttgaggctgtgcagaagatgattagttttttttttaattattttttattcttttgttttttatttgttttagtgttgtcttacggttgttttccataatttatttttttgacgttgatttcattcttcttgctccatctcattggaattaatgattgtttactgggtgttcttatggtgttgtggtggttctatccgtgggtgtggaagatggaggttataaaatacatttttttcttccttctctatggttattttgtggttttttttattatggttctccaatatatacatttgatgagctcattagaaaaaaagttttgaggtgtatggttcttttatgttttttaaaatggttatatctgcttcttgttttatatttgtttttgtgttattttagtagtttttttgttctgattttttaagattggacttgcaaatatagcttctattgcatctggtattgaggatgtgcataacattgttagtttttttttaatcctttttccttttttttttgtttgatttattttaatgttgttttacagttgttttgctatgattatttatttgacgtcaatttcattattttttctcagtctcacaggaattaatggttgttttctgattgttctggtgttcctattgtgatcctgtccgtgggtgtagaagatagagacctcattttttttttgtgtttacagcataaaagaaagaaaaaaaatttagccaagacagtataaaagttatttctgccgtgtggcagtatttttgtaagtttctcaaaagaaaaatatatttttaccatattttggcatatttaagaaaaatatgtcttgattttttttttactattttgacacatattttaaaaaatacgtataaataaaaaaatatgtatttttttttttaatttgataaagtatattgatataaaaatatttaaaatttatacaaaactaaataaataaataaataacaaataaaataccaatatttaagagtgacgattttatatgttcaagaaaataaaagtttggagaccaatttgttaaaatataaagtttgaggatcggctttctgaaacttaaatagtttgaggatcaatttgctaaaaaataaagtttaagggccaatttaccaaaatttatagagaaatttgtagggaaaccctcttatgttttaatttttatacacttaatccctttatttttttctgtggcaaaatccccttatgttttaattttaatacacttaaccccctatcttttttttaatggaaaacccccttatattttaatttttatacacttaacccctttatatcttttttttggagagaaaaccctcttatgtttatttttctttgcaaatttgacacgccagttaaatattaccgttaaatatcatctggatgactactgtatacacttgtttatatgtgacagtaaaaccttgaagtcgatacagtagtaatccagttagtatttaactgtaatatctaactaaaactttaaatttgtaaagaaaagtaaacttaaggaggttttgccaccaaaataaaagataaagaggttaagtgtataaaaattaaaacataaagggtttttctaccaaaaaaaaaagataaaggggttgagtgtataaaaactaaattataagggggggtgttttgccaaaaaaaaaaaaaaagagagttaagtgtataaaaattaaaacataaggtgattttgcctcaaattgctcaaatttatataattttggaaccactccaaataagctaaaaaaatatagggtatattgattaatacctcttttatttatcaattaactaaatctacctctaatttatatttaattaaaacatacctctttctatatgtattgtacccaaaataccctgacataagagagtcacacggagagtatcttgaagtgacaagggcaaaattggtaagtgtttaaaaaaggagctaaaaatgatagactttaaaaaagaagataaaaataaaagagaacaatataaaaacagggtatggtgaaaaataccacttttattaatnnnnnnnnnnnnnnnnnntctaattttatattttattgaaacatacctctttttatatgtattgtacccaaaataccctgacataagagagtcacat

SEQ ID NO: 23416 - DNA, 2514 bp, Cannabis sativa
tgcaccaccttggttaatgattccctctagcatcatagagaacgctaggatccccttaggagccactgtcaaacctgcaaagataatcattcgattacctgacatggagctattctcacttaatgcccgaacatcccttgcaaactctgtgctctgcatcatactttctataaatggtacctatttgcaaatcactacctactgtcattccctgctcactttccttttttatactttttctgcaaaagtttcctttgtcttgtaccctctaaatattccttacagtttattgacaatggacgaactgaccaataccttcaatgccacactcaaccttactgccttagaaacccaaattcactccttttctgaagtttctgacccccctgaagatgatgatcgtgaggagccatctgcttttttagccgttaagctgctaaccaatcgccactttaattctgaagcttttaagaatcgtctaaaacagatgtggcctgaacgtttctcaatcaacattcttgagaaagaaccaaacttctatacggttgagtttggatgctttggggatcgccgccgtgttcttatcgggcagccatggcattttgattacaagttaatcgtcatgactcctcttgaaatgggctccacggtcacggctgattccctcactttcacacctttttgggtgcaagtctctggtatcccgttcctcaaacgatcccgagctcttgctcaacgtctcggtgaggtgctaggccgctatattgaagttgatactgcctccctcaaggaaacttggggcccttacctgcgagttcgaattgagattgatgtttcccacccgcttcctcgcggtacgggtttccacttccacggaatggctgcccctgtttggttggaatttcgcttcgaaaatctccctgacttctgtcattactgcggccgccttagtcacatagtcaatcattgtcctgaattcctagccaaatgtgactcttcttcggcccctcctatgttacgttatgaccaatccttgggtgcaaaaattagaatcacttccaaccctttctatattgcttgctcaagatctcggcttaggcctcatattgctcccccaacctctttggcccctgctgctccatatcgttctacccagattcctactctctctgaaggtatctttaatgagcctccttctatttatggggttcaacacttgggacagccacaaactactcctttgggtttctacatggctcatccttcctcaaatgtgaccaactctcctattcctaatctcaaccagccccctctcatcaccactacatggccccatactcacactactactgccgaaacatcccatgctcccacccaaggtacttccaactttcccacccaaaacactcacctctccactatgtcacttccctcccaaactgttactacggctgagcaacttcccactcccatgcccatgactgttcctaccttggccgagtcactggtggccacagttgctgcatctcatcatgtggttcccgtttcccaagctttctccaccatattggccgatctgaactcatcccaacccctgcgtttcactcccggagctctctcctctcctgctacttctggaactggcaaacgcaagcagctcaagcctaaaaggccggattgcctcaatgctgctgagttccgaagaatgctcaaacgcacacgcaatttagcaaagtctcttgatgatgggacagttgaagaggcgggtgacgctcagcgtacccgcctggatccatgagtattataagttggaatgctcgtggattagggagtaaacgagcattccgctacctctcccttttagtgaagcaatatcgcccaacacttttgtatataatggagtctaaactccctgttggagctttaaataattttgcttcgcgtcttaaatatcctaatggtcttgaagttccacgtgtcgggcttagtggtggtcttttgttgctctggacacgtgatgtggatgtaactttactttcctataatataaatcattttcactgttaccttgcgtttcctaattttactgctttcacttttactgctttttatggtgcccctcattcccaaaataaacatcattcatggcaattaattaattgtcttggctctgcctcgcgactacaaccttggcttattatgggggattttaatgattatctgtcgctttctgacaaaatcgggggtgacacatcacgtagtccatcgcctcattttcaatcctttgttgattcccatgcgcttcaccctcttgatcctttgggatctcctttcacttggaccaatcggcaacaacaaccttcccatactcaagaacgccttgattggtgcctttccaacaacgattgggatattctttttcccactcctcgcctttctcatggtgacttctttggttctgatcatcggcctttaattctccatctacactcccctgctgatcaaccaaagatt

SEQ ID NO: 23417 - DNA, 3635 bp, Cannabis sativa
ttttttttttttaatttttcaaataaataaataaagtttggcctaacttgtctgtaataatatttcaaattcaattcaaacgtctctctcactcggttgagtctatgcaatttacgtgagttggtgtatatttgctattgccaggaatgttttttactgcttccaagaactttaaagccaaaagctatggagaccgagttaactcagtgcgtggaaatatgaaaaatcaaagagggtaccgttattggatataagtagtgtttataggtaatatttttaaatttaattatatgagattcaatatttaattttattaattataatttgacatgttaaaaagtatattagacactattaatatgttttagtatttcttaaaatcaaaccctgaattctctatataaacaaagtaataaggctttttctaatgagactaaaatttcaaaaatagtagagtttagatataaaattgctctaataaaattctaaatattatcctatatttagtttttaatattaaaataaggtatttatgattaaaattttatatttatattttaataaagaatattttttagtgttttggtgaaatagaaaaaaatcagtgctaaaattatattcttttggtgttaatttaatattaaatttaactttgagcattggagttattctgatatgtgcagacataaatcaggcacaaatataatacaattatgtggcaagttacttttgataagcgaaatttattttaaataaaatttattagttgaaattacttgtcagcgtaagtcaaatttgtgtgtaaattatgtgtgttaatatcattactagtataaatataggtactagtaataccctaacaccatcaccaataatattggattattgggtgacactactaatgaattaaaataaaatatttaaatatgtaaattcaatatttggttacaccaacactttataatagtgcatttcttttatacaaataagtatagtcttgaaattaattcattctaccaattatgtgaactctttgataatttatcctgtacgtctaaagtaatttacaaaaaaatgtcacaattatattaagaataagaatggaaattagattggtaataagctggtaatgtacatcctaatttcgtctccatttctaatttatgttcttgtcccgtttaattctcgacaggtttagagtaaggaatttcagaattggtgatccattaggtatctattaaaattaaaacaacaataataaaaaaataatttaatgtaatttaaaataaaaataaaaaaaaaaataagatattgactttaaaataaacatatattctatctattaaaaagtttttactacacagtaatacgtaataattagaaaactatataaaaagtttaaaaactatatatctgggtcgagtatggggtaggtagtatcacaccgaccccgtcctgaactcgctttaggtatataaaattacactctacccttgtcctatcactcattaggacggtcctatgttaatttgagccttaggcaaaaataaaaattaaagtgagactattgagatttgaccttccaacctcttagttgttaaactaatcaaattaccactaggctacaacacatatttattattaaaagtattattatttattttattattaactatattttaattttttttttaaaaaaaaaggggcttgagcggtgggggcctaaggcgaccgcctcttcgtcttacctcagggccggtcctatcacccattaaaatagttaatcctaaccctatttagagtgagaacccgtttccgttgattaaatttttattactaattaagagtagttatgagatattattttaaaaataattaataatattttataataattattaaattaaaataattaaaacttaacatctactaattatgttatcacatattgtaatatagtattaagtactactaataaatgctcttcttcattctcttaaagtataaaatgactttgaaaaaagatactattcttggggagggattgaagtttagagaggccgtttagtagttggccgttgggttgaagtttgttttatattacctcagctgagtcattaacgccgttactgttagtggcggctaactgactgactaactagcaataataataataataataataataatatatcattagaagggtatagtggtaattttattataatagttaaagcttcgtttgtcctcttatgttgaagatgagcctatttgtcagtatctgtgaatacatagtatgcttactacgcaccttaaattgaagctattcaaagctaaataaatttgcactaacttagagggaaataaaaataatatacatgccttttgggttaatcttgttaaataatatatatgtatttgattcattgtaattctttttatatacttatgaatcttctattttcttgttcatatatgggtcattcatcatggccatgaatgaagtattcggtcttaaatttaataaattgtgttaattttcattctttctcatttcatatctacaatagggtattttttaagagtggtaatattttttataatagtgttcaatatctttttaataaattatgacattttattaatagcaatcaactaacatctctttcaaaattagaattagaaaaacaagccaaataattagttgttcaattcccaaatcgtttaataaaaaaaaatcaaatcaaatgaaaaataaaaaaaaacaatgtagcgtcacaggtaattaccttatccagtttcatttactgctgagaaaatacaacacgaaaaattgttacaggaagttcattcaacctgattaaattgagcactcaactattgtgcaaagtatgtaattatactactaacagcccttcagtcacataaaaattattattcacaaccactaataacgatttaattgcgagctatcgaagaacaaagaagaacctacaaacaaaaccatgtcacacaaacaagactaaaccactcaaaattatgtcgcagacacgactaaaacactccaaaccctaccactgagaaagtaccactcgatggtagactaattatagtggcaaaaataaaacacaactccaactaagttacacctgtacccaagaaaagccaacaatcctgacaaaaaaaaatgacaacctcctgtaaatatatatttaagaacgaaaaattctaaatttttatgttggttaataataatgtccaatattaataaaaggtgacgttttaaattacattaattgtaatatgttactctcaaggttggcctcgtataaatttgggttctagaaaaaatatttttttagccctttttataaaaataaataatatttttaaaaattattaaaaaatatatatttattaagtttttttttttattatttgggctagaagtgagctctaagcgcgagcttaatctgccttaattagggtcagccctgattactctattcatttagttgaatatgttgataattttttttaaatgatttagttaacttattgggataatttcacaaatgcacaaaaataacaaaaaaaaacaacaaaaatacggtttcatagaattttaaatattt

SEQ ID NO: 23418 - DNA, 2594 bp, Cannabis sativa
  modified_base (875)..(889): a, c, t, g, unknown or other
aaactctaataattcaagcatgtaatctaaagtaaattgattgaaacctataggaataccttttatgatgaaatgtgaaaattcatactttgaatacacatactttattagtctattcacttccacagttaaacttaataatttagattccatcaccagctagctaaaaaacttaactattcacataataagtaaacaaaattcccctaaaagtttattggcataattgttattaatttttttgtaagatacaaaatcttttaatgaatattcacttcatgccaaaataacttaagataaataaaattatccaaaggtggagaatgtcgtgtagcgtttgtagcattatatacatttagaatattgccaaatcttatcacaaaagaataatttagaaaattttcatttaagtttttatgacatattcttgaaaagtctttcacaatctaattaattgcatgtattacggatcattctagtctatgaaattgaaatgatcgtctctttttttaagcttagctgtcttttaatttgaggaggacttttattaattattattctaacaaacccgcaacgtacacgtgtcacgtcaccatttgttatgactatcagtttcatactcgccgggtgacatgggattgggaagaaaggcgggtttatacttattatgcatgcgttggtgggtctgtctatctaacccattttagcctattaaataaggaattaaggattaataaaatatagttttttttatccaatcagctgtaacaactacctaattgtgtcttcaatttttcttttcttttctttttttggttatttcaattttttttttttgaaatattgcaactattaaagggtaaatactattttgnnnnnnnnnnnnnnnaaaagttattaattggaccctctattttgttaaatgacaaaatagattctgtattttttaaaatggtacaaataagaccttgaattgattttttgtcaaaataaaatttaattataattcgatctaaaagtattatgacaaaattgtttacattttgtggatctgttcgtattaggaattgttttcaagttgattatataaaaaaaaaaaattgtcaaaaattaagctcaagatcctatttttactattttggaaaacacagagtccattttgtcatttaacaaaacataaagtccaatcggcaatttttgcaaaacacagaatccaaaatagtatttacccactgtttgggataccatttctctctaaaaaaaatagtggtaataatttcactctaaaaaaaatagtggtaataatttaaaatgcacaactcgtcaatttaataataattttaaggacaaaattttgtaattataataatttgggggtgtaaaataattatgtgttagtgtctcagcatgtcatttcaactcttgaacaaatgaacatgaatagcattaatacttcaagtgaaataatttaaaatagtataaaaaattcaagtagcaataacatgaatatatccaaataaatgataaaataattttaagaaaatatttttaccaagcaataaatatataaattaatattatttacgagtgggttatttctttcttaaaaatagaaaagtgtgactataatataaaggattattatttctatagtttaggtataactttttgctctgtgtgcaatttaagtgtggatctaatattactcttttttctttaattattatttagctatttaaacaataatgacaataaaagtggtttcatagtttggccacaattaaaagtggattaattgtaacatggtttgatataattaatgaattaaagaagtgtgtatgggtaccagtttaatgtgttacattatcagggaccaatataaagaagaagaagaaaaagaaagtggtgcctatcacgtagtcattaaaggagttgggttgcactttctttttagtcaagtctcatttccatcagtttcaaaaaagagaaaaaagtctcattttcctcatacttcataaaatggggtcacacatatataatatatattacaagctgtaaggaactttatttcaatcttaacaaacacaccagagattctcatagctcattttatcaaatatcaaataaataaaaattaattgaaaggctgtctacttttacttaaggaaaatttttaatgcacccttcaaaaaaagttcatctatgcattcctattttttcggtattttgaaaaaaaaaatagttttttttcataatcaaatatgttatagttatttaaaacatgtaataaactttgagaaatttagaaaaatttatcaagctgaaaatagatttcaaacagtttattttacatgcatataaaataaaaagtctcgcgtgtaatagattgtctaaacattattttcggcgtattaaattttttggaatctctcaaaattttacaaaatattttaaataactacaatataaatgattataaaaaaaattaaattaaaaaatattctcaaatgccaaaacaaataaaggtatatcccgtaccatttggtccgaaagtaacttttgattttacaaattttgattttgattttgatttt

SEQ ID NO: 23419 - DNA, 2334 bp, Cannabis sativa
ttttccttaatttaacattttcatcctttcaaaacttcaagttttctttgcattctttgagaattagaactgagctcggggccaagtaatctaaatcaatctggaacgtgttgtcgtctttgcattcaaattctactgagaattaggactcgagagtttccaaatcatccaccccagtgatcgagagctttacgctagaagaaatttcgactctgcatttcaatacaaaaatcaattcgttgattacccttgcatctcgtcttcgcgaaaggtgagatcaactttcttaaccaaacccaacgacgatcagcttaacatctttgttttcactatcaggtacttctacaagattaaatctcaactcatgaggggccataaggaaaatgtgggtttctataggctagagaaccattctaagagtgtagcttgtcccgccagttctacaaagtatactcacgacttccgggactactatttctaaaatttcagcttcttattgacgagagtttccacactcagcttggatttcaacatagcgagtaagtgtttttttttccggactttcacttattgttttttttacctttagttatatcttgatgtgtgtttcatgtctgttaggttgtcttccccaatcacccttgactatatggagttggaggagaggataactttttacaagtccttatcgcccaaggaattacaagtgggctagcttgtgaccactggaaatctctaaaaaatgggcctcattgcatcccatcagaaagttgactacatttcggtgatggaaactgtttaggaatcactctgaggagatccctaatgaggtgaaagagactatcgtggtcataactaatgaagaggccttgaaagttgtgaaggccaatgaataatggcttgctgattggaagagcactttctagaagatttgagtgaagctaaagagctcactatttgcttcagggacgtagtcccaaatgagggtgctttgagagcgaatacttctggtagtggtgaacaccctttcatataattagggctccctccttagtagacatagataatactgatcaagggggatttgacccatatttttttaaatatagatccaaatagatatccttgcagtgattttatagataaagcagattacatcataaggagtcccaactattttgttccaccagcgcaccatcatgtcaaagtggacatacttagtaaaatttactccccagggttcttttagcacgagactaacttaggtcgagagaatatttctcttttggctaaaggaaaagtcaattatgctaagataaacagtttgaatctttctagaaaattttctgatagcttgtatctgtaattatatatatgacatacatactctaacatgatgtattttttttatttatttcttgcagagcaaccgattacattccaaatgggtctgcctaacaatttcatggatgccattaacactaaatctgacgatgtccgtgaggtggccacggaaggcaaaaataaaagcaagaaaggacaaacctctcggagtggatctcaaaagcctgcacctccagtctcaaggcaggaggctgctccaaaggctccaacctcggatgacttgtcagcttctgtcattgacctgatagaacctgctcttgatgtggcaccattgcagcaagtgcctatggggaacgctgaggaagatagctcatattgtgatggactagtcttgattctaggaagcagtctgatactatagatggaggggccaataaaaaggcgaaggtggagatcaaggaaaaagtccaatagttggctgccacgaggagacaagctgctgaatctcaaacccgaaagggatctgatgtctccgagaatggaaggccacctaggagaagaactagaacaaccatggataataaagatctgcctccaccaccttcaacacctaaaaacattcttgccactgccacacaactgtctagggagaagacggtcttgtctctattacctctttcatatttcaatcttctagtcaggcctatatcaataccggaggaagttaaagcgcacatggaggccattgaaaagttttatgtgaagcagtgtggaagcgagtatgatgagatgaaaaagttagccaacagtatctcctccatgcacaatgctgaatttgctgattatgataagtgggacgagccttttcttgacatcatgaacagagcagagatgatggagagacttcgtccaagggttgggattgatgttgctccgttcttgtatgacttgttggaccagagtactaccactagttgtaaacttgggact

SEQ ID NO: 23420 - DNA, 1348 bp, Cannabis sativa
aaaagactgagagattagatacagtttgagcttgagcatgaaatcctatagcatgatcccgaaattgagtcccaccaatatttttattttggaaaattatgacatgattaagtttaaatcaacttgagaagattatgatctaatcaagtagagatttcattggtaacttttttatatgaactttggagggtgggtaatgggtctcatcagttataattaatttatctatagatatcccacttgcaaagtttttgggatacttatattttgtaagtttcagcctattttccccatccataaaatttcttttactgacctagagaagatcgctcttagattctaattagattcaagaatactttgtagacatataatcttttgtgtaatattattaatcacttgcgtatctattcttttgaaattctaatcataacataacagattagctccaacattgtacataaccattaacatataggacagtaaccttttgaatgttatacaaatacaatatatggtaaatttgaaaaccctacgccaagggagtgggtcttattatggggtcattcacccctaattttttataaattaattttgtatatatatatatatttttaaatattttaacttttacccttataaaaataatttttcattttattttaataattttattttatttttacccttataaaataattttttattttataccttacatatatttttattttattttaataaaatctatattttttatttttaccccatataattttattttgggaaattatccattataggaatgtttaccaatttttttttcccagttatatgttttgtttttaaaacttccaatgttataagttggcggcataataaaaggaaagcgacacatttttaaaatatatatgcactctcccgaaaagagcctgccggaaggattgctgaacaagcccgtgacagccatggaagaactgctatctcagacgaacaacctgaccgttctagatgaagatggttgggaaatcaatgaagatggaggtgccgaagtggggaagctgtgtgctataggacgtctctgttctaatcgcacaatgaatcgatccttgatcaaaacgattctgggtcgggtgtggggattaccggagaaagtttggggtgtcgaaatcaaacacacttcaatgaatgccatcttcctggtattctccttcaaatcgtcccaagatttgaaccgaattcttatcaagaacccatggtttctgaataatggtaccctaatcttggaacgtatgaaggaaattccatctaattgggaatcttgtctctctagaattcaattgagtgg

SEQ ID NO: 23421 - DNA, 2239 bp, Cannabis sativa
caaataaaaatgcaggagtggatagtcgaacccccaaccccatgaacggaggaaaaaaaactaccactacactagctagacttaatttaatgaaatatattgacacacacacacacacacacacacatatatatatatatttaaatgaaaaaaagttagaggggtcaattcaccacccctcttgccccaacgtaggtctgcctatgcttctgcctacttaattaccttttcatcaaattttgtttcctttctctaaaacgttgaagaaatttgcgatctttgttgaaaaactctatttgagtcaagtagctttcttcagtctctttagcaggcccttaactagagcataatgaaagttaactatgatggaaagtttcctaaggccatttggagaaaaccctgaatagttggcatatttaaattttgtctgcagtgtatttttatattagtcatatgtatttcttatcttttaccatactgtgttccctaatacaatgcgagcgatattaaatcccttaccccttgtacatagtttttgattagtgtactgttttgagttggatgattgtattgcagttgatatacatgataaattggaagtcatttcacacaggtgaagttttgtaatttatcatgtcagatagttgcagttttgatgcttgttttctgcattagattttgacgtgaatatattagacaaaagctgaactagttatgcgaatatagaagtcttcttccatttctaggtattttttaccatatcttggaagcttagcttggtaaagtctttagggatgcacagtgatgttaaacagttttggaatatttctggctacgatattatagaattctggataattctactgtagatttctatcttttccaatattccaatgtagaattgattgaaatacgcccgtttttgcatcatctcacgttgtcccattagatgtctttcattaattgatttatagtactttgttgtcctcttgtcaaatttaaaatgagaattaagtttctccaccttctttccatgtgtgtatttgcttgtaagtcacaactaaaattttatacttgggaatttgagttctcctatgtgaaccataagttggctttctgggtttccattatcttgtatgttctgcaattgtctaggcttatgaagataattacgcatgcactatcatttcgtctaggagtgaatcttttcttggtaaatcaacttaatatattttctccatttgaataattgtttgcaggttctagaaaaggctttggaggtttgggatctccaagtcataccccttcattctccagttgctgagcctgctcagatcgaccctgaactcgaaaatgcattcatttgtcatttgcatgaccattggttctgtataagaaaagtcaacggagagtggtacaattttgacagtttgtatgcggccccaatgcacctctccaagttttacctctcagcttatttagacactttgaaaggcgccggttggagcatttttctggttagaggaaattttccaaaggagtgccccatttcagcttccgaagcttccaatggttatggccagtggctttcaccagaagatgcagagagaataacgaaatccttgggctcctctactcaggcgccatctgagaagccaagtttgaatcaacaatcatctgatctatcatacggcgaagctgaaatgctctctcagatggaggatgacgacttgaaagctgcaatagctgcaagtctaatggattccgccccagcgtcgagcaaatctgaagctgtagcttcttcacaagatgaaaacgaaagcagcaaaaataaagttgaataagaaagattcacaataagattctttaatttatcatctaatggctggagaagacaatcatccatgttgggattaagtcggtcaaactcgcatccttggcactaaagtcaattatattttggagggtatacgtctgcattttgcatcatactttttgcctgagtctacattgaagtttatttccactgtaaaactaataaatttcccaacttgcaatggatgatcatattttatgggtttcaccaatcaaccattgttgttaagagtttcatttattgattttgtctctcgtaatgtctgattatcaaagttattattggtgcaataataatatggtgaattaagaaattttaaatttataatcaagactttgtactaatggaactaatagaatcatt

SEQ ID NO: 23422 - DNA, 4060 bp, Cannabis sativa
attttgttgctatgtaactctcttgaacattctctgtttagttttagtcctagacaaaccaataataagttgatttttatctcaatttgattttttttttcaatttgtaacctttttaatgaagtaatcattgaaaaaagaaaaaaacaaacaaatcaaatatgtaatttgtaaatttttaaacatttaaattagcttcagttttcttcaatgaaagtacactgttaaaaaaatatatatttaaattagcttattataaattgtttaaagtaaacaaacaatcaagaaaaagcacttaatatgagagaaaaaaaaaaaactactttgaaaatttaaaaaacttattcaaattatatggcatgcttaactttggtatctcccaatgatgtgttagtttataaatttgtcaacttaaccacattactatttatatttgtctgaggatgagactattattcacagtctaattctctcccatgcttaactgttgttggggttgatttttctatttggttccaacaggttggagctcaggtgggtaaggagaagcaagccatggtggttgtgatatattgggctatttggcaagcttgaaatgaattctttagagtaagaaaattccaagtgtgaatgatgtggttacttcagcaaccctgtatctttgtatcttgaagaatgaaagaatgcccaaatgaaatgataactataaactactgcctagtggtgtgcacaaattggtacctagatttaagtaaagcctcaagtgaacaaaataaagataaatattgacaccacattgttgcgactcatcaatttggaattggcatggtagctcgtgatcatcaagacaattttgttgaagctcataccatttgttgtggtgggatgtgaaacttgagttggctgaaattataagcattaggaaggctcttagttagattaaggacggagaatgggtggtgctcaagactgattgtttagtggcagttaaagctatttgcagtcaactgatgataaactctctttttggattacttgttaacgactctagacatttgtttaattgtttgagcgaaatgtctcttttgtttatttatcgttctactaacaggttactcatagttttgttaaagttttctgttatttttaagatcgaacatttaacgagaatctactcatcttgaatatatgtttattttttttaaaacaatttgttttcttaaagaaagttctaaacatgtatttaaatatataaattgtatatttgttaaaaaaagattatataaactttatattggagccaaacaagacaaaaagaccaaaaaaaaaaactaaactaaaaaaatgtcaaccttcaaaattaaagctagcttattcaatacttgtaatgaagttggtgaacaagaaacaagaaggtttttggaaaaaaaaaaataaatatggaggcatataaatctcttaataacaataattattataattatcaaaaggaaaaaaaaacaataattattattattaaatttattacttaattatcgttgaaagaaacaaagacaaaaaagaaaacaataaattttaatgcagaaaggacaaaattgatgtggctggcttgctatggaacgttgttgttggttccatttaaattttgccacgtggctaactttgaaaggttttatacattgccaataaaatagagaaacgtggccacatactacagattaaaaaataagaaagaacttgtattatacattaaagagtattggtattgtacatatgcagtaacaaatattttttagagatgtcgtaagattaattagtgatattctttagaagttattacattaaattatgtgagaaaattacaattaaatgtgcagaatcaaatcaataaaactctaaataattaaacgattagtaatgacaaaattattaaattgaaaactaaaatcagataaaaaacagagacaaacagagaatctaaaactagaaaatagtaaatgtatagaataaagaaatcaacaccaagatatatactggttcaagtcctatagatcgatgtgaactatagttctactctagttctagaacaccaccgtaaacttcctttatagattgaacaagaataggtacaatacagccgagacgagattctctgttgagttttcataaagtgttttaactctcacacttacacctaagaatcttcttcatctatagaagatcttcttcatctatagaagattattcttacaaagcccaaacccaatctctctctcttttctgtgcacctctctctacctcttaatcttttctctctaaaactctcagtctcatctctatttcgtgtcgcaatttcttcctccaaaatgataagtgaatgtcgtatttataggtttatgatcaagatcctaaagtctgtagctgcaagaaacgatgttgataagttagttaactaacttaaccaactcttctttgaacgaagtctccacgtcaacttaagtatcagggcctccgtaaacatataagaacacccagactcgcggaccaaggatactcgctgatgatgcttccggataggaaatagcctactgtagtcgactatccgggtctaccatttcaggagagataactagctagctgaaactcctttccagggaagggctagttatcccaaagactaaacccagagtagaaatgatagtcatccaaaaactcccatatagactcgactatcaatccacaagactccttccgggatggacaagttagctgtttgtgaacaaggtccaggagacacctaactttctaaagacaacttttcaagaatgatattggagacctttttatttggaagaattataccacaaattatatgacacctgatacttaattgcatctatatgatacttagaagagtgttaggcaccaatagtatcttttaacatttgacagtacgttcttgcttaataataattttggacatgcttaagttcgttcgaagctacacgtactatgggctcatgcttaatggttgccttggtcatcgaaaggctaggtctacctcaagcccttcagtgaccaacgcaacttgcatgatttcgacacccctttacaaaggcattttaagaattcttttttgcctggtggtttttttgtacttggttccttgttttgaccactacgtctacgtacgtcagttggtgtctgagttcagaaaccttcttcataatacgtatcttggtcgtacttgttttcatcgtactccttgccctcgtaatactcttcttttataggagggtcttagactggagatggtatttatttgacttaactgtcggtagtagtacatcattttatcataatgttatcaggtggttgtgatcatctaattctccaagccaaagagttggctactgttgtgtatatgactatcataattagaggtaaaaagttgttttttaatgaaagcatcaaaatgttaacaaatttttcatcaactcaaatgtgtataaggaaataagagataataaagcatgaaaaatgatgaacactcatgatttttcgtgattcaagttattaatgagattttagttcacgagtcacttaacgattttggcagcattttagtttataaaccaacaatcaaattgttttataatgcccaatggccttaccctacgaaaaatgtagtagtttgttgacatgtcttgtcaccaatctcagatgtaggaagatagccttgtcggatgagaagtcttccagacttaggtccagaacttccatttgtgagcctatattgcctcaagctcatctagctatttgaagcccactttggtcgtttagagttctcttaggagaaatgcccaagcagagaagtacaaaaataatagattttacgtaaaagtttacaattttattgtcacacggaattttttacaaaaatattgttcattcataaaataaaataggataattaaaacaacagtggaacaactgtaaaaacttaacatagtatttttgaaattttttttgcctcatagtaaaaaagtaaaaaagttag

SEQ ID NO: 23423 - DNA, 2119 bp, Cannabis sativa
aagccatatttgttacttcataaagtaaccacctttgttgttgcctaatacgaaaaccctaatgccctaattcaacatccttatgtttcattgcctaataagacaatattggtaccctagtctgacatccatatatcgcattgcctaataagacaagtcgatgccttaacctagcatccatatatcacattgcttgataaggcaagtcagtgccctaactggcatccatatatcacattgcctattaaggcaagtcgatgccctaacttggcatccatatatctctgccattgtctaataagataatcgacaagtaagaaacctaaccacagtttcaattgatgccatgacagtaatccactttaacagtaatcataattctattacctcgatcacaatcgagtcatcagtcatcacaataatatatgtatcttaacaagccatgtggtacaaatgtacttttcttacctcaagtttcagttcaggtgtattggccaacctgtacggagaacgatcaacgatcccgggccttgtgtcacaataatgaaaagatcgactaaacacttgaactgactcgctctaggtccttagttcataaccagaagttttcctgtcgattacacgtgtgacaataccctaaataaaaaaaataaagcacaaggtggtcctgaaacgatccaaaccaaacccacataaaacccaactatatacttcaagacttctatccttaacaaagaaatcaaatataagcttacctttatctccttattcaagcctttgcctatctaaattgaaatcctcttataattcctaagctcaaagtgatgaaattttgaaaataaaattgaatggtgatgggagtatgagcttccaccaaacaaaagaagagaaagggtgagggttaattgataaagatgatacgatgttgaaatgaaagtttggtattagatggtggtgtatggtgtagtcagccaaggaaggaatgaagacggaatatttattttactttcatttgaccaaatcacaaacaaaattaaaaccacaaacaaaatctaaatctaatatcacaaacaaaaattaataaatcaacacaaaatgagagagagagagagagagagagagagagggaaacaccatggatcaacagggagaaaaagagaggggtcgatcttcatgtttacgtttgcgaggatctcgaatttgtggtctatttagaccatcgttggtgtctgaaataatgagcttctcttgatcagtagctagctaaaatggtggagaagaaagaaagagagagagggaggcgtctcccatcacaaaccacctcactccttctgtttccccaagtcgcaaggtctcagagattattcttgagatccgaatcatagagcagtggcctttggggttcttgtatttgaacttggtggtgttgctcgagatcttgaaagggggcaaactcagttcatcttcggacctggtcttgacaaccttgtctagccaaactactccctgcatttgatctggcttccaccacaacttgatgtaattctttctctggttccagatcttggtcgtgcttactccggcgccacacacaagaagaagaaggagaaatgagaaagaagaagggacagagattgtgtgaatagattagggtttgttttgttcaaggaaaaaaaaaagaaagaaaacaaaaaggagaagaaaacaaaaagaaaaggaaaaggaaaaaagaaaaagaaaagaaaaaaaataaaatataaataattttatgatttttaaatttttttatcatattttaataattaaattacgtggaccactaaaaacgtgcatacacgtggacagatcactatgacacttaactgaggtatttggtcggaagtgtaatgagcaaaacaaaacctgtgttcagtagatttcaccgtcaaaacttcaaattttgtggttaagtgttaaaaaatgtaaaattttggtgattttactgccaatatcccaatgcatttatttattttttatttttttacttaaaattaatgatgataaagacgagacccaaaacattacgtgttctcatttcaatttttcatcatatttcctattctttctctctccatgttca

SEQ ID NO: 23424 - DNA, 2618 bp, Cannabis sativa
tgaaggagaatgtgggagccatgctggaggttatttaatgtcaaggaaagtattgaagcaaggatattactggcctagtttagagaaagatgcaacgacattcacaaaaaagtgtgacaaatgtcagaggtatgctagctatagcaggcgccctctggccaaactcgtgagcatgacaagcccatggccattcgccatgtgggaaatcgatttaattggggccttaccgacaggaagagacatggtaacatatgatgtggtggcaatagacaattacaccaaatgggtagaggttgaggccttggtttgtatcatcgctaaacaagtggtatcgttcatcaacaagttcttgatatgaagatttaaagtaccttacaaaataatgactgataatgggacccaatttgaaggagatttgttgagttcttatttctctgagagaggcattgagaggagattatcagcagtagtgcaaacttaagctaacgggcaagttgaggcagcaaacctagataatcaaaaagttcctcgaaacaaagctagaaaagcttaagggcagataagtggatgaactaccgaatgtactctgggcatacaggaccacgccccactccaccatgagtgaaactcctttctccctagcatacaggtgcaaagctgtactttccatcgagatgaaactcaacttgtttcgtgtgaagaatttcaacaaagaggtcaatgaaaaagcaatggcagaaaacttggatctcttagaggacagaagagatgtagcccaaatgagattggtggtgtatcaacaaagggcaacatgatactataattcaagagtccacatgcatgcctttaagaccaaagttttggtgctaaggaaagtcctcccaaaaactaaggatccgagggcaggattcttgggaaccaattgggaggggccctatcagattgccaaagtcatcccgccagggacctacaagttggcccgcatagatgacacgataatatcaagggcatggaacgcagggcatttgaagaaattctattgctataaatgtgagtcgaatgtatcttttagccatttgtgttttgaaatcaaggaggaagcccataaggcaactccacgagtttaagtttcctcttatttttcaatgtttccactctaatgtcatgaaacaaaaggccacccagatagcctacaaattgttctttggaatatatgatattgcattagaattaggcaatcacaccttatcacatgatgaagtaatatatctcatctttcattaaaaataataataataacaatgaagaaggaaggtatgtacatataaaaaaaaaattgcacaaaccccaagggcaaggcaccattggaaacactgcacacttagaaaggaaaggaggaagagtaaaaaaaatgaagtcagcaaggacaagcaacctttgcttaataaaataaatacacttttcctcacaaaggtcgccgagcgaaaagaggtcttgaaagacacttgtggcctaacgctaaaacgagagggtgcctcccaaatgtaagaaaacacttacaagtcaagaggggagctgttaagtacaacaagcctcctcacatctgagtggaaggatggagaaataataagaggatgagaccgctcaaagagtaatactccctcaaatgaatgcctgcttaccactgcgaggaaagttgcttggaaaaagagggaaccttagagttgttcggccaacgtcaattacaaacaatcgcttggccaaagagtgaccctcagattttcttggtcaacatcagttacaaaattcgcttggctgaagagtgaccctcggagttgctcaaccaacattaattacaaaagtcgattggccaaagagtgaccctcgaagtcgctcggccaatatcagttacgaaagttgcttggctaaagatcgacccttggagtcgttcagccaatatcaggttaaaatgatgcttgaccgcatggtggctgaggtcacttggtaaaaaaaatgattagaaaaagtgaggagaatccatcactacttcaacatattgtcgcaaagtaaaattcaggcaagggaagcccccaatgcaaagcgggcacctcctcgaagaacactaagagggtctcacactttagcaaggcatattcccaaactcactcagttgacaagaacacttgaatgaattcttgtatcctaggggcaagtgttaaccctgaaaattagcacaaataacttttaaggttagttaactaatccccaagggactaacaaaagtgcattcaacgagtgtacctagttggcatgtatttcataaagtcatcatcgacacttacgattcctaagatgcacccatgtgattcaatgactaaccctgtggcgattaacgaacgagagaacgtaaaagcgagggcataagaaggagaattcatggatgcatgtatgtgtgcatgtgagtatgtgcactcgagtgtatgaatgcatatgtgtgcacggttgtagggatgcgagatgaggggctcgcatgcaagcatatgcgtgagtgtctgtggttggaagggtgtgtgtgttgtgagcctcaggggcttgcatgcgagcccatgtggggggct

SEQ ID NO: 23425 - DNA, 4724 bp, Cannabis sativa
  modified_base (88)..(88): a, c, t, g, unknown or other
attctataatatatattattatttgacaaaattaataattcatcacaattaattatttataaattaattatttaatctaaatattatnttatataaaataatataacaatatctacatggtttctttcttggttctaaaaaaagcatcatagttaattattctagagatagagatgatacaacaatatctacatagttcctttcttggtttaatatcatgaggacttggagtacttggttaggacccacgttttgacgtaccttggaatttgcaatattgatccaagttgcaactttactcctacacttgtcttcattgttgttctcatctcatgccatttgtgggcattagcacaaagaagaattacaaactaatagagcgttccttcaaatcaaagtgtaatagatcattctcctctttcacacttttcttcttcatcacatttttctcaaccctcactctcaaaactttgttcagctatgaatatgtatataaactactcgagctatgcatatatgaaatgcataacaagtctaatgcaactatggataatcaaaaaacaacttttctggtagcaattgctttgctttttagtagtaatttcagtgtctctatatatgcagggagtggcactatggattttggaagcaactcatttgatgaagtggatgatctttcattattttctggcacaaatgatgggttagtaatagtatcagataatcattaagtatattatctcctattttatattgtattacaatggatttttcttattacaatgtatgtactctttagggttgatgaggtgagtgagatgaaagatgagtcatgggaaatggtgcaaaagaaaggaaaccaatttgtgatcaatgatcaacctttttatgtaaatggtttcaacacttattggttgatggtgtttgctgcggatcaatccacaagaggaaaagtctctgaggttttcaaagaggcatcttctgcaggtttgacagtttgccggacttgggcttttaacgatggtcagtggagagctcttcaaaagtccccatcagtttatgatgaagatgttttcaaggtatcttaacccccacattttttcatcacctttaatctattaataactattatgacatagcttactttgcttgaatttgttagcttatttcagttctcgtctgcacattgtatcaaacaagtgttatttttctttctaatgacattagaacttgtttgttaattgaggatgtgtaggaaaattgaaccaaaatttcattcaagttgtttgagaagtttcatatttgtaactaaattcatagtaacttaatcaattctctttggatttgcaggctttagattttgttgtaagtgaagcaaggaaatacaagatcaggcttatactttcactggttaacaattgggatgcctacggtggaaaaccacaatatgttaaatggggaaaagctgctggactgaatttaacttctgatgatgactttttctctcaccctactctcagaagctactacaaggctcatgttaaggcaagtatttttctccttttttttttttcataaccaagttgtggtggtggtttcaaagttgcaatcaaacttgagaaattcatataacacacttcacttgtatttgtaccttgcagacagtgctaaatagattaaatacagtaaccaatataacttacaaggatgatcccacaatctttgcttgggaactgattaatgagcctcgatgtacctcagatccctctggcgatatgcttcaggtttaattttcttcaatgactctatagtgattaaaatatgtttcttcctatatgttttggatgatgagagtaactctggttgaacatcttttctagtcctggatacaagaaatggcagtgtatgtgaagagcatggatccaaagcacttggtagagattggaacggaaggattttatggtccctcaactccaaataaggttcaaatcaaccccaacacatatgctcaacaagtcggaactgactttattagaaaccaccaagttcttggtgttgattttgcttcagttcacatctatgcagattcttggtacgtgtcaagggagagttagagattcatatatgcaagtgtttaatgcttaatttataagcaaaaatgttgcattcatactctgttaataatgacattttctatatttctaaccaaactaggaattaaaaagatgatatttttctttccggaaaggatgaaaattgtttcaacaacttgtacatgtgcataacaacttctgaccaaatatgaaattcattggtgaaggatttctcaatctatctctgatgtccatgttacattcaccaaatcatggatggaagctcacatagaggacgccgaaagatatcttggaatgccagtagtgttttcagaatttggagtatctacaaaggaccccggatacaattcatcattcagggacacccttatcgaaacggtgtatgatacccttttgaactccacaaagaaaggaggaagtggaggtggaagccttctgtggcagctattccctcaagggacagactacatggatgatggttacgccattgtgctttctcaatcgccatcaacatccaagatcataagccttcactccaaaagacttgccatcttcaactctaagtgtgcttggaaatgtcgttggggttgcaggaagaagaatcaatttgagacttcccttgaccatgatgaactgtaagatgagttattgtaaattaatagaactattgaagttcaaactttatggaagttcttactataaacagttacagtgtgcatctatctctacaaattcttgttgttggattaagttttgtgaattaatgtaattacatatgtgaataaatattttgaatccatcttaaatgatgttaaatttcctgtccgactccactatggttaatgtgttactgtgccacacacatcttgaagatacccatgcaaactagctcactctgctaataaatatatatgcattgatgcagtattcttaagagaatttagctacatgattttaagaggtaagcttaatcgagtgaaacatgcataacaatttggatattttgttcatgtctataacaacatgttttgtttgggaataaaaatgagagaacaggaacaagaggttaaagaatagcatactaatttcggtgtagctccaattatctaacccaaaacatagatcctttattgggaagttgggacgaaattttttgccacgtttatgtgtgaaattagttatattatatatcacaaattaatttgaagtgagaaattacaagttagaagaccatagcacacatgggctaatctcttaaaacaagaaactaagttcaacattcatgaaactcaatgctccaaaatatgaacagattacatctagagtctaagctaagctaaattaatctaaaaccctttgaaccttttagattaagcaactccatcactctatacaatcaatgtctccctaaaagagaaaagaaaaagttatttaatttatttggacttccaatccataatagcagaaagaagagtgtaatttggtaatagattcttggttgacaatggcaaattggtcattggtggattgacagtgaattaaagccacatttctattgtggctttacaatcagaagtgtagccatcagccgcagcacaaggatcattcatcacatcctgtagccaaagcaattactttttatatagtgaacatatatgactgacattatatgattatgttaacaaaaaagtcataccttaagaattggacagataaagtggttaggaggaggtgaaaagtgcaccctagaagccgaatctcaggctttatcagaagtaactttcaatctctgtcatgtgggaagtatttaagcttgcaaatcaggtctatctttacggaaaagctccacacatctgagtcccaattcaaccatttcttttttttctttgcttggccaattgcctgcatttgaatcaaaaatgtcctctggatgaccttccctaacagccgtttccaccacatgggctagtgccaatgctggtttcgcagtcagtagttgtaaaatcactatccctaaactataaacatctgattttggagagattagaccagtcctttggtactcgttgggttccaactggtcctgtaaacatggtcaatgaataagattggtctaactgaaacaatgcagcaaggttaatatcagtacatcaccaatcttgctcacaagattttgatcaagcaagatgttggctggtttaagatcacggtggatggaggatttgtttgggctttgccttgtggaggaaggcaagtgcagaggctacttcccaagcaattccgtacctgtcaaaccaagggatgggaggtgtcccctgtgtctgcatcaaccagtcctccaggctaccattctccatgtactcatatcataaacaaggaaactgcgatctaaacaccccccaatgagtataagcaaatggggatggtgaattttgctcaagatgtcaagctgttctgtatgttcaagagcttggtagctattcgaaatacaaaaacaagcatagaatctttagcttacaaaatctacaagtacactactatttattttcgttaaaaaacaattcctacctggcacaggaactgctcatctttgcagctctcattagagct

SEQ ID NO: 23426 - DNA, 4351 bp, Cannabis sativa
tatccacaattcaaagtagatatattatatttaaaaattaatataggatcatagtgagaaataaaaataccaaaaaaatagtttgatattccacaacttttttttcctttcctttttcatatatcataaaaaataaaaagaatacaccccaataaaatatatcaatacctcaaacttaaattactattttacattttttcctcttttgctcttcatatactaataaactcgaatatgaatatattgtaatatattttgtctttcgctcttcatatatcaccccacataaaaacaatataccacattattaaagtaatatactcgaatatgaatatacaataatatactttatattttgttcttcatatactaccccacataaaaacaatacatcacattattaaagtaatatactcgaatatgaatatactgtaatatagtttgtctttcgttcttcatatacaacctcgatcacataaaaataatataccacactattaaagtagtatatttgaatatgaatatactgtaatataatttgtctttcattctttatatatcactccacataaaaataatatactacactattaaaataatatactcgaacatgacattattgtaatatacttgtctttcgtttttcatataccaccccacataaaaatattatatcacactattaattaagtaatatacttgaatatgaatataatgtaatatactttatctttcgttcttcatatataaaaataatatatcacactattaaactaatatactaaaatatgaatatactgtaatataaaaattttgaaatattagtgtaacttaaaaaagatgaaaaaaaatacacaatataatcattgaagttttacgggttgataattgaaacttatttgattcaccaaaaaaaacaacaagaaaaaaaaatgttaatcgtgagtggtaaaattttctttccaataatatttcaatagtatataaatagtaatagcagttgtttaaatttatatgtgaaaatgaaagaaaaaaaaatagaaccaataattataaattgtccaatagagagatgacaaaatcatgatgtctataatatttgttttcctatcacaaagttactgtatgtgtaataaaaggttataattgtaattttatcattaaatttttaatcaaatagccattttgttaaatgtttataaaaatggacatttataaacattttacatctcatcatcgcctgctcagtatttacaactcacgtatagactacaattttaagtaccgtgttaggattacaccaaggacaattcaggatttttctagtagtgtgaatagcaataccttataattatgaggttgactttgacttttatcatttacatcgagaaaaataataaataaataaaatgaaaaacaaaacaaaaacaaagatgcaatgtatgcaatgcgtaagacacacttatgttgaaattaattttgggttcatagatccaggcgttgaattggaacaatgaccataaaagtgattagtatattcaatattgaacaatacgtaaagtaccgttttatatatttatgtttatgtatatatgtgcctagctagccaaaattgaaaatattatttgtcgcttacggaactcaaattaaatctattgagttacgtaccgttccatttgtttgatgagaagttctctatatgatatatatagggtcagtcagaaatgaacctaattttgaaatatatataatatttagataattttttcctataagaagcttatggtatggccatgttacgatacacatggctgtcattaactttcggtccaagtctttttcagttattatgagatataagtttaagaagtcaaagtcatcccaagctgcatgccttaactagttccctaatactaatctcctaccatgcacttggcaaatggggaatgatcagaaaaaagttattgctacaaaacattcaagctcccatttccaatttggccatgttgttcgtttgatattcttcattataggtatatcaattggaatctcattcagtgtttacttcaaaagctttgttttcttattgaggaccggtttactaaattcattaccacaaccacctatattgccacaacaactttcagaaagaccagagcagtcctcaaatcaaccgacgctgccgctgcgctcgcctgtcgacggcgatgttgaatacaatgttaagccaaaaatcttgcataacatggaggacaatgagttgttctcccgtgctacattggttccaaggactctgccaaaaattgctttcatgttcttgacaaaaggacccatacctttagggcccctttgggaaaccttcttcaaaggacatgaagacctatataatatttatattcatcgacatccttctttcattgattcaactcctgaaaactctgttttctacggaagaatgatccctagccaggtaataacttgacttggtatctccatgcatgcaatttccttcatatatatatatatatatatatatatatatatatactacacacatacaaaaatatatgtacatgcataaatcataaatgtacacacaaatgttcttatccacacatgcacacacatataataaaaataatataaatcgattgtacggttttcgtgcttttcatatttaccaaataactaggttgtactatatattgtcgcgttcaacaaaaattaaatcattgggttggttttgtacgtaccactactcttttttttctctctctcaacactcgaactagtgaccttaaggcaagttttattacaacctaccatgaaaaagaaagaaagacatatgtttaggaactagcaaggacgatatctatatagtagagaatatcagttgataaatctaactatagatactgtatatagtacaaaaacaaatatatatatatgcttaatttccaaaatatagtatgatttttcgaacattaatttctctaactactgtagttaacaagtgtataaattttttattatagttttggcggctaacttccgtaaacatactcatgcgtgcataccttaattcattcaaaaaaaaaaaaaacagtcaaacaaaatcctagaacaaattaatgggcttatatgtataagattcataatttttgaagtgtggggtgaaaatgaaagatgtctcttggtcgtagaaatgttcattttagtattataatgctataatctatttcgtaaggcttattaggaatagtgtcctttgggatcaaaaacttccaatcactaaagtcactgtcaaaaaaaatattataaatacagttagtatgaatgagcttgaacaaattcaatagggtagacaaatattgggtggaggctcttttaagagcttgtaataagttttcggattcttgttttgagtagtaactgagtttggagtgaatacaatatattacagatttaacaaaaaaaaataaaaaataaataaataaataaaacatacaagtaagaaattaaaatggaataacataataagttttttattacgtctatattaattgcagcccgtagaatggggaaaatcatcaatgctggacgcagaaagaaggcttttagcaaatgccctcttggataccacaaacgacagatttgttttattatctgagagttgtattcctttattcaacttcactaaaatttacagctacctcataaattctaagaaaagcttcacaggctccttcgacgatcccagcaaagtaggccgtggccgctacaaccccaagatgtctcctgaaatttcattatccgattggcgaaaaggatcacaatggttcgaggttaatcggaagcttgccgttgatattgtctccgatacaaaatactatcccatattccaggaacattgtaatattccgtgttacatggacgaacattatatttcgacgttgataaacattattagaccagaagaaaattctaacagaagtgttacttgggttgattggtccaaggttggtccacacccaggaagatttaccaggaatgatgtcacagctgagtttctcaacaagataaggtttggaaataactgcacttacaatggtgaaaaaaccaatgagtgctttttatttgctaggaagttcgtccccaacactttgccacctttgttgcaatttatacccttactgtttaatacttcaataccagtttaatatttttgttatgtgattactttttgttctttttaactgattccttgttttacccaacaagtttgcaataacattaattgttgtgatttgtacttttatttctatttgctaattatatacaagttagattt

SEQ ID NO: 23427 - DNA, 1595 bp, Cannabis sativa
agaagtcaaggtgtcgcacgggtgttccgctgcctgaaatggtgagcccgtgacacctgacattgttattagacctcttcccgttcgaatttgagctgccgagatactgtggactctgagttgatgttcctactgaagtggtaagttgttggctcttcttttttctgacagtatccacacgacgaacaacttcctcgagcttgataaaccaatttgcctgatctaaaaattgcgccatggaccctacagtcagcctcttaatatctttccactactctccaagtggttcaatgcccccaatatagcacccatccttccttcttcggttaaccccttaaccttggtagcctctgtcataaatctacttatataagctttaaggggttctcctggcatctgttttacctcgaccaggtcttctagatgcgaggggagttgaggggaggaggaaaactgcacgtggaattctgaggagaaagcattccacgaattaaaccttcttggaggcaacttgaagtaccactgctaggcggcttctgtaagtgtagtagggaaaatattctacatctgacatcacctcgtacccctgcaattccatttgcatctcaaagtatttaagatgggataagggatcctccttccccgtatacatcttttaggttggcatcttgaattttggggtacctcaaggacttcaatctctggggagaagggtgatccacgtgctcggtccagctcgagatcagtgagtttttggctggtcaagccttgtaccatgtttttcagttgatccaattatgcttgcacaaatggaagaactggttcaacctgctgaccgacctgtgtcatgttaggatctctttgagctagatcctggatgtggatgcctggctggacagtcggtggggcgtactattcgactaggccccttcttctactcaagttagtcctaaggtcatgtgcagcacccaaccttttaaatactgaggtaccaggttgtctcggcgtttgacttgtttggccggtaggttggctagagatttcaattgggatgaagttgttaggtgtaactccactaaaagggcggtcaggaaggatctggccatctaccgtttggcacaaaggttggacctgtggctgtggattagagggctaaccattgtgagtttgggcggtatgcccaataacatactcttctacactgcccagagggatactagacgcagtagctggatattgattggcgacttagtaggccctccttatgagtatggtggcctgccttgtacgatcatcaatggttgcttgctgagcccttaaagtttccatctcttgatccctctattctataaactaacatttctgctcgtcaaatgcaaggtttatagcagcataaagatcctcctgatcatggcgcaaagcgttattatgaccttgtttgagtccaagggctatgtgaaggttttggatctcagtattatctctgactgtcctctgagcattagtggtgtacgggatcgcagtgttgggagtggattgatctgctactgatctggtgttcccagtctcttgcacgcctggtgtgatcccagcca

SEQ ID NO: 23428 - DNA, 3285 bp, Cannabis sativa
cttttaccctgtctggctttttttgggatcattcaccttgctcggcaagtggtcaacctgtctaggttcttctaaagacttgtcttttcaagaagatcacctatgaggcaatcttgtatggtgtgttggtcttttctcacctggctgacatgttaataatccagtcaggcgctctctagaagtaatgagtatttcatcaataccagccctatgtgggttctatccagcatgtacctgcttggaagtcccacgtcatgccaaatgtgatctggattaagccacgtaacagtgccatgccaggtgggcaaaaattggaataaaattttctccccaagtcctcgtgcaaacacttatccagatatggagttaatattttctcggagagtgccacatgtttgagtcccacgtgggtattttggcaaaatatccctataggggtgaacagtcaccctttagtcttctcaactatcccttagatgtcagtgtcataatgataactttgctgggtttttgtgcgcaaacaagaactcaatttcaatgtaatcttaattctattatttattaataaaagataagatttattgacctcagaaattggccaaacgacaatggagtcgtattaaatttattcttgccatgtgttacacatttgtaactagataataaaagaacaaaaggatttttatagaggttcgaccctcttagttagtgggtaatgacttatttcccttttagttgtattgatatcgagagataatactatttagatcactataggtgggatttgatatagctctcttcagattacaatgtgtgaattagtaggcagatctctaatgagagaaagatatgtccttagaggcgtgagagagagagaagtaaagagccctttgggcgtgtagtagagagagaagaggattagggtttcagacttagagctttatggcttaaatgagacttagcctattagggttaagttaaggctctttacataggagagcttaaacactatttgaaaataaaataagagatattacatattaaattaataaatacaaatgaccaaattgccccttgaaagtagatatttttgtagcatcttagtgcactgtcaaggcccaacttgtagcttggcttgctgtccacggatgaaggctgcacatccatatcctgcaaaggaaaatttggccatccatacaatgtctgtaggttgaggtctagtcagccatgctcctaccaggatctggcaggtctcgttccttctagggcctgacaggttatgttcctaccatacttgtcaagagttggctaggtctttacatgtgttggctagcctaggtgatggtcagcctttgtcccttggaggtggaggccatcctttagaggtggaggcaagattttagaggtggagggcagcctttagaggtagaggccagcctttagagatggaggccaacctttggcgatggaggccagccgttagagatggttagagatgggggctagcatttggagatggaagttagcctttaaaggtggaggccagcctttggagatggacgtcagcctttggacactttttccttgcagagatcaggctcccttggttgaatggaagttttcgtggtctgaaagtcaccttttggccaaccagattatgtttaaaccataggcagccatacaagctcacctgaccagcatatagattctccttggccagccaaacatgttggtacagatacttgatggcttgcttaactcctctctcttgttgcttgacgattttgccataccatgcaaagaggctttgctccactattagaaaggttgtattgcacatgtactctatcttggcttacttggacatgccacattaggtggacaaagtttacgataacattttccccctaactctctgttcaaacatttggtcggatagggactttctagctctcgtcttatttgttgcagtctctattgagtagccttgtctagtcaagttatgaccgtagaagagagaaagccttaatagccatgtgttggagaaccagtcataacttttagcgaagtagacttttgccacgtcatttatttgcacagtgacactttgatcgtcgaagtacaaaatgcaaatataatggtggctcggataatggtcgataattgagcttcctcaaatatgttgttcaaaacaatatatgaaaaattggtgctttaacttaaagattttgttccttgcactcagctagtgtacagattcttcagccaaagtatagcactactcggacagattctcttaccactcacactaggacaagtgcccacaagcacattagtaatggcacagttcttagtgatcaaaattccttcaacttttaatgtcatgttgggctgaccaacctatatgacataagagccatcacattagtctttcacctctgtgttaaatttcaaacaaagagtggagtgggctatttaaaaggaaatcagagaactgcacaagaatgctacaacctttctctatttcaggccaagaaagaagatagttcttgccatagtttaaaaaatggaaaaagcatcgcctaataggaatttgtccaaggcggggatgaagatatggatccccgacttggggaaacaaacacaaatgttgggccagtggaagaactagaagaggtggagattgatccaatcatgtcgaccaggaagctcaaaatttgcaaaggtttgttatttaaaataaaattatcttcaataatatttctaagagcaaaccttgacatttttgcttggtcacatgaggatatggtcgagattggtcaaactatcatgtctcatgctctaaacattgatccaaactttcatcccatctagtagaaaaggatattgctagaaaagaacgtgcacaatcactgaaagaagaggtagaaagtctctgtataaacaagttcattattgaagctttctacccagcctgggtggctaatcttgtactagtgcccaaggcaaacaataaatgatgagtatgtattgacttcaccgacctcaataaggcatgtccaaaagactactttccacttccaagaatcgatcaacttatggatttaacaactgggcatgatatcctaagcttcatggatgcctattctgggtacaataaaataggaatgctccacgtaattaagaacacactagctttcaaacagatattggtctatattgttacaaagtcatgccatttggtctcaataatgttggagatacctacaaaaggttagtcaacaa

SEQ ID NO: 23429 - DNA, 1907 bp, Cannabis sativa
  modified_base (1848)..(1875): a, c, t, g, unknown or other
aaaaaaaaatataaaaacttattatagttcttttctctcttatattttcttacgattcacaacaaactattgcctagaatttctcctaaaatacatgccagttaggagcaagtcatgtggaaatgggacccacattacaaggcacgacacattaattacttttagagtctattatttcaaaggagtaataatagattagtcatctctgtgaggggctagctagacaacgagtatctcttgtcatttcctctctgtgagtgaagtctactcgggaagggtaccggaggactggtgaaatataacatgttgctcgatgattaaaacattgtatacgtatttaatgcgatataagaaagagcatctgacatcttacgctaacatacatgtttaagggtttaaaccatcatttcctaattttatgagaccccatacatcaatcgacgactgtataaataagttttcaagtcataaataagggataagtcaaatcccaccaaacacatatcacaaagcccaaaattcatcataaaagtaagcaatcacgtcctcaaatcagattcagaaaactgggcaaactgtggtgcaaacaaacactacaatggtggcttattatcaccattatgagcctataaatacctccaatgatgtaaagaaaaaggggatcgataggaaaactctctataataaatacctcataaatacagtcactcgtggactaaagatcattaatgccccaccacgtaaaaatcttctattctaacattcattaattacttcacgtagctttaattatttgttgtcgaaagcctaggtcaaaaattttgtgctttcataaagagctgtaggaagcttaccaaaagaggaagtcgtaaataacctcgtggtataatggtaacgacaataaaaacttcatgcccacaatagccagatgacccagagggtccagaagaggaagaagaattttctagagtggggggatgaaggagaaggagatagcaatgatttagaatatttaaaccaagaagaatatgaagactacgatgaagacaactatacagagttagttgagctaaggaaaaaggatggtgaccatgaggctgagttggcagaatagaaggaacaaaacaagagaatgcaagagatattgatttccatgaaaaggttaattaaaaatacgagcatccaagtggattcaactgcggtcccatcagtgtaggagaggactgaggaagagctttctcagcttgaggaaggccaaaaatagaagaataaggaacctagtcccatgagctatcctttagaaaggcctggcccggaggtaaaggtccacagggccgggtagatttcccaaattctgtcaacctgggcgttggatcctagtttaggccctccaaaaactctggctggaccccaaaaatagtcgattctcaatattttctataaacaaagaagatgctcagaagtattctctaaaaactccaactaaaatggccgaggttgagaaaatttcaaccttggcactatttttctcacctagaaattgttgttttttctctgaaaggacctattttcccattttagatgaagagaaaaattcaaatctccaatcggatacttggagggtgccaagattgtcagattatcaacctgagtgttgggtgctcggggccctaggtgctcaaaaatgaacttactctgattctgatgcctcaaatatgtcagtggtatgtgtagttgatgtaacaatgcaagttttgaacattttgacttaaggcagtcccaaaaaccaaaactctattgaggatgtcaacctaggcgccgagtgaaaactgttgggttttgtgcccnnnnnnnnnnnnnnnnnnnnnnnnnnnnatttactaattaataaagatcggaaataacat

SEQ ID NO: 23430 - DNA, 3248 bp, Cannabis sativa
agcaaagtacgacacgaattcgagtacgacacaaaaatactaggtttacaatttaaaaatgttagcacaacacgatacaacccatatttttttgtggcacgacacaacacgactcgttttttaaaaaatacaaataaatataagttgagccaatacagcacgcatgaacttataatactagtgacaagtccccaatataggaccccatgcaacatctccttcattcatgccacaagcacctttgtgtgagatccccgtctcataaaggctagagtacttgaagctttaaaaggcactccataaggcttaaaataccgaaaacttgctcatatgaagggacccattaggaagatagatacttagtagtatccaaagcatgctataatagcacaaaatgaaccaacgcgtcaatgcaaagacgatcatgacccctgcaaaggctgagagagaggtacgaggggttacccctaagaattcaggtaaagtttagttttcatgtaatattttttaaaaaaatttaggaatattaaaaaggaaaatttacatcaaaaatataaaaactcaacaatattacatcaataccttcacacggcccctactattttttttactttttatagtgttttatttacacaaataccacttacacactccactagcatgcatgatgttatttgacaagttttacactcaatttatttttcctccctttttatcatcattttatttttatttttagtttcttttttattttttattttttattttcattttttgtttgaaaatttctcccacgatcaaaaatctcttttcatccaaaaaagctgatatcattcattgtctttaattttcttcctctatcaactgccaacattttttcttctttttttcttcttcaatttgttttataaatgaccattactcgatcttcatcttttcccatcaccattgctgaaaaaaccttcaaaaataattgttaaatttctcaccaacaaatctaaaggcaaacgacccattgttgaagatgatgattcacattttactctgcctacaaataaacatgatcatcgtcctattaagaagaaatcaaagagtaatgttgctgaaaatatttccctccctgaaattaagaaaaggaagaatcaagctgatgagagtttgaagggttttttctagtttctttatcattttgtcctaacttgcaattttacttttattttgggttgtgcatattcttttaattttattctagtatttagattgtttagttgttttaatgtttgtgtagtgttatttttgtttagtgttattttatcatttgtgcaactgttgaattctcagctttctcgccaacttgacaccaaaagtattatgaacttgtaatgaaagttataaatatattagatttgacatacaacttaaacaaaaccgttatgcaactcttaaaaaactaatatagtaggaattttaatagcaatatattttgaacatgacatacaactgtctagcaattgttatgtaactttaaaaaaaccattgcagtatagaaaattaataccaatctatcaaattagctttttcatgttgtgagagttctcatagaaatttaaagaattcaaataaatgtcctctctctatttgatcagttgcagttatatgttttcttagttgcattccactgcttgttttaagttgtgtaccagttcatcatatttgcagttcattgagatgaattggccactgacttcgtaatttacataattcattgagaaatagaattgcgtcctgtacatgagaatttgaaaattcatttattggatgtcaactatgaaaaaacttaaatacagctataatgcaacaattatatacgttatgcaaacttaccacaattgagttttccttgtttgagtcgtgtatttcaaattttgagcactgtttatttatataatagtattttattagcacactattagacaactgctatacaaataatttttttactgtttttttttctatctttttgcactgattaacaatcagttgttcgtcaatattatttttttgtggataaataactgttagaatactgtaaaccaacgttaaataaaccaatcaaaaatatttaaaaaactgaccatgttatatattgtattttaggagagtgttggctttaattatcgtgtgtgaataaaatagaaagccaacaataatgcaactttaaaaaaaaaaaaacaaaaatttaaatcaatatttccagatttgttgcgctagatgaatgtgaattttttgttattgtcattattagaattgaataattacaggattaaaaatctggaaaacaactttaatgcaacaattataatatgatcaaatgtattaatatgtgtatttcagattatactttttttttggcttggtcgggaaccctagtatattgttcgttcatatctgtattttttttgaatctgtaattcgaatataggagaattagtttgtggaatccgaatcgtaattgatggtgaatagaatttgtgttttcaaactagtttatatgcagtttttttaccaatcgttaatgattgattttctgattaattccttcttcttctcaggtcacgttaccggaattaatagtggatcattggctggttgggttgatttgctattgccgccgtttgatcgcacgatggctttgaggatgagaagcgtggttcgtgtgtttgtgctgtttgaaattgtgtgtaagaggtattcttgtaatttgttttatatgggttgtataattgttataatgaccaacccaatgtattttcataatttttttttatcctttttgattataatagagaaaagccctattaaaaataagtattaaattaaaaactcaaatccattcaatcactacaaaaaatcttactaaaagtaaaaaattgtgactaattataaattatcaaatctacgctatgactaaaaaattcgtgactaaattatcaatacttgttgtgacaaaaagttatcactaaagataattttttttgtagtgaattggattttgaatcttaattagattaaattagataatgagtttcaaattgaattaattagaattagattaaaataaaaggttaaattggatactaaaaacaaataattttgttttctttttaaatataggtcaagggagatagtctaacgttatactacttataaccaaaatggttccaacccttccccacgcgcaccattcc

SEQ ID NO: 23431 - DNA, 5418 bp, Cannabis sativa
  modified_base (26)..(41): a, c, t, g, unknown or other
aggatgttaataaaacatacttggtnnnnnnnnnnnnnnnnggtaaaatatttccaacaggtagatgctacccgatttattaactagtcgcccttggagatgatctctgattagatcctagcctcttccagtagttcttttattgaatcgccttattatgtcactagcttctctattacggtggtctagctctacctggtgagatcggaggatgtattcttcgcatctctgttgtgcaaatacattgcaaccagcagcatgtggttcttcagtttggccaacttgacagacgacttctctaagtctagctaactcgagatcttctcccaaatttacatggggatcgtcaatggctggcttggtctctccagcataatactgggggatcagatccagttgtggtgcctgagggttgctccatgtgggtccttccttcagtgggaggcgcttatggagggtcctccctcggaggcatgggtcgagtgttcaggcccacaggaatggttgtgtcgacttggccagctgtggtggccagatttgtggtgcctaccaaggtagtaggagtggccatatctatcgagttcgtggagattccaatcatggttggaacacgaacattaggatcagtcgccataggatcttgaggaagacccgaggaggcagatgtcgtagctggagttctccttgtgttaacaatgacattgatcaaataaattaataactcgctttcaatgaaagcaccaaactgttgacctcagatttggccaaccgacaatggagtcaaatttaatattgatgcttgccacgtgttacacaactaaaacaaaaaagtaaatagacacaggattttatagaggtttgacccccttagttagagagtaacgacctactctccttttagttgtaatgataccagagataatactacttagatcactatagtaatgagatctaaagtggctcttttaagattataatgtgataatcagagttggaaaatctcaagtgagaatagagcaataggtgtgtgagagagaggaatgagataagttatcagacttagagcttaaggcttagggttttagacttaggattttagggcttgactaatgctctttatataagagagcttacattcttaatatcccttaaaataggtaaataaagctattatttacataataaattaataaaatacaaatgactaacttgcccctcaaaaatagggaagttgctgatattttccctctattttggtgggttgttaaggcccaattcgtggtttgacttgcagtccgcggatgaaagctacgcaccaaaatcttgttaggacaaaggttggtcagccatgcacttgcagagtgcatgctggccgaccatatggtgtccaaaagttggtcggcctatgctagccatagggtcggccaggggtagctgaccaccccccttaaggtggttggttcatcacttcgttgtccctcctaaggacttggacccatcgatgattgaagcattgaatagatggcttggccttcttgttggggagttatactcccacgtggcattgatactggccacgtggacatgccatgtcaggtgggaaaaaatcgagataataattattattatttaatagatagaattgacatttatagagttagaattaaaagatggcatttgtgaaaagaaaaataagtttcaataaaatggtaaaattaaaatccactaggcccatatagggttcgactaaggtagattaaataaagtaaattttatctttttttaatctattttaattcaaaacgtaaccctaaaagctaccttataaatagaatatgttggctcttctttttataaccctaaccctaattttgactctctttatcagacaaaatagaaaataaacaaagcactcttcatattcgaattcttctacttttcttcttgaaaattctgaaaccctatagtgaatgagtaattgccacacaattcaaggcaatactcaagatagtgtagaagattatgtagtttttatgaactgaaggagaatttaggtttagatcttgatcatactctgcaacataaaggatcaagggttagagatctgaacagaaggagtcataattattctgctatcatcaatgtaaggttttctacaatttttatgtgtttatttcattattttaaaaaattcatatttaaaatattagattacagaattataatcaacatacatgttagtaaatttagatcctagtaaaataatttctaacatattttagttaaataataatatatcagtgataatttgtaagatgttaagtattgagcttgatagcccaagacaagatggctatttatcttaaatttgagtaatgttatacattttgaataatgtgataaccaacaatgcttctatttagaatatccacacaaaaaaatttgagtaatttatgacataaatacctaagtttaacttccagttgcaaataaatacttaagtttaatttttggcggtaataatacctaagctatatttctggaactctgtaggaacctaaccgttaaatattaagccattaaatccacgtgtcattttcttattggtatatttgaactaattttttttaaataataaaaatttaataacttggaccaatcagggattgccacgtggcaatttacttaaccaggtacttacagaagttctaaaattataacttaggtattattaccgccaaaaattacacttaggtatttatttacaactggaaattaaacttaggtatttataccacaaattactcaaaaaaatttaaacaaaacttaataaaataataaagctatttagaatttttgccttcaaactatgacatatgtattattgtgcccctgaatttttttagccagttataaattatccctagactattcacagtactgtaaattgatcattttatcaagttttgtcacacgtggcaaataaaatgatgacatgactacttagtaaattgtcacatcaacaccacgtgtatataatttaacattaaaaaaaataaaattatgcatttttaaaaaaattattaaactgagaatcaaataataagtaagaaaattatgtaaaactaaattaaaaaagttaaattattttttttcaaattaattgtacatgtggcattgatatggcactggcgtgacaacttgctaagtagtccttgttacacccaaaattcgacttgcactttagaggaggacacgtgttaaccttggagaatatgaatcaacgaatataatgtcaattatattaaaggatattaaaatggaataactcattaaatgcggaatttatagagtatacctataactcgttgactgtaaagtcttaagcgagacacggatgtacaatctattaattcacatattgacgagaaaccattttgtatctgaagatacaatcatgagaatgacgtcaatgatacatagcgaggcatcaacctcgctgcatataaaaaggtgtcgacgagacatgttgactgttagaacacttatcgtataatatgcgttataccaactaagtataatagttgtatgaatctggacaacgaatagcgaggcatccatctcgctataggaaggcatacttatggtaccttcactaatcagctccaaatatctttcagtgagatccacagctctgacgagtcagcactctcagatagaagctggcattcaaatgatgttgactgttgaagttcaccttgtcaccaagaactgcgattgtcagatggagcgttatgccttcaatcgcaaaaacgacaagattcacattattaacctcagaaagacatgggaaaagctcctgctcgctgtcagggttattgatctcagcgagatgaccgagcaagatacactttgcaacgtatctaaatccacatcagcattgacccagtaaaagcggataaatcacaaatgtgtgattttcaaataataaccgcatttattttacgtgggacgtaatcaaatcccataatttcagggaaatattgttgtgggatatgaatttaattgtaattaactgtcttcctatgtaactataaataggggcagagtgtactgaaaaagggacagaaatccttgagagaaagaaccctagttttatatcaaagaaatctaataagatagacttgtgaactatgcagaattttaactgcaaaactacgtaaaaaaaaacttagtttgatttttgcattattcttcttatttttattatttctgtacaaattaatcacaaaataggctttattatcgttaacgaaaatctgcgttaacagtcctgtcattattttatttgtcacgtgtgataaaacttgacagaaggactaatttataacactgtaaataggtcaaggatcattttagactaaaaagttcaaggaacacaataatatataaattataatttgagagcaaaactcctcaccaaataataattacatgacatattatttatgataaaatattttcatgatatatcattttcctttaaattttatttagtggttcacttttgtatgaaatttaatgctgaaggggtgactatatatcactttcaggtgtgtcaataaatctctgtatcatgttatacaactaaatcaatctcatcaatgcttcacaatttgaatatcttatagttgctgttgccaatcttgatttcgagattgaaaactataatttatatttctttaaattttagatttattatttaactaggtaatataattgcgactattattttaattttattagtataatataataaaaaattaaaatttattgcataataaataataacaacttaaaaaaatatttttcaatgtataataatattaaaaatttgaaattacacatattattattattattattattattattattagagtattcgatgtttttttctttttttttttgagatgaaaatgccaattatattaaattaatcatccataatacaataagcatttaacgggggagggatttcctccaactaaaaacaaacagagtccaccgaaagagcatacttcgctaacaaatgagcagccgtattcgcagatctataagcatgagaaatctgcactcctgggaaattggacactagatgtgtaatgtctgataacagacaatggaaatcagaaacagtagcagtagatgcgtgtaaacctttaaccactaaaagagagtctatttctaagatgtgagcagtcaattgattatctatcagccattttaaagcatttagtagagccaaagcttccattatttcaggccaaaaaaacccggaattgactttgaaaaagcagccacaatatctccattagagtcccttaacacagctccacaaccagtacgttggttaga

SEQ ID NO: 23432 - DNA, 4160 bp, Cannabis sativa
  modified_base (523)..(526): a, c, t, g, unknown or other
  modified_base (3634)..(3634): a, c, t, g, unknown or other
  modified_base (3777)..(3777): a, c, t, g, unknown or other
tagactttttttactaaaattagaaaaaaatccttaaatccaacaatctaaatagtttagggggcattttcaatgatcttaaaagttcagggggcaaaaatccatatttacctaaattaattttaagttttctcttattagttgttactagataaatttcttaaactaattatgtaacgcttaagtgacaatgattcagttgtataacactttattagatacataagataaaatttaacaaaagtattatatttcagtattgttgataattcaggcaatttataacagacagaataataatataatttggagtaataataatttaacggcaaaaattttaaataatttttttttcgctattctgaatcgtaatatctgaacttttattcttcacaaaaaattaaccctatatttaaaataaattataaagtaacaaatataaaataaactaaaacaaaagagtaaaagaaatactttagttgattggttaattattagggggaattaccccatatactatttnnnnttaacttttttttttcaaatttaccgtttgggtttctaaagtggttgtagcgctagttgcaataagggttcctatgtagaatttcgtaaaattaaaaaaaaaaaactgttttgaagtgtaaaaatgaaaataaccctaattattattatattttctaaaaaaaagtattattgaaagcctaataaagaagaacactaaaacaataatagtagtttggaagcattaacttcatgatataattttggtaattagataattatttaagtgtactaatattctaaatatatatatgtttaagtgttatttataattataattatttgaatttatattttttgtaaaatatatatcttttatttattgtattttcttttaaaaaaattctcacttattatattcttaaaaagtctacatataaaatcaaaataaaatatattttaaacattagttaaaaaaattaaaatgaaaaattatataaaattttattaaaaaaaattatacatgatgtcaaagaaaaaaaataaaaataaaattaaaataattatggacaagaaaaaaaaaataatttatatattaatatttattttttaaattcatataagtttattttttttaatattgatgtgtacacagtgcaaatcaaaatttctatataactaattaaataaacctatgggtaaacccacttccattgtgacaccacttccatgaaatatcataaacaatcgttaactaactataaaaacctatatttattttgagtacaacttttgttgcaaatatgtaaatataagagtgcctacatcgaatcgaatgaattagatcatataaattagatcaaatctcacttaatattattagaaatttggagataagttgaatgaggtttcatctcaaaaccaattggtaatgagagaagtagctcattcatcttataaattataatttatttttacatattaacaatggaaactaactctaataaatattgttcgaaagaacatctggtcccaacacattagtggctagtaataatcatcaaaaaagccgcttaacaatctattgtttttaaccaagcaaacctcataacctgtacacttttttttttcaaggttggggagttgaagaaattagttgaagagggtaaggtgaagtacattggtttgtcagaggcctcagcttcaaccataagaagagctcatgcagttcatccaatttcagccatccagctggagtggtccttgtggaatagagatgttgaggatgaaattattcctgtctgtaggtgagtctcattaaccaaccttataattattcatttaaatacatatttttatgtgttattacatgagaacatatatgtaatgtttttctttttaaagaaaagcattcatagattaaatggaaaagaggatatatccactataccataccgtttgtgggtaaaaatctactttgccacattagccacaaaattacaagttatgtggtattgatctaataatattgtttttgttttttgtcagggaactaggcattggtattgttgcatacagtccgctaggcatgggattcttatcatctggctctaaacttctagatactttatccaatgatgacattcggaaggtaggtatcattgattatgtggtatcattacataataaatatgttttaggaaaaatataaaaaataaaattaagtttccttttggtttgataaacataataagtttaaaaatttgtacgagtaattatcattctcacaaaaaggccgccaatgaaggggaaaccaagctgataataacacaaaaattttatacaaaatacccaaagttgtttatatatatatatattttatggatttttcttttcacacttttgttttacttaaatttgtttttcaagagaaaataattatgactttcaaaggataatgtagcacgtatgttgtctaattgatacaactacttcaactttgatatactaataataaaatatatatgtgcaatgtgtgtatacttattgcagacccatcttccaaaattacaacccgaaaacattttacataatcaaaagatatttgatcgagtgaatgaaattgcgacaagaaaaggatgcagtccatcaaagttagcattggcatgggtccaccaccaaggaaatgatgtgagtcccatcccaggaaccacaaagatagaaaatttcaatcaaaatattgaagccctgtcactgaaacttacaccagaagaattggttgagcttgattcaattgcttccgcacatgctgtcaaaggtgatacatatgataagtctgcaagtacttggaggaactctgaaactccaccattatcatcatggaagttggagtgaatatacatgcatgcaatgcacatgcctaatataataaaaagctagctatagctactgctatttccctcgtgtaccttgccattatttttcaacctttaccatatatatgcatgttgaactagtgttcttgattggtatgcaagtagttttttgtcaagtgagtttcaatctagttattattaagcttttagggtgtgttgcatacagtataagagggttgtattgtactaaatatgtaaaataccattttctttttctatttttttatctcattttttttttctagctttcatcattattttttttttggtgtatgtaatttcattgcatatatatgttttcctctactattaattttctgtattaataattgagtgtaacaaaatttgttctcatcaaaatggggctgttgaatatgtgttaataaattaatgatctatgtagagatactttaaggagaagaatgttgtttcgactccaagtaaaagattatatgggtaatagaagaaattatatggaaacatacagtcatacatgcgcaaaaaatcaaaattatatgtatctaatttatccatagcaattatcttagtgcaatactatcaaataagttttatccctaaatctctaaatcagaactaattttatttatctaattatccttagtgcaatattaataaatacacatctacatgtttgtatattatctatctttatattttatattatgtgtttgtanttttgtagtatattagtatcatttttataatttttttagtatattagtatcatttttgtagtatattgtatttttgtagagaaagggctaaactttgcataaaattttttgaaaactttgaacattaataatttttgatccgnttgtccgtttgaggcgatttttttttttgaacttgagtatttttttcgcgttctacgcaacccaaaccgcctggcccaccaatttttcaaaaaaatattgttttgtatacaaaattcatgttatgcgcccatttcacctaattttttgtattttattttactattttacttaaaataaactaatagaattcttattttaagtattagaatcaatgtttataatgtatttgttaattctaccacaataaaattgcaatactaatttccttttatatttcttctaatatttaaacaaaatttatagtagcaagtttatacaaacattgtgtttttgtatattggtaaagacttattaatttatccttttggtcacaagttcaaat

SEQ ID NO: 23433 - DNA, 3869 bp, Cannabis sativa
  modified_base (27)..(68): a, c, t, g, unknown or other
  modified_base (3490)..(3491): a, c, t, g, unknown or other
  modified_base (3828)..(3843): a, c, t, g, unknown or other
aacataaaatgttatttttgatctttnnnnnnnnnnnnnnnnnnnnnnnnnnnnnnnnnnnnnnnnnngggcacaaaacccaacagataccccattaattgcagggtgtcagactgaggctcaaccaacgtaatcgtttgttcatactcacgcttccgaaacctttccctagccatcaaattatggggtttgtgtgaattaaattaagaccgtaggatgggggacgatccaaatcgcttcatgggtctataagtgtctttcatatccctctttttcaaactttcactttcacgcattcccttagaattcttaaccagcaaagatttcaggcacaccagatttcatccaactttgtctccgatggtgtcaagcatagctttaccgtcaccacatactagtacctccaactactcagacttctcccatttgtaagttgtttaccatagatattttttcattttattttctctgctgatattttttgtataaatgtgatattcatgtcgcatgatcgtcatttgagggttttctccgaccaccctccgtttatctcttccttgaatgtggctaccctgtctaagggttataaatcatgcaattttccctcttctcttcgcctcttgtaccatttctttttctgtatggtgcaattagcacccgatgcttggcataggaaattttttgatttctagatatgtcagaatctggaggggacctcttctcagcagttaggggacccccattcccttttgatctaaggtttgacgtgggggctaattgctgagtatattcttatttttcatatgaacaaatttttaagagatgtacacgcgcacgaattctacgtgtttgaccgagaaattctggaactacattttgaaaagaagatgtcaaatctcggagtccctccaaatattctggctcaggaagtggcctcactccctcctgttgtccttctgtgagtcagtgtttggtaaattcagtacacaagtatacataatcgaatcacgtaatataatgataaatagagtatcgttcccacgaggattgattatcaattacgaatgaattaattctttagttctatttgatgaataaaaattattagagaaaaaattaaataaattaaggcaataattaaaatttagaaaaataacaatgataaagataaagagtattatgatccccagctatcctttattttacttcctaatgcaataacctaaatttctcttcttccaattcaattgacagtttagttaaatagttactcaatctaggtgaaaactctctatattcctatggtaaagtttgatcacaaagatagcattaagcaaatcaactaatacaagcaacctaggtactttcatcctaaatcagtttgcatctataacaatcaaagcatattcaaatctcaccttctaaaattttaattcgaattcataaataaccattatagatggccaataaataattgtaaaattaaaatagattatatgaaattatattaaaagaagaagaagaaattgaacaatctcattaatccataaaataaattcaagtggttcacataataatccttaaagaaaattagctattaaataagaaaatacaaattcaatcaaaaatataaaagataaagatagaggagatagtacactttttggagtcctccaatggtgccttctgctcctagccttccttctatgctcagaatttttctaaattttgaatagtattagatctaagctcttagcccctttaaatacacaattaagaaggtttcccaaaatcctccaaagcctaaaattggtctccaagtttgaatgataaaggaaacctagctccaactcgttttatagacaaaatttgggaagtttcccattttttttttgcaagagtcgtgactctcttgtttttttttattttcttttgtgacgaccgatagtatttggccataactctctcgatataactcggaattgaacgattcaagatgttttgaaaagttgaaagatatatctagaactttcattctttttttttttcctataaatgagtggatcgtgtaaaaaattagcttcaagattcagaatttattttcaatgacaaacggagcgtgttgaacatccaaaacttagaaattttcaatgtattggaaagtaatcacttttgactccagaccacgaattttagagataaaaatgcaaaatttgacaaaaattgagaccacaagaaatccaactaagcattattggagtttccttaatgccttataattttctatttttgtctcaaaaaggcttgaagaacactaaaattactaaaaatagagatatccaaacatttctcctgcaaaacaaataacaaaaaaaaaaaaaccaagcataaatcagaacaataaagttaaaaaaatactaaaacacacattaaaatgaactctaaaaatgcataaaaataaacctaacaaatttttcaaaacataacttttactcgcccttgtgtaaagaccgaattaaaataatgaaaaaaaacaaagaacacacaaagtaagccaccattactatctataatacattgctttttctctaaaattttaattgtaattttttaactagattttcagctcaacttcctcaaagctcaaccttaattgcaatttatatcttgtttatcttgtatgtttattaggttgattaattgggggttttaacttctgtaattgggtttgggttctttggagttcatgctgaatttatggttgttttcaagcttaagattttggcttggatgatcaagtttttggtatgagaaattacgttatgtttagctcaagttggagcttatttgtgattgatgatgttatgattttcaatgcatatatatgtgttgaaggagcttgatctttgtgttcataattctctattagtgataactagaatctgtggggaaataaacttgtgtttgtgcatgtttctgggcaagttttggtgtatgtttgagcttggtttcgtgttgcaaaaatgggattttcgggtttggaacccaggcaccgtggtccgcccctgtgaaatcatgggttttcaacccaggttccgtggcctgcttgggggagtgccgcggcccgccttgtggttctgggcagttttgaacgcgttgtttgaatgatcataacttttgtgattcgggactccaatttgggtgtttcgagtatcgttggaaagctcgttctgagctctatatgtttatctgaatttgaatgccaaatttgtaattatgtggaaatagatttaggaattaccctatttgtgaatcctaaaaattgtgactaggattaccggcacttggtcaggagtaccctggggatttggaatctccacatatacgagacatcaggtaagacaatagttagcacgtagagttaagcgcggtggcactcatgtcttatattatggttgtgattatttgagaaccaggattagggttattnncctaaagtgagcggttatatggtctagagttattaccttagtgattattgatttttaaatattatgccatgcttaatatatttatttaaagaattatgcattcaaggcataatttggttggactcggtaattagaactgagatgaactgttctagggccttattgtaaatagacgtgtgagcgtaatacgtgggtctatgccacatagacgtaaataggcgtgtgagtgtaacacccaggtcaaatgtcaaatagacaatatgtgaaatggcattattatatatgtgaaatgataattatggttattgatatttatacttgttggaaatattttacnnnnnnnnnnnnnnnntaccatgtatgtttcattaacatcct

SEQ ID NO: 23434 - DNA, 2453 bp, Cannabis sativa
ttaatttctaaaaatctcagtaaatagaactaaataaaatcaaataaataactaaacatataattttgaaaaaaaaaactaacatataaaatacaacaaattccaaaaatatatatatgatacgaaaaaatcacgtaaatatcacatactaaataaattaatattatataataaaaatcacaaataagatactccttctaattttttttttttggtaaaaattaaaaaagatattactccttttaaaaaaaattaaataaattatatacattacgtttaatacttactcaaactataatagtagtatcaaatcaattagaaaaataaagttctgatcaattaattacattaacttttttttttttttttgaatattaaatacactaaattttaaatgaatatattttttaaaaaagcaaattactgatatttatataaaattaataataaaatattaccgtttaaaaaaacaaaataaaaagatatcttttatttcaatttaaattattaatattaactattgagtttgatttcgattaaaattataataattacttctgtacatataagttgattttaacacacttggacttatataaagagttagaattacaagattttggagagaaaaacaaacgggttgactttgacttatctaatattttaacactcgattttttttcttctttcgaccttttattattattatttttttttattttttaactaatcagagagagtttgagttaattagaaaaaataaaaaaaaatggaaaagtttgatggtggtgaagtaaaggtagaagagagtatagacccaagtaacacccttagatgggttaggggtaaactaattggagaaggggtatttgcgtcagtttacatggctaaaatgatcaaaccacccacaatagggtcacgtatcaaagactaccatccaattatggccgttaaaacaacaaacacagattgtgcttcggagtacaatgaatcactcaatgataagaaaattcttgatcttctcatcgattgtccttacatcattcaatgttatggagacgacataacaattgacacaaatgttgacgatgatggcaatgttaataaagtaatattttataatatcttcttagaatatgcttcgggtggaactttgctcgagtttattgacaaatctccgctttataatgaatctaaacaagttaaatgttatgtacaatcaattttgaagggtgttgagtgtattcataataaaggtattgttcattgtgatctaaaaccagataatatattgttggtcaaagagaaggaagatgatgattactttgtagctaaaatttctgattttgggtcgtcgaagatggctaatgatgaaagaactccagttagaggtacttatgagtatcaggctcctgaatgtagaaatgataaaattcaagaacaatattcagatatttgggctgtgggtgttattgttctattcatgctaaccaaaaaatggaattggaaagataagttgagtaagtatatttctgaagacgctaaagattttttgctaaaatgttttgaaattgttccatcgaaaagaccatctgcaaaaatacttctgagtcatccatttgtaacaaatatttaaggaaattgatgatttttttatttttttaatgactagaagatgttatgagaattcaaataatatctataattgtaattaaatgtgctcatcaaatgagtaattaaataactaatgatgattagaaataataatatataattagaggaattattttacatactattttttttatttattttttaaaatttacagtttggattgtcccagtaatttttatgtggattattatgtagattttgattgcgatttaaattattttgatggttgctatataagttgctatgtaaatttccgtaaaaatatataaacaaaactactttacatgtaaaaatgataatgagattactaatatcactcctaatatatatctttatataattgagtagtagtattattatatattttattttaagttaatctatataaaactcttatactaaatatatttgatgttcatacaattaattctatattggatgttattccaaccacaatagatgctcagtctcgagaagcactttcagcaccttatacagcttctgatgttctcaatgcactaaactcaatgagtgatgataagagccctggaattgatggtatgtcagtcatgttcttcacaaattattggcacattgttggctctcttgttacaaaatcagttttagatgttctcaacaaagatgcggatcctactctcctcaacaaaacgatcattacactcattcctaaggttaaaaaacctcagctaattacacagtaccgtcctattagtctgtgtactgtcctctataaattgatttccaagtcaattgtgttg

SEQ ID NO: 23435 - DNA, 4528 bp, Cannabis sativa
  modified_base (302)..(302): a, c, t, g, unknown or other
agcttgaagatgaatctacatgtgatgcgtgagagaggtttaaggagcttttacgaaagtttccacatcatggcatcccacattgtatacagatgagaccttttataatggcctaaatacagcttctcgaatagtgttagatgcatcggccaatggtgttattttgtccaagtcttacaacgaagcatttgagattttagaaaccattgcaagtaacaactaccaatggtccaacacaagagctccaacaagtcgaaaagtggtgggggtcattgaagtagatgcaataacgactttgacanctcaaatggcttccatgacaaatgttttgaagaatatgagtatcgggaatcctaagaatattcagctagttgctgccattcaaagtgcgaatgtctcatgtgtgttttgtggagaaggacatgtattaaaaaaagatgaaaaaaaattcactttggggtgatcttgacaattgatggttatttaattgttaaaaatgactccggatgatgatcgtcaatttttgaatctcgaatcgcgtcctatagattgtttttaggtgatttgcgaacaaaatcacacttcaacttggaaacaattttttaactaaatattcagaattgagatatgagtgtgagacatgaaataacaaatattgaaaagatatttcaaatgcacttagaattgcatcaattggagtaataatgagtgagttatggttattttactgaaggttattcggcacccaatgcccagatttataatcctgtaattaagaagttgtctgatgtcaacttgggcagtagatgattggaaaatcgtgccaaaacactattctttgaagtctaagtgatatgttgacatcacttagccaatttcttggatctggtgaagtcgatcaccaattctcgaaggttttgtgtttttgtagaatcgagagactttgaattacccgatttgcaaatattttgtcaatatttaactttaccaaaaatgtgaaatatcaatgtgtgaatttaacttgttacaatttgtagctctcatttactaaaaaatagccagatgtttgaaatgtaactagaaccgaataggcacaacccaatgcaccagaccatacgtcaacttggacgttgggtgcctattcccaggtttcccatagctcattttggtacttctatggcatacaagattgtgaatgaggtctttagtcctattctggaccaagataagaagaattccagaacaaaatttatgtctgagcagcagaacccatgtgaaccaggttgaatgtcaacatgggtgttggttctttgttttggcccccaaatgatcctatttgcttctcgagaatacttatatcgttattattaatgaaaatagaaaaaattcgcaggagacttcccgggaaaaattcttggaagtagcctaggttgaccaaatgtcaacgtgggcactggaaccctagccctagttcatcatgggcactggatcttcaatctggccagcagatggttccatttgtttcttgaaagcacctgtatcttaattgttgatgaaaatatagaatattcctggaagacttcattagaattgttgttggaaatggccctcacaaaaaaaaaggtcaacttggccactagaatcctagcccaggtcaacctaggtgttgggcattctttctggcgtccatgttgatctgtttgttccccaaaagaacttttttcctcattttggatgaagaaaatgaaatctcccgagaaacatcttcagattcttcgttggaagcaccttatgctgacattatgtgaacttaggagtcgagtgcacaccagatcaacttgggcgatgggttccccggtgcctcaaataggaagtgttatgatttagattttagtgcctctagcatgattgtgacaggtcttattcatgtctaagttcaaagttcaatcttgttttcactaagacatgcttgaaaactaaaaccctagcttgggatttcaacctgggtgttgggtgaaaccttaggtgcttgagttgacatctaggatgcaaacggatatctttttgttcccaggctttgaacttggtgtcttcttgactttttggctcataatactgaaggatggtaacctggaaataacttggtgggacccaaatatccacttagtagctcccgaagttaacttgggcgcagggctagggacctttctccaaagttgagtcctaagacttggggcacttaactacatgactattttccttcttgctacatgtcaaacattgatgtccacattatcaaggtcagttttcgggtaaagagttttaatttcaattaaaattatatttacattaaataaaaatctcacaatttttttttaaaataataatgataaaaacgtttgactaacatatttgtagtgatggaaaaagttataaaaataaaacatattttttcagtgcagtttgatgcgccgacaaaactttcccgctaatatcctatttcgcaggaaagttttgctagtgaaggataaaattttaagtcgaggctcaaccactgacttaaatttggcaggccacattttactgaaaatgttttgtccgagtgaaaaccaactatgcgaaaaaggtccaagtttccccagtaaaatgacctttcccaactagaaaatatcgataacttttgttgacgaatttacttgccagcgaaaaattcctcaccaaaaatcttttttcttgtagtgatttataaaaattaatgagcaaatatcattgagatattaaatagaagatgaccatcaacattaaaatgtttagtcaattataaaacaatttatttaatttattaaattaattaattaacaaatataaaatattttagcaaatatacattttaaaatgaagagtaaacatatataataataataaaataatattactttgcaaattaatataaagttttgggtaagtctatgatacacctcttaaatagttgttttaaatagactctttttttgttttagcatttaggtccaatttttttttatgattgcgtatgttgcagctataaaggattacttacaatttttttaaaaaattgagaaatttatactgccaaaaaggttcaaatattttgttacacgtgcgataatttttcttatatgcatagtgaacaattgtttgaactttattttcagcactgtaaactctttataattttttgaaaatttatttgtgatcctacataggtataacgtacacgatcatcaaaaaagttagagtagaatatatttttggttaccaaaatagataaaagatctaccaaaatatctctttaacggtgttctacgaaaaaatttctatagttttttattttgcgaaataattttctaggatgctaagatattgagtattgaatgtgaaacataatgttgagttagcattatatttatttgtgcacatttttataacaaaaaatataggaaatttttatagtacaccctttaaagtagtgttttggtaaacttattgcctgtttcggcatagaaaaaagttttttaatctaattttattttacgaccgcgtaagagcaacaattggtttagtcaggtttttacacaaaaaaatttagaatttggttttcgattatcatggttataatttaaaaaccggtcgactattatataaatataaaaaaaccgacaattttaatctatagttttgtcaatttaaaccaatccaactgagtttcatctttaaatttattataactattgagaaactaagaaaactagagtatagtatcaaatatcatacaatttaagaacaaaaactttcttagttaaataaataatataaaacaaacttttttaaatttgctctagagaagtgagactttgaatgaaaaagacaagaagtaagactagtttaataaaattgtacattaaatatgtacaaaaataattatattatatatgtatagtgtgtaccatatatgttcggtcgatttaccattgacactaaaaccgactgtggaaaagtagttttaatcggaggcaatttttcggtttttagttttttcgatgttgatttttttgatgtttggacggttggtgtactcagttttttcggtttcttagattcagccttatgaccacatacgttatagctatataagagtacaacttgtaaatttttagacaattttaaatatttacagtgtcaaaattaagattcaaacatctacttaccacgcttataagaaaaaacagtcgcgcgtgtaacaaaatatttcaacctgatttttgacattgtaaactatttaaaattttctaaaaatttatagacggtcctaaataactataacataaataatcatgaaaaagaattagattaaaaaactcttttagatactgactacaacttaacaaatatatctttatagataaaatatgactatctaatagtttttgttggttaaacaaaataatttaagaatattctgttaaatttaacagcgttagtcaggtta

SEQ ID NO: 23436 - DNA, 3412 bp, Cannabis sativa
attattattatattaatgtttttttaattttttggataaagtatgataagccgtccgattagatgcaatgaatggaattagtttgtttgaccaaactatgttgctgacgtgggcttgagatcttcgacagttcacactgttttgtaaaattattagtaataacttaataaggtaaacggtcaaactacggcccgcttaactgttttcacacaattcttttcttcttttctttttttctttgctgtttctacggagcttacacgttatttacttattttattggtaaaatatgataaaacttccatacaattagaagtaattttattacaattaatctaaaacacgcaattaaaaaatattggcaaattattatgtgcaaattcaaagattgaataataatccccgacaaaaacagattaaataatagtctaaaatattaatgagtatattttctattttggatcattaaattctaatattttctatttttttttttattttggtcttgttcttacatttttttaaaaaaaatatatatatcataactagacttttaattttgtcaaattataaaaataatcaatcaattaagtctaacttaatcaaagtttattaaaaaaaaatctgacttaatgatcaaaagaatttcaaatataataaaacagtcttattttgataattcattaattaaacaaaaattaaaatcctaactaatacataaataaatatttatatatattgctagaaaataaatatttttattgaaaatgatgtgaaacaaattcaaaccaaaatttcttaccctgtacttttattataaataaaacgtaaaaatttcttcttcttaataagctatacctttattttgcaaaaatggaaatttaaagacaaaaataaataaataatttattcattattttgttgctaaatcacttttgaaaaaaattgtgaattacataagtttgggcagtttggcctaaaagaatgatatatgtattaattatgggaaattttatttacactctaaaaatttttaaagataccctattttagtaatttttattatatataaaatttatatttttaattatattaaattttaattgttttcttctaattcatattcttaaaaaataaatttatcaaataaaaataaattatattttaaatttatttttgtttgaacttatatgaaattaaatatttaaattaacataaaattattatgacaaaaaattaaaataaaaaattatataaatttttttttaaaaaaatatatacatatgagttaaggaaaattataaaaatgaaatcaaaatgaatattaaaattaacataaaataatatgaaaaaaaattaaaaaaaaaaaatcttaaaagtaatttttaaaaaactatttaagtttatatttttttttaataatactgtgtatttattgtgagatccaaatagaactctccattaattaatcaagaaacgaacgtgtgaaaaaaagacaaatatatgcttgcatttaaaagtggcagcttcatgtaatatttatatatataaatgaaaggccaaatatatatttaattaatatcattttatgaagttgtacgtggaatttgtgtggacctggtggaggatggcctctcctctgccctgtggagtgttgtgtaactccttatcattttaggtgaagttaagaaaaacaaaccacagagaagaaaaaagaattaataatggctactactgcagttggaagaggactccatattcccccatgtaattctttacctatcatttctaggactctattaaagccctcatcacttggactagtgacgacgaagcaaacatggcctgcccaaacaggaaaatctccgagtcgtactcttgtggtggctcaagcccaagtacgcccaacctggcttcctgggcttgaccctcccccatacctcgatggaaggtgagtgagactcttacttacttgcctatcaccctatggatgattctctcatttccttatatgtatgtaattgtttccaaacagtttggctggggattatgggtttgacccacttgggctaggagaggacccagaaagtctgaggtggtatgttcaagcagagcttgttcatgctcgttttgccatgcttggagtcgcaggaattcttctaacagatgttagtcattcatttctgaatcatcaagcatcttcttaattacccttttgttttttaggaagtgttttgtaaaaatgaccaatatataaaaatttagtagcaaaatacaaacataaatttctctaaaatgtactaccttaaaataactatcagtgtggttccaccataatacaatatggctattttcatctttttgaggtctcttcctgccgttttgagcattttctttggtctatagtccaaagggggtgcctttttgggtggttgataatgtatggacttgaaaaatatagttatggataagacctaaggataaggagttagggagatatgaattgtactgtatatattgattaagttgtgtgtttgtgcattagggagatatgcattgtattatttgaatcaaatcattcttcaaaagagattaattcttttacttgctttaattattattttgttgcagttgctgcgtgtagcagggatcagcaatttaccactttggtacaaagcaggtgcaattaaatatggatttgcaaatacagaaactttgttcattgtccaactaatcttgatggggtaaaaattctctactcattttaggcatcaataaataattaccataaaaattatcattaatctagctacccttttgcatctttatgctaattgtatcatgtatatttacagatttgttgaaacaaaaagatacatggattttgttagtccaggatctcaagccaagaaaggatcattttttggattggaggttgctttagagggtctagaacccgggtaatttcctttgattaaattagtaacaaaaagttcatctttaattcagttttgatgaaagtttagaaaaacaaataaacaaaaagtcaaaagcttttcctataatttgacagatatccaggtggtccattactcaatcctcttggtttggcaaaagatataaagaatagtaaggagtggaagcttaaggagattaaaaatggtgggattgattagatattattaactcatgtttttaccatttcatgacaccataatttaatgttttgagtttcttaaaactctttttgtggtcattgcaggaaggcttgcaatgatggccatgcttggcttctttgtgcaagcttctgtaactcatgttgggccagttgataatcttttggagcacctctctgatccatggcacaaaactattattcaaaccttagttaactctacttcttaaagagcaa

SEQ ID NO: 23437 - DNA, 5423 bp, Cannabis sativa
aaggggaatgaattaccttaccattgattctcattacttattagtaaacattcggaggcaggaatgggggaataaatggaaaacatggacaaggttggaaggtgcattacccatttattacccacccaatttccattgctactctttagtctatatttctactactattgaatgtggcttcctcaaattgtggctggctttcgtagctttttttttttttgagcgtaaggtaaaaagatttttttttagtcgtatttcttaaattaaaatgctaattaagttacagatagggtatctaagatatataaaatattaggaacaaaaatttagtaacttaccaattttaataaagctattataatattttgagattagtaaatggattaacaactctattgatcagaagcaaaatcaaactctccttgtagaccaatcacaacaggaatagactcagactctccctatacagcagctatagcaggaaaggactcagattacccttggacaccagctgacacagaattaggtgcagaggggcctgaagccggtgcagatgaatttacaggaggctgagatgattctaatggaggctcagatgagagacataataatcagatgaactgcaattacaatcaccagagggaacagaaggagcaacctctaaagatttcagaacctcaaatatggtagtgagaacagtgatcacaatcttttcaaatcgaagttatcgttgctaatcacgagcataagtctcaaacaattttgttactaatgaaaacagttttccctgctaagaggaagagctcaaccttgaaagatgtactggaggagcactagaggaagatgggatattagtggttggagcaactgcaacaacatgaacatccatggcagataagggaatcgagttgccaaaagtaggagaaaatgatttaccagtggaaggcacagaaatttttttgtcttgatcaagtatcacagtaaaacccctttgcaccactctattcatcaaactcgaatatggtaaagtgtgtttcacacccttagccttggcagagtttacaatttgatcatatatgagcgagggaagatcaatacttactccagtccccaaagcatacaagaacttcccagtgttatagttgacagtggaaatatgggaattggcccaccaattcgaaagagcaatcttgtgaaggattcggtaaagctctgtgagcatagtgacaggtattctttcccattccacactaccagtgatctcaaacccaatttcttgaaatgtaagcttatagttgtcatcaaatacatgcttatttattgttttgattttcaaaacacatctaatggttgacggagcaaaccaaaatatgttacctcttatgtaatccatatatttgaacttactcttcttattaagaatgttatcaaactgacataaaattctctaactaggtttttatttggttggtgaagatgtgtgacagacaatgaccacccatagactgtattaactcacgaatttttagaaaatatttgagcttgactcaatacttaggccacagaggacgaacacaaatattatcttgaagatgaagaaacttatcatttgagtaaaatgggggacctgaaggaggtggcttagatagactaggtttagatgacgaaccaagttcaaacaatttgactttcttaggaacaggaaggtttcgagagttaaaggagattgtattacgtttagagaaagacttaggacaactaatcgtggatggcaatgaggaaggattaagaggggacaagggttgagataatggttcaaaattagtagcaaacatagaacgagtaaaacacctagctaaactagaagagtgtgaagacaaacctgggtcccgcgatggtggaattgaactacagacaacaagagaggagctaggacgtacaaccttgggcactaatgatgatcccccaccagatgaagatcccttaatcttgcgacatgctttcttcccaatatccgaacaacagagacagaccaaaaatcaccaaaggaggaagatgaacagtattgggagtaggtgagaatttacttaatgaaaaaaaaatggaggatgaaagcacaaatggtaactttaatctgattatattcctaagacaaaagaaaaaaagtgaccgaactaccctccgacccaattaacaaaaaaaagaacaagcctattaacaccaaaaagtccacaacaaccaaaccaaagacaagggaaactacccaaacatacagaaaaaaaaatgataatggaatcagatgattttactattttaaaaagacacacaatgatcaacttgaacaaaaatgaaagaaagaagcaacaaaggatactagacatcgaagcttagctagacccaaataaagacacacatggaaggcatcacaactagatttaggcagtaaacatatcaaacaattgttatttttttttatcattttgccaaatcacatatatgctcacaaaaaaataaacattgatatcgccattagtgtgtgaagtgacctcatgtaagccatcaagagattaatcaaggaagcacactcatctctctagagcaaaggccaaggaatagccaatgaacattttttttattttgtaaaaaaatgccttttgataatatctacactcaatgacttttttcaacaagttgcggctttcacgcccccatagagatgtagtcgtcaccccatggatttttctcaataagtaacaagagaaggagcaaactacttgagtcacatattggtacaagggtagctcttcccattgcatccatggaaggtagcattctcaactggggtgacacaatgttcaccaccatacatgagcaattaataagtgatctgactcaagaacaaacaaacaacaattgaaagattaaatacagccacatacacagttgagataacaactagatgctactttgtccaggttagatggtgcagacaccaatagaatttctgagatgagaaaaagtgtgggcattaaatgcttttgtaaatagatcaacaagttgagcacatgtggatacatgtgaaatagttaaaaaaatttagattccaccatctctctaataaaataataccgtatatcaatgtgttttgtaatgccctaacccgtaaggcgccacacatgtgctttaaaaattagtttataataataaactaacagtgtaagaaaaaaaatgaattaattaaaactttagaaaattaattagagtataacttaaattatatctcaaaatattactagattcggggatccccttggttacaaactttttaccaaaataccactgtactagtttgttaccaaatattgttatacactcaaaatattactaaagatggatcctgtcaactaagcacagaggacggagaggctgatatgtacatttgctaggagacctctgactcatggctaatccactttcccttttcccttacctacaccacaaagcacccgtgagtcacaaagactcaataagaaaagtaggtaaagcataaacatcatgcataaagtactaaataacaatttaacacgcattgaaacatataatttaagtaactattcacagtgtaatcaactatttgtctaaaaagaaaagctaatcttgatactttgtaaagcatcattaaccgtcgttaccaatgagtttctaatgtcactatcattgcctaatgaagcaaccgataagtaagaaacctaacagcagtttcaaatgagagtaataactctttcttaataacagtaattaccatatcttacttttgacattctatgtcgtacaattgacttttcttaccttattccaaattcaggtgtacgggccgacttgaatggaatggtgctcaacgatctcgagccctatgtcacatcaatggcaacttgatatataactaaattaaacttgaaataggctctaaactcaaaactggacaaatccctatcaataatagcttggaaataacctaaatatcgataaaatacagaaacctaggtattggaaaaacaccccaaacaacatcttcagaaaatggggtttcccacagtaccctatagaaatagttaaccgtttcacactacagaaatagccaaatcctagtttttatgtcaaaactatcacaactcctccaaacctaatcaaactttccagatcaatataatatcatatgtacaacatatctcagcactcaaaacaagtattcagcataaaatcacaaaaacaccattattgagtgagttcttgagttcttgaactcaactcacctaaccaaagcataacaacccctaattcttgaaattaaaacttcaaataaccttgaatgaaacctaagaacatgctcaggactcaaaaaaacccacagactcgaaatcaaataaaaatccccaaaaatctcaacttaaaccctagaaataaacaagaacaagtggagaaacttatgggcatttttgtcaaagctatctacgtcgaataacctagaaattcaagcatactaaaaaattgtggtacaatccataacttgttctattaacgttgtgacattcttggccaatctattgagtttccatagtcgtcgaacccaaaaatattttatttcaaaaaaatggtataaatacccacgtgtttcaataaaattgtcgtaattaataaattacgctcatttaatcattttcccaaaagccactaattatctcataattagtgttgacccccaaaaattactaagtgtaatttttgaagtcattagtgtatgcctgaaatttcaccaagtgtaaatccataaatgcacccaaggtgatgtgttggtataaggaggagcaaaggcacacgcccagctcccccagcacccagcctacagtgctcagctcccttagcctcagcttgtagcgcccagctcccctggcctcagcctgcaatgctcaaatcccccagccttagcttgcaacgcctagctccccctgccttattctgaagcacctaactctcccagcctcagcttgaagaacccaactcccccaacctcagcctgaagcacccaactcccccagcctcagcctacagcacccaactttcccccagccttagcttgtagtgcccagctgtcccccagtcttagcctgtagcgccctgctccccgtaccttagcctgctattcctagctctctcctagccttagcctacagcgcccaactctcccagcctcagcctacagcgcccaactcaccctcagccttagccttcagtgcccagctccctcagcctcctcatacaaatagaaataaggaggaaatattgaggctagggtcatttaagcaacaaaattactgacacgatagtgactacacaatgagtatgaataatggagacaaagttta

SEQ ID NO: 23438 - DNA, 11909 bp, Cannabis sativa
  modified_base (27)..(31): a, c, t, g, unknown or other
  modified_base (11429)..(11432): a, c, t, g, unknown or other
tctggattacattgaaatagagttttnnnnngggcataaaacccaacagtaatatggaatcggtcacacgtgcccttgtagattgccctagagcaaggaaaatttggaagctttcaagattcaaaattttttactgcaatcaccgaagaacagacatccaagaattttatctccaagcaatgcaactcatctcaaaacaggattttcctctttttgttgctttcatttggcatatttggaatacaagaaactcaatattatttagtaaatctggtgttcctaacaatgtggaagagtttgtttataattatttacaggattacaatgaggcccaacaaaacaatcttgctggtcattcagtttcagtctctaatcagcgcactcaccattcccaattgtttctagtagaagactttcatgaggactcctcggctctttatgttgacgcagctttagaccataagcatggcttaacggggattggtttcactttcaagattggtcatcatcagattgttgcttcggaaaatcgtctcttgcctggtgcatccactcctatttttgctgagggtcaggctttgttgcacggtatatcttagtgtattaactctcagttgcagccagaattcatcttctccgactgtctaaatttagtttcaaaagttaaaggtgattggcaggaccactccgccctttcgggtcttgtttctcagatcaggctgttctccttcaccttccctgaagcctccttgaagtatttacctcgccagttcaacacagccgcccattgcctggccaaggatgccatcaggttgcgggaagaaggccatgaggaatttttctaattcctttgttgttgctgcttgtgcttagtggtgttttttgcagcttgttatctctttcaaaaaaaaaaaattatatttgtactttgatataactgtctccttaaaacactcttgctttattatttttgttttctaaaataaaaagaatgtcatgtcttcacattattgttaaataaatttctattcagctcgttatctttccaaaataaaaataaaagaccatgaaataaaattatgagacaggtcgtggagattcttcaattccatgcatgattaaagtatttacaaaattctgaaggttctattcctaaatgtatttacaaaatagttatagaaccatcagagttgttgctcaaattctcaacccaagagggcgtcttgacaaaaatttttgctagaaaatcaatttagaagctcaatttttaaaatttttccataagtcccataaaatttagagataacctggataaatatatatatatatatatatatttacaaattatatgtatatatgccaatcagaatcttccatcattatttttttcacgagttgtttatatggcaattgaattgattgttatataaaaaaaaaatctgtaatagtctaaaatgaccaatatatattacaagaaatattggatcggcctatatttatacagcctaacaaaaaaacagaaacccaataacacaacaaataaataaagtaattaatataaaagtaagtacaaaaccatatacttatcaaaaaaaaaaaaaagtacaaaaccatatgctaaaagtaattcttttaaatattaaaattaaacagtataaccaaaacacataaaataaataaaagacaaagataaataggacaaaaaaataaagacaaattcattaataaaaaattgcacatttatacattaataataacaatgcaacttaaaagctactgttttgaagattattaaaatatggtaaaaactaaaataaaaagtcactaatttagatactacatatgacttttttcactttacactctcagcagaacactttcatacttttgttgaaacagtatctatccaaaattagtcatgggagtaagaaatggatcagtgttagaggtggtcttagagatctgagatgcagcagatgatgattcagagggaacagcattaacaggtcgaagcttaaaccttggtctgcatggtgggagaagagggagtgaggcttcacctttgagaacccttgcagcttgtttcacacttagcctcttcacatgattgggatggacacaagcaagtcccacaaccaacatccgcatcaactcctcattcttaactttccccctaagcctcacatcagcagcatcaactatgattcccttcccccacagctcccacacccaatcaactacagacttaccatcttcatccactgccctcttccctgttaccaattccaaaacaaccactccaaagctgtacgcatcggttttcgagctaggcacacctgtgtacacgtactccggagctagatatcccagtgttcctgctggtatggtggcatttctcgactcatgatcaccacccccaccaccaggactgtgttcgtacacttgtgccaaaccgaaatccccaagtttggcattgaaattttcatccagcattatgttacatgactttacatctctgtggatgatctgtctctcacaatcttggtgcagataagtaagagctgaagctaccccaatagctattttctgtctctgagtccatgtaaggacaatggctgaccttgttttgttgtggaggattttgtcaaggcttccatttggcatgtactcgtacacaagcactaattcagatccttcacagcaccatccctggagttggatcaaattcttgtgctttaagcaaccaaccattgttgcaaactcagtggtgaaaggattacgccaactgccgatcccactgacacgttgaaaccttttcacagcaacttgagaaccatgaggaagagaccctttgtagacagttgcagaggctccttccccaactattcggtttggagcaaaacacatggtggctgatttgatctctgctagtgacaatcttgttgggactctgttggcttgaatcctctcagcagcaaaattagtgttcactgatgatctggtttgaatccgtggattagcaccaaaagtattgttgttaataacaacaatctttctttccttaatctttttgaaaattaccacaagaacaatggctataattgaaattaccaaagtaactaagcatccaacaccaagaacaaacttttcttgttccgatttatgagtggcagtggcagtggcagtggcagagtgttcatcatctggagagcaaataaagcaatctccttcttcaacaatatccaaaggaatggtgaatgagccgtgataaatcttgaaacgccatttgtcaagcacatggagagaagagccttggccattggaactagagaaacccacgtacatatactctttgagtatctgagaaaggtcgagtcttgcgactagaacaggattggtaggccttacagcagagtagccaacccaaatacgaatcatcttgattgggtttctgtactcaatccaagtctttatggttttcccacttttcaagttcacacctttcggagttaaatcgacagaggagactgaaacgacactgttgagatcgactccgatgtggtttccgtttacgtctccgagcagtggatcgaagcttgtgtcgtactcaacagcaaagaagggatcttcaacaacaaaaggcctcggaagaccgatgtggcctttgaatgagctgaaagaatcttggtcgggagctatgaggaaggatatgccgtcgccgggggaacagaacggagagggcgtaatggagaaggagaagaccgatgaaaaagacgctgtgtcgtttgtttcagagtcgacgaagcgtattgggtctgcgtagagagctcctccaacgccattgaaagaggccaatgaagaagaagaacaagagttgagttcttgagtaagaacaatggaagcgttgctaaagaaagcatcgccgaagagggtgaggttgtttggggagtgggaaaaggtgagaaagtggagattggagaaggagatgaggaagatcatcatccacacaaaagcgaaggaacccataattgcaattgcactgtctgactgtaagtgagcaacgattgttttcgagggaaattgtaaaagcaaccattatatatagctcactttatctgcctatttagtatctaatttttatattaagctatttattagggaaaatggaaatggtgttactttgtagatggttaatgggaatatatatttaaattaaaatgtcgtcttcaactttgatctataaattaaatgattattgttagtgaaactgattgcaaataataataatgaagttatgatattaaaaaataatgtataaagttttgatgattgttcaaaaaaatatactcttaaatattactaaaaaaaaatcatgtttatagtattgaaaattaattgaaatgatgtcaccttgttttagaaagttaataggaagaatataataagttcaaaataagcaaatctaatgataaaacaaaaagaaatttttttttaaaaaaaatttaattggctcagctaataggattctaaaatatttatatttcacatttttatattttttatttttttatccacttacaactatattatctattttttagttgataaattctccacaatattctaaataaatagggataattacatcacatactaaattttttaattttttttacttttatactgtgcggcggaatttttttcaaaaatactgtgttttttcaaaaatattgtgtaagttttatacaatgtactgtgttaaattttcattgttattccactgttgtttttagttattttgttttgtgctctactgttgttttataaaaacacagtatttttaaaaagatttctgtgtgacagtatttttataaaaattaacccaaattctaatatttttgtaagtttcccaataaatatgtgaagttcttacaaaataaattttaaatatttttaagaacatttgataatattaacatgtatataatttgtatataaaaatacttgtggagttcctaagtccaaatgccccatcaaagtaagtgattatcaacccatctcttgttgtaatgttttgtataaagtagcaactaagctcatttgtagtagactcaaaaaccattctgctagactttatagctcaaaaccaaggaggttttattcagggttgatacattgctcataatatagtgatttgtcaagaccttattaggcatcatggaaagagatcaaccaagtccaattatatgatcaaattggacctacaaaaagcctatgacactatggaatggggatttcttaagaaatgatgtttgcttttccatttccagtcaaatttgtgttacaactcccaagttctctctcatatttaatggaactcttcatggcttctttgaagctaagagaggattgagacaaggagactagatgtctcattttctctttgtccttggaatggaatacctgaccaggataatgggtgaagttggaaggaaaagtgacttctatttccatgaaagatgtggagatttaaaacttaatcacctaagttttgttgatgatgtgctcttattttgcagaggtgtctttaagagtatttatctcatgctacagggtctaaaattgttctcaacttcctctggcctccaccctaacagcagtaaatctaccatttattgttgttgcatggaggaatctgaaatcagaagggttattgacatatcgggttttagcaaacaagacatccctttcaagtatttaggaatctctatttgtgctaagaggatatccactactgattgtagaatacttgtggagaaaataactggcagaatcaaggtttggagctccaaaaatctgtcctttgcaggtagaagtgtcttgataaattctgtacttatgactatccatacttattggagtcaaataatgatattgccaacaaagctaatcaaagaaatacaagatatatgtagaagcttcctttggaaaggcataagtcagatgacaggttcagggagtatagcatgggataaagtttgcaagcttaagaaagctaggagaattggttttctaaatatagctgattggaatcgagttgccataatcaagaatatctggtttttgattgcttaataaacacatttttatcataattttttttcttttcaaaaagtagcttttagcttttccaaaaattgtaccaaatgttattgttggttttttttatgagtttaagtatgccttgtaaaagattttttaaatcccatatttaattgtatattttaaggttcttcctctttgttgaacctaaactagagaactcaaagctgcacctaagcaagcagccatccgaccaatgtactgcactactgttagagctccagatttaccatctgacaaacaaattgtgagaccggtgatgttccaaataccatctgatccacacaatccacatacacaacagagcaaacaacggatccctgccttgaattgatatcaatcaccttggtttccttaatcttcatcggttctctctattttaccttctttacagtgttctttggtggaaatctctgcactttttacctctcgagttttttgagcgctactgttgcactcctacttatttcggcattcgagaaacaaaagcaattcaataatgtggaagattatttattgatttaccgagataatcataatatggactataattttgtgagacattattgatttttaccgattttatggtattattatcttttcacaattgtaatgattttattaaattaatataatattaattttttaaaaaatattattaataaattaatataataatataaaatatttttttagtgtaatttttggtattatgattggagtataaataattttttatattaaatttaataataatgtagcaccaaatttactatgctgaaaaattaaattatcctaacaaaaaaaacaagtaaaaatttaaattacactaatacttcttaaaaaagtattacttttttttttaaaataaaagaaaaatgactacttaggttttttattattattattattttcttaaaaaaaaatctgattggttcaataaaccaagtgggccatcttaacaacaaattgggatgctttgcttccagtgttgatggcctatatgtaggagtgtcagtgggttgaaaaattggttgtaggaggagaggactgtggagacatcatattttgtccaatatgaatgagattggttcaattttctattttcattttacaatgacagatggctggagtggaatggaatggagggaagatcaagaggaccttaaaaaatatgatttttaatcatctgtgttagcaatcactcacattttgtgctgcatgtaattattattgaaaatgagaaagaaaaaaaaactaaagaaaaaaaactattgggcttgaacatataattcctaaaacaacgtcttaacttaagaaattgcctttttcaaaagaaaaaaaaaatacgttaagaaattgccagttgactgatgatgtaatactgacactacattttcccacctttaaagctactgtgatataagaaattgccagttgactgatgatgtaatacgttaaccccaaaactcaaacccaatatgcaggactttatagtttcttcttcttgttcttcaaatacttgtttttgtttagctagagaaaactaagctaaatcaaaaaaaatctttctttcttctcttggtgtctggaacattataagagatttctagctctcactttctcctttgttggttttttgagaaaaccctttggaagaaaacaactaactctccctctctctctctctctgtgttaagttgtcaaagttgattccttttgtttggttttggtactaagtttgtgaagcaaagaagaaaaagaaaaaaagcttgtttctttttgaaaaattaacgtgatttctttctgagaaaaacttttctctgtagaagaaaacaaggtaagcttgtttttgtactaagtttgttttgcttgtgaaagttgcttgtttttgtaccaagtttatgcctttatgacatttagtgatgcttttctgggtttactatgaatttaagagaagagccatttgaaatagtgggtatgtgtagaaatgaaatttatttgtgtgggaaaggttttgattgagaacttgagtgaagagatttgtatgagtggcatagttttggtctgatcttcttttataatttatatatatatctatatttatatactggcacacacatatacatgttgttgtgaaaaaaaaaacaatgtgtgtatattattatatttgttaagtgggtttactcagagttaacagatcatggaagaagatcccttgaaaattttgttcctaaaataaaatgccaaatgagtttttttttttttttggtgaagtctttggagtatcaacttggtgaaggccatttgtatgttattatgtaatagatgaaaaaatatatatataaaattgatgactttgtaacaagagacttgaaagagaaaaaaaaaaaagattgtcattattcttaggaatatattattgtgttgaaacttcaattctgtgtttaaactttgatttatcttgtgatcttattagggcctttgttggtagcaatgacgaagtacaaatctgcagctaatggaaagtctaggatggtccagaatcggagaagtaaacgtttaatgtacaaatcttcacctaattatcaatgtgatacgagcttggatgtcaagaagcctccttgcaaaagagctacttactcaaaaaagactagtgctgaaaatgcaaatgtaggaaatgaagtaatggaaatgaagccaaaggtaaattgtgatccaaacaatgcagaagaaaggctatcccctatctggtggtaagattttggtccaacttttttgttttcatatttgatatagcttgagtgagtttacaatgagctttcaattttttcatcaggggaagcttgagcatacacaataacaactttggcaatgtggatgtatgtgcggctttcaagtcaaccaagatttcttctgatgtttttcgtgttgtgaggcaatttccatcattgatttctgcacaagtgattccccggcttgatgtttggccaacatgcttcgatacttcgccactgagtgatgaaattgtagacctctacattttacaaggagacaaaaggtgttgtttgctttgctacaaattaatgtttcccaattcgagctactcttcattttgacctcttgttttcatttccttcctgcagtgatgatatcaaagatttagatagcttgttggattatttgcatgctcaagatcttggaataacaatcgcggttgatgggacaaaatttctcttgttttcttctcgtcatctttcgcataagtatggagtgagttcaagcatcacatgttataatctcaatactcagttgttctttctcatatctcatatctatgttttgatatggtgagttacatgattttgtaggacataaggggaagtactatttgtgggctgtcataattggagccaatactttcttcccacatttagaagaatgtcctaattccaatggcttagtacttgctcaagataattcctccaatccaagctaattggaattttttgctcactaaggttgcattaagttttcaataataaaactctatcatgttcccaagtcattattttgtagcatgtttttaaggccaacttactctatgaacacataaatatacaaaaacaaaatccatgtgaaatatcaaatctcatagctgaactaaactgatattctttatgaggaattgattagtttgagagttgagacactttaggataatgtatttatacacgtgtactcagttaatgagcagcaaattactatgagcaacaaatttagttaattaagtcattgtcattgccattctaacaagtttcctagttgagcttctcatgcctcaaatatttttctttttagaaaacatattctctgcattcatttttttatgttaaataagttgacatgaattttgttacattttttcttgtccttgtttgttattgtggccaggtaaactcaatgttgtagcctatttcaaagaaccggacggtcaaagttcctttgaaggatcgcctcaagttggaagagcagccattgatgaaggcatcgctttagtgttttctacacccgatgaagatttaatagcaaatgctgtagatgtttttctttcttctgacagcaacattgatggagggaaaattcggaagacttgttcatcctcatcaattatcccaagagagagcactaactctgcagctgtacaagtacacgaaaaagaaaagagttttgtaacatcagttatgcaacaggctctaaacattgtagaaggcgatgaagtcacctcggctgctgctgataatggttaattagttggtcaatactatgtgaaaccgactttggctacaactcttcgagcaaacatcgaaaaacatggtgacattgctcgaaattgtcttgagaatttaccaagaaaagttgctacttttgttcttgaggagatatgtgatgtggttcaactcaagcagttgagccaaaaaatctaaggtcccatcatctaaattctctagaaacagtaatcgctttaggtgaatatgcaaatgtggatgtcgaatggcttaagaaactccatgaagaactccaccaagtaatgaacacaatgaaaaagtatgagaaacttaggctgtctcaacgttctaaagcaaaagaactcaagttagagaaaaccgagttggggaaattacagggccgagttcagtcattggagaggaaaatttcaacattggaaagggattgtgaaagagtagatagtgatgttcaccgagctaaacgtgtgatcaagcaattccaaagcaattcatctataatgcatggctttctctagtcatttttttacttagtagtcatcatcttagcctttgaaagttacagaggaaatttatatgttaatattattttgataacaagaaaatttattaggactatagcttacttctttatctttataggtctttattatttatgcttataattaggggtgttcattgtactacatccaatgcttttaggcttattcaaattcgatctaattatatattgaatgttagattttaccatccgattcaattaatttcagtcatcaaatcgatctagcatccattagatgctggattggaaatctgttggatgtatttcatttataattattggtttaatttgagtttattcaatattttagacttagtattattttggatcggatcggattcatattttaggtacaatatgtattggattggattggatccatccaatctaagaaaaannnngtaaaattttaatattaatttttatatatacatatatattacatataacaatataaaatttaattacttatctaaactaaataaaaaatattaattagttcgaatggatgttggatgtattagattttcagacactccatctaatatccgatccgatttaattggatatttataaataatatccaatgagatcataattaaatatctaatgttgtaattagatctatcaattgtgattagattacatgatttatgcacaccttgtactaatgtaaagaaaaacaaactcatccttattacttatctcttacatcttacaaagttatcattattatttatgcttgtaatttaaagaaaacaaacttgtccttattattactttttttttttttgaaaatgaaagtcattttattaaacgaaaatttctgttaccaaactaggcaacaactcaattggaacagtgtccaaattgaacag

SEQ ID NO: 23439 - DNA, 5911 bp, Cannabis sativa
taatatattagtatcatttttataattttttaagttatgttttgtataataattaatatattgaataataaataatgtataatatttaatttttattctaaaatgtacaatactaattttcttttatatctcttcttgtatttaaataaaatcatgaaagttaatttatacaaaaataatcttttagtatattgataagaacttatcaatatatcttttatgttagaggttcaaatcacaataaactctattttgtatttatttttttagcctactatatctattcttagcagtcaataatatctatcattatcactcaataatataacaatataatatttatcctaactattacaatactaattactaacatattataactaactattaactaatcttactctaaattactaactagcaactagtcctaattctaccgaaatttcggcagcataacggctataattgaatatttttcaaaaaaaaaaaaataaagctattaataacaacaaaacacaatccaaaataatataaaacaatcacaacaacatttagtaatacaaaatttgctaccccatccgaccgcaaaacatgtattcgcaaaacctacttcattacggatgaatatttaagatattcaaactcatctaatatgcatattattccacccatcctactacagtattatacattatagaacctactttactataaatgaatatttaagatattaaaactcttctaagcattcatcattaattgataacaaaagttaatgaatgtatacatctaggctctagctagctagaaactgatcaacactaaataagtcgaatccttgtaaattggtctcgcagcctacaatataaaaaaatattataaaatttactattttaattatttaattacgtactaattatataatttatgagtaactagtaataaaaatacatgaatagcaataaaaattagtaactaattaaatagttgtaactaactatttacagagttataactaacgattactagctactaaaaaataaaaatacatgaataaaataaaaatataataatttttaaactgttgtttgtaaactaatttttttaaaaattaatttttaaatttttattttagtattctcatatctttctcattcacaatatttaacaaaactattagtttaaaatattcaatatatacatatacaatacataaaatactctcctatatcacattcttattcacaatacatacacacacaatacgtattcaatacaatataaaatatatacatatatattattaaagtttaaatttttacctgcaatccaactaccaatgctaaccaaaattcggccaccacgtacaaccacaatcacacaatcttaataatataaaaaaaactctcaaaaaatttataaaataaaaaataaagcaatgtacattactaaaattagaataaattatatttatatcttaatggatgttgagatttaatattttctccactaaaattggtggtcggaggtataaccaccacaaccactacctctaccttcagtatataattttgagtatagaaaataaaagattttaataaaaaaaaatgagttgaaatggtgaaaaaaaatggtaaaatgagaagtgattaattaacgaggtggttggcagagagggtttggagtttctctggttttggggtttctgggtcggttgatcgagaagaagacgaagggttggggaaggttataaaccccttaggcgtaaataaccgacaacatagggatatgccataccttattttaatttccagcaaaaataaaagtcactaaagttcattgttgtagtagtgcatcttcaattgattgagtaaattttatgaaaaatttaccttaagaagctgtgattttttttttcacatatatactacacgtactaaaaaattacaatatgtacaaaataaaaacaaaaaattatacaatacatatatagggacacgattttgtcccgtgatgtactttcacggaatgtattccgtagtacattagatgggtctcggagtacattaaatgagtgtcagggtacatttttactttttaaccctaattactcctagatcaatctcaaccatcagattaaataagtctctcatctgacggctgccgtacatcacggaatgcattccgtgaaagtacaatcacggaataaaatcatatccctacatatatatgttttttttaattgtttagtttagataaacacaaagataaactattttgtttacaaacaaaataaactattttcttaattttaaaaattgtttaaaattttttatatatgaatttgtttttttttttaaatatgtaattaaataatataaaaaaagtaaacaaactggaccagtttttaaaatgtatagtttattgtatagtaaaatataaatatgttttattatatataaattgtaataattagtctttttataatgaattctctaaaaagataacctttttttttaaggaaactcaaaaaatatcatatgttatatttgattcaagttttataattgcacttatatgcacaaggtgaaattaattccccaaatcaacctatagtcatcaaatttatattgaaactatatgaaaaaaaaaaaaatttaaatgcaaaatttagtctaacgtttagcatgtactaaatttaaaacattttttgatttagatcatctccaatgaaaattcaaattggtgatacaaaaagccgatcttgaatatttgtgggttttaaggacaaaaaatatattattgggccctccctcatgaaagaaatatgtagtatttttaaaaaatattaaaaaaatgttcatacttttcaaaagaaaaaataatgagaaaattacacaaagtattattttttgtaaaagtattattttttgtaaaacttttacacttttacgttcattttttttttttacatttttacatttttcattaaatcaatacaaaaataacaaaaaaatcaggtgaaagtaacaggaaaataacatccaaacaacatcaaaacaatatacaaataataaaaaatcaataacaaaataataacagtacaacataaaaataatatgaaaatattaaaagattatatttctataaataaaattttaaaaactgtaaaaacatttaaaattccgtacaactatatttctattattatttttgttgtatttgtatatttatgaaataattcgaccacgacggttgtacttctctatttacttttacattttttttatttaaacgtttatatattacaaccatgttatacttgagactcgaatccatgacctccaacccacacacccacccatggctacttgagctagcctcaagttcttttacataattttttaatacttttacataattttttgatactttataattatatttatgtatataagtggatagtaataaatcttgaaaaattttcatttattattttataattaatttttatgtatatatatttaataattactaattaaatattaaaatttacataaagcataacaacagaaatagtttcaaaaataatacaacattaaaaattaaaccaaatatatcataattattatttttttcaaatataatacatttttacaaaaaaccttcataattttttttagataaatattatttcaagttttgtattttgtaaaatttattaattaattgagtatttttcaaaatagtacaaaatagattctaaccttaatttttatcaaattaaaatttaataatagcctaacttggaggtattataacaaaatattaagttcaagatctatcttctactattttgaaaaaatacaaaatctgaattattatttgacaaaatagaagattcattctgtaacttttacaaaagtctaaaatggtattaaccattttttttttaaatatatatactaaaacataacaatattacttttataatcatgctctctgaactttgacatgtatcaaatcatatttcctgaacttttttaatcattaaaaattctttttaaactattgttaaatttaacgacttttgtctaattttattcaattttattaattttgtgattgtccatatattaaattatgctcctcaaattttgatatttactaaattatcccttaaattttcacatgtaccaaattatgtccactaaactttaattcagattaaattttccaaaataaaaatagataaatttaaaaaattcagagaatatatttaaatataggtattttggtgaaaagaactccaaattaaccattaaaaaaatgaaaaactaaatatccaatataggagtcaataaataaggcttagtcaaacttaataaaagtcaaaaacatatataaactcaccacgtcgaactctctctctctctctattaatactaattgtctgaaactctgaactgaaacagtttcgtcaaaaactaagtgagactgtgacttgtgacacagtttcattttcataaacaaaactgccatggcggaagagatgaatcacagccgttggatcgatcccaaaagtggtttctgcccacaaacaaaaatcttccatagtctccgaccaccggtccctctaccacctctctctcaacccctctctctctcccaatacgctctctctctcctcaactcatgtacaacccaagaaacccaagccaccacacctgccctcatcgactactcctccggactccacgtgtcctactcccatttgctccgtcaaattcgctcactcgctctctctctcaaataccaattcccttctctctcctcctcctccaaaggtggcaccaccgccttcgttctctccccaacctccgtacacgtacctgtcgtttacttcgctctaatgtcgctgggcgttgtcgtttcgcccgccaacccggtaggatccgactccgaggtgactcaccaggtacaactcgtccgacccgcaatcgcattcgccacgtcatcaaccgcacgcaagcttcccccttctctccccaccatactcctcgactcgcccgagtttctctccatgctcgaccgagtcgactcgggggactcgttcgaaccggtcccacagaccgacacggcggcgattctctactcctccggcacgaccggacgagttaagggtgttgccttgactcatcggaatctgatcgccataatcgccggctaccacgagctaaagtacgagccgagcgagccggagccggagccgcatccggtgtcgctgtttacgctgccgttgttccacgtgttcggatttttcatgctggcgagggcggtgactttgggggagacgttggttctgatggagaggtttgattttgaaacgatgcttagggccgtggagaagtatagggtgacgtacatgccggtgtcgccgccgctcgtggtggctcttgttaactcggagctggctaagaagtacgacctcagctcgcttcggctgctcggatgcggcggcgcgccgcttggtgaggagactatcaagagtttcaatgccaaatacccaaatgtggaaattactcaggtcagttttaactcattagtacaaatttaaatgtaagtaaataactatttttacgtttaactttcttactaataactgttagagatgttaaatattttcgttactgaaaatatgagaatgtttcttaaataatttatcaattttaccatctcataatatcactatcatattttgtctttattgttcccttttgatagtgattaaagttagggtaaaattactaattatatttatttcactaacaattacaatttgcgaaaaatatgataaatatttttctttctctaattttcgaataataatttaggtgacaccattttttcg

SEQ ID NO: 23440 - DNA, 9420 bp, Cannabis sativa
  modified_base (5991)..(6008): a, c, t, g, unknown or other
  modified_base (8781)..(8782): a, c, t, g, unknown or other
tttaaaactattgctactaacatgtggtactttgatagttgttgttctagacacatgacaggtgaaaaaaaatatcttgtgaacattagaccaatacagtatggagaagttacatctggtaacagtcttgttggaaaaatcataggctaatgaaaaaactccttcaacatgtacctacctaatttttctaatactaacccaattatgttatttttgaattttgttgcctttttgaatctattttgtcaccaggaaagaaataatatgttagccgtaaccttaaataagcataaattggctaaacataccttgtatatatagatagacgataagttttttgtagggaagaaatcttctaagttttgaacacatttaagtatgatttattacttttgcttgcattttttgtttagatttaaacttatgaaaaatgctctcaatttttataattttctaggtaaaaacaatcactagcgatgcgtttagaatgctcctatggaaagtttattttgatgtcaaaatcaagttttcataagagaatcattagtgtgtcgttttttttttacctaaaatatcatcaaaaataatagcattgcaaaagtattatgggagagtattgcaaaagaatcatcttatttataatactgcaaatttatagaggtttagatatgaaaaaaaaaagaacaaaactaataaagcatacataaatttgtttgaaatctttaatttagtgctgtaaagtgaatattcatgggagttcatgtttacatttgaaagaaagagagtttgaggaagctcgagagagatgattggagagggaagtattaaggttggcatactaaaatgtatagaagctcaagttttacaaagaaaacccctcttgcttcctttaccactcaataaaaatttgaagtgaattcaagattagaaaaccagcagacgaatcagatctttactttgatttcagaaaaaagaaaaaattaagaaaactaggccagtacaaatttcatttatcgccagacaagaacgaaaaacaatgatgcaggaagtttctttggctgaagttaaagaattgatgagtttaatactaagaaagaaataaactcaaatatcttggcagagctaattgaagaatacaccatatatctctttgattcattaaaaataccctaaaaagcaaccatggatgacaatattagagattaaacagctctaaattgctaaacacagtgacatttatcactttctagtttgcagtaatagaaataataaagattatgcacttattattggtttcaatggaaaggaatggcatgcaaggacaaccgaacaataaaccagagaaattgtgtgtcaactaacctaatggcttagatctaccatcatactctagcaggcttttgaaacacagcagacaaaaagacctcagatttaccagagcctgatccatctaccttctctgcaaccacccatttcagcttcttatatccaaacttctcaatcagtctggtcaaagcttttttcttctcatcattagcacagtaaaagttatctaaccaaaacaagcccccaggtctcataatcctgtccaggtcaaacattaagaaatccaacttttctggtttgcccccaacatccaatccactcccggcgtggactaagtcaaacacattgtcgttgaaagggaacctgtgatctaaactcaggtacagtgggaaaatccctcttgcagcaatgaattcactaaatggggcatcgatattcaaagtgttagtgattacagtcacattcttctctgccattctagcagcaaaggtaccagagccacctccaatatcgaagcctattctgattcctccatatcccaaggctaaaacatcatcaatgatgaaatcattcttacttgtagtcttaacaaacttgtgattctcagaaccactgactaaatcaaagcaaccagaacattctctacttagttttttgctgttcaaacaattaaaattcttacatccaagaccactccaagtaacaatcttatcagagacaggtttccaaagagaaaaaggaaaagggctgagacccaccttgggaattgacttggcaaagcatctccttctgggtaaaggttcacatccacgcaaaattagcttctgggcaaggctccaatcgtccggacaaggcccagagatcttgtaagtcatgtactgagaaagcaagtcactagatttctcacaggcatggccaacagaagccaccatttcagtaattccagttcttgaatcttttccgagaggaagctggtggtgctgaaggaagagcttaagctcggtggcagtgttgggtctggagagatcgatggtgtcgtagcctagaagctctttctccatctgggccaacttcttttgcgaagaatcgatctctctcataatcagagaaacttgctctgatatgagagaaatgttcttgtggtgaacatggggaagaagatggttggtttggttgtctttcggggagtaagtaaaggcgtagagagcaaagagatttgtggtaacaacggagagaagcataagaatgttaacagctgaagaacagagggtagctctcttgaatctggctgttccatcaccaattttcaaagaaacagaacccattttggatctgcttctagttcttggatccgatccagaaacgaaagagagggttttgattgtttgggtttgggggtgggggatagtgagatagtagagtagagactagagagtagccaaagcgagtgagatttgtgggagtaaaagcagtaacggtagatttggtgaagtaagctttcactaggggatcactctgtcactaatagtaataatatagatactaattaataataataataattgtaaactcttatttggcaatttaatttttaattaatattttttgtattatgcaattgaaataattttttttgtgttaattttgtgtctttgatttttcttttttcaaaaaaaaaaaaaaaagaatttatttacagctagtatttttgtttaagaaacttgtcttacaagagaaagaattctctttaaggaaagtggcatattttttagaaaactttgattttctcttttccaaattgctaattttaattttgttatgtatataacaaatcaaataatttttatttggcagataatgaagaccaaatcgtgatcgtggtcctttttgtatagttctttgtttagtcctgatttggtgcaacagactctgaatttgatgctacaaaacagggatgtttttagaaaagtcttgtacaactttgaaaaagtgtttgtgagtatctctaggatttctatgttctataaataggacctacagagcagccaaatgtttctcatctcttccaaattcatttttcatattttcatctttgtgatgagagaggttcttttgtgaaaacctagagtgttctactaggtcttgttttattctttgagttttgctcttatactatttttagaataagttgaagaactcctttgaataagagaaaagtcttcgagagaagacttgtcaaagccttacttcaagaggaagtaagcattcacacatcaaaagatgaagggattttgctatttggtggcgttcaaaaatttgattggtaatgtaaattacaaaagattacggcaaagctttaaagggggtctaagcttgtttaagtcaattatatttgtaattatttgagactttactaattaatttcattctctgggcgtggccccgtagactaggagtgtttgaaagaacactgattccacgtataattctcttgtgtcaagtttttatattatgcactttatttctgttctgttactgtaaatttgtgttttgcagcaacaagtttccattctgttactacagattatagcagttgtgttttttaattactagaatttaataaatatattggtatttgcaaaaatacaatttattaattggtattaaagcgtgacactaaactcttagtgtgaccctttaacgttttcttgtgtttttatgcaatatatcaatttttgaggaaggaagttccatttctcgtccacaacttctcaatgattctattaaaaggttagaatgagggcatttatcaagtctcaagatgagaaaatatggagaataattctttcaggaggatctcattttgttgtggtacatttcaaaagtaattcaaagttaaaacttgaacttgaatgacctactgaagatgataagttatctgcttacaatagtaaagctttacatcctatatttaatggagttggtgaaggttttattaagcttatatcttcttgtgaatctgctaaggatgcttggcaaatctttcaaactcaatttgaaggaacttctgctattaagcgttctaggtttattatgcttcttatcaaatttgatgatcttagaatgtctgaaaatgaaatcttgtctgagttttatgaaaaattgtctgatatagttaatgaatattttgctcttagtgaaaagattttatcaagatgaaagtggaggagttaatgggttccttgcgtactttttaattagcaaatcaagcagaaggaaaaacctaattccacaactgataaaggtaaaagtattactttaaaagttgctgacaaagaaagttttgatgatgaatgtgatgatgaaattattttattaactaggaactttcaaaaatataggaaaaagatgggtagtaaaaagatttcaccaaaattttcaaaaggaaatacttttttaaaaccttctgtgactaataaaaatggaattcagtacaggaaatatgaaggttttggtcatattcattttgaatgtgcaaatactctaaaaaggaataagaaaagtttcaaagtcgcatggagtgatgataaaaacgatagtgatgaagataattttgataatgttgcactaactttagtttcttctaggattgtttgtgattcacaggtaaaagaaatattggtatgtttgaataataccattgaaaaaaaaaaagaatctgattcagataaatctaaaatctgtgaagaaaccctggttgagtcttacaaaattatgtatgaaaaagggatacaggttacttctgaaaatagatgaatgtctaaaataaataaacaacggtctcatcaaattgtatctcttgaattgaaaattaaaaaatatgagattgtagtttgtttaaaagatgaagaaattaattcgttaaagaaagaacttgaaaaattcaagaaaaatattcaaatgcttaacttagatcttctatttttgacaataaagatcctgcagcaagcatgtttggaccaaactaaaaggtccgcaccaagttacaagataacaataaaggtgcatacaagcctgacgagtacaaagacaacttggagttggctcttctaccaaaatactggaatagagaacatctcgataagtgctctcactagccaacttgtatagtggttcctctaacgtttcatcgtgcaggaatccataaaagagctagtacccatcgctcttcagtgatggcctcccatcactttttagtgatggcctttgcatggtaagccctgcagaggtagccaaatataaaagaactagtacccattgcttttcagcatggcctcccatcactcttcagtgatggtcgttgcgtggtaagtcgcgcaggggtagtaacaatgtgatttcaaacgcggacactaagctgtaagcttttgttacacgtaagaccaactaagacttgttaacaaagaaaacttcttaaagttattctttttcagttctacatgcgtacacctggtagcacccccaagaatattcccaggcaaggtctatgaaacttagtgaattgtaagtgactaagagactgcaagtctgtgtgctcccttgggggtacctacaacgtacaatgcatcgaactagcatgaaaaacttatgcagagaaattttaannnnnnnnnnnnnnnnnnaaacctgcctctaagtcaagtgcaggcatacttcagcttagcatgaaaaaagtaaatccagatccttacatgtcaaggacataagaagatagcgaggataatcatatgtccataataaaaggctttaaggctaaacaataatagtgttcaaaaaaagagtgcctatatgccaaaagcaagaacatgaaagccttgaggttgaatatgaataaaaaattgattcaaatgcataaggctaaggccccacaagagtcgtacagccagagaagaaccgggcagagttcctataggaaccacttaaggcagagttcctcgcaagttccaagccaaaaagtagagtttcttgcaggttccaagtcatagacaaaactctgggcaactgtacccaaggttactcgccagataatgtcattgtacaaggttgggtatcagcaaagtacaagtctcaagtgtaacaacttggacaaatgttgagtcttaagttgaacatttgactataatagactcactattaagtttcatatagagtttttaagcaaaccacccatgagactaaggttgtatatgcctataaggccatagcaagattcttgctgaggtcgaaagaggacagaaagctggccacccacttggaaccaaggcctaagccgaccaagtttcccaagctttgagagggtaggatagggtcccatgactcaaccaagaaccgtccaaggtcaccaaacccaagcatgaattggctagtttcttagggtgaaaccctaaagctggccaactcccctgattgaatcctagggtgggctaggtctcatacaagacctccaaggccggccaaggatagttttgaatcaaaatgtgtgttttttttaaaaaaaaaattcgaatgtgttcttcgtaatcttcatgactcaaagagagagtcaagaagtcaagaatcagaatcacaacatcacaacaaaggccaaaatcaaaaattttctattaggaaatcacacattctagattctaaaactatcatgcggattaaaataccaaaaagattacaatctaacgtgagaatcaaaaagtttctaaaagcttaaaaagcttaaaacttatcaatggcaggttcaaagaagagatgttaaagaagtgccgatgaggcatatatggagagagaagatcaaagatctaaaagcatgtcatgcaaaaagccaatacttggctagacaaggctgttcaatagagcctactacaagcaagatgagaatgacgaagtccctatttgaccagatgttcaaacagggactttaggggaaaatgttatcccaaattttgtccacctaacgtggcatgtccacgcaagccaagatagagtacatgtagaatatagccttgccaataacaagacaaagtctcctttgaatgtatggtaaaatcgtcaagtagcaagcgaaaggagttaaccgaaccatcaagaagttgtaccaccatgtttggctggccaaggggagtctataggctgacaggatgagcttatatggctggacagggtttgagcacaagctagctagccaaaaggtgactttcaggccaaggaagggtctgtttgactaaggaagccaaacctctacaaggaaaagttgtacaaaggctggcctccacctacaaaggctaacctccacctacaaaagctggcctccgtctaagaggcttgccatcaccaacgctgacgatcacaaaggctggccatcaccaaccaaggttggccaacacatgcaaagacctggctaactctttccaaaactggcaggaacatgacctgccagaccctagtaggaacatggtcggccagacctcaacctgtaggtattgcatggtccaccagcctttggcctgataggattttgatatgtagctctcattcatggacagtaagtcaagtaacagattgggccttaacaatccacgaaaatagagagaaaatatatattttcaaggggcaatttattcatttgcattttgttaatttattatgtggataatggctttatttacctatttctaaggatattaggcatgtaagctctactatataaagagcattaggctgtctctaaaaccctaagtcattaagcctccaagctccctaagctctcaactctacgtctaaaaaccctaattctctcttctcctctccgttacacgccccaagggctctctccctctctctctctctctctctcatgccttcaaggctctacctctctctcattagatatttgcctactaattcatgcattgtactcttaagagagctactgcagattccacaacactgatctaagttgtattatctctagtatcaatacaaccaaaaggggagtagttcattacccgctaactaagggggttgaacctctataaaatttggcgtttattttactttattgttcttattgtgtaacacacagtaagcatcaacattaaatacgactctactgtcggttggccaaattttgaggtcaacaaaaccactcatatggagcaaccaaagttttctattacaaggaaaagaagggaaattgtgataataagtctattcagtagacttaacaaaacttcttgatcctagtatcataggttagagattatctaaacctaataatttacttactctaaaggaagtcttttggcttctaaacatagaatttatttatctaaagaacagtttcatatattctagaaaagataaagaacaaagaaagaattccttaagcatcaacagtgaganntctcatgtatgctctggtatgcatttataccagatacctgttgttgagtgtgagttgtgagtaagtattaacttagtctaggaaaggaatattggaagacaatcatataaatcttaagattaaaagaggaactatatgttagtctataagagttgtattttaatacttttaggctacaccaaacaagtttctagacttgcgttaatgctaaaaagtctaattatgagatggtgattattttagggtggagcagtgatttttggagaagtgtaaacactaatccggagtctctaactctactagataattattcatcctatggaaagttctatacaatttttggcattattccagttatagattaactactagtgttacttcctaataacacagatatagttgccaaacagtaaaaaatccaataccctaagaggagtaaacatatagaaataaatttcacaatatcaaggattttgtaactatgaagatgtaatgatagagaaagttggtattgaatacaaactgccaggccctattacaaagataatactacatactaaacttgatctggacatcaaggtattgagattaattgaaatgtacttttagttttatattaacgcaagtgggagtttgtt

SEQ ID NO: 23441 - DNA, 5695 bp, Cannabis sativa
  modified_base (4298)..(4304): a, c, t, g, unknown or other
actttgtctttccaattttgattttgtctatggctttgtttgatggttatattgactttgattgtgagttttaattattgtttgacatgtatgtattattaagttctatttaagaacttaaattttatcatctaatagtctgagaccttttattttttttaaaagtgcttgttatttatcaaagatttggtaatagatacaacaaaggtagaattaaaccaaaactttgaaaacatgtaagctggaatcagagaagaaaagaggagacactgcttttattgttaaaaaacaattaaaaaaaaaaatagcccaagtctgtaaaatagacaaagataggaaactaatcaaaccaaggaaagttaaccaaatcctaaattatctcctcttaaagagagtcaagaccctgatgcatcgcaataaaccaaaaatttctcttgatctgatggtaagactaataccagagttgtaatcaattgctgtttcaattcttgaaaactagcttcacacttgtctgtccaaacaaacctctgattcttccaacgtctactattatggactctaactactctgcattatatctcactttatttctgacattttgtatttatcaaggctaataatttgtatacatttaggctgatttagtagtcttgtttgttattttacaattattgccgctgctctcttttttttttctttctgaatgttcagtttcaagctgccatttcaagcactggtggtcgcatgaaactcattgaatccatggagggaatcgtaaagggtagccgacaggtatttgtctgtatttagaggaacaattgaaactggaaagtttttggctggttgttttaggaggtgcatgaaatctctttggtttaagttactataaatgaagtcctcttccttcttttatatcttttagttctatatggttttaaacttcagataacactaaaattaacttgagttaatccttttgttacttcttttcgttgtttgtataatttttgttaggcacatatgactaagcatatatagtggagtacttatcttcccttatgattatatcgattttttctttttgatatcgggggaagggggattcgaacatgggaccttctcttcctctttactagtgtctgtttcatagctctctaattcccttttaccttgttctatccaaacataacataaactttgcactttaaaaaagtagcttcaaaccataacttggcccggtatatgtttgacatgtttcgattcttcatgctttttgtatagaaatacatctaacgatccaaggggcttttattgatttgcccatcttatagaaactggaaaaagtgcagcttgggcttgaagaacagcaacaagcatgtgatgctcttaaaaataagtatactgcagaaattacagcacgaagacaatggtattcactcttgaaggtttttcaggtatgttctttaagggtttaatttcaattaaactatataggcacagtaattactgtcactttttttagcacctgtccttaaaattgacttcttaatatgttaccctaagcttagacaatcatgttctgtttgagttttcaacatgtttagtactcatgttgtataattgtgtttgtgttaaggttaatcgtgtcatatcataactatgttgacaccaattcgacacgataacacgaattaggtctaagttgatcttctcttgcaaaatttgttaaaatcaacaaatagcgaagtattttgtggatattttgaattatttctggcacgttctaaaataaatctttttgtagccaatcatttattaaaataaatgaatatacttaaacacaaaaacgaactaatagataatggtaatttggtcccgcacgtctgctgttatatctacaatgatcggacatactattattgttcataatgtaaaagaacattttcccacttgtggatcttaaaaccacgttattgttgtttcactttttacggttaaggaggaaaagaaactgataagctgttaggatcctacattgattatgtatgagattggttactaatatgtaactacttgggtattgtcctcttataggaatttcctatcattttgggtacaatcagtagcaagatagaaaaaaatagaaccaaatagtagcaacaatgaaaaatagctagtatattgatattagagtgacaaagagaacaagttgctgggtattcgagagacccagctctctcctaaaaagctaatgctcactttaacaaattaattctctcccctcttaccctcactactcactcatatatatagcatcaatcctttccattacaattactcaattactctttttatttattatcctaaggcttaacatcctcctttaggctagcttttaagaattgagttttaccttagtggttgtatcaagtggtatcaaagccatgcaacctcaagtagggccgatgttgcggaaggggcaatatacaggacaagcgacctgtggattagatccagaataggtcaccatagagtgggctaccttgaatgtcggctccaaaaggcggtgtaacaagattccacattgcccaagtatggaattagttagcaatatataactacttaggtactctcctcctttaggttcgcttttgagagtgagttatacccaaatgaatctatcataatagatagtacaatttgattccatttattttcagttgattgactactttctctactgagcatgtagtaatgttttacaatatttacgctatgtttatagttgctctcatttacgttgtttggtagtgtcaagttattgagaaaaaaaattaaaaaactataatattatccttctaaacataaatatttatccctttttgtatttaaaatattttatttggtctttttcttggatattctcaaaatgggagggagaatgtctctttcttcctcctctttatccatctatatttttctcctaccaaacatagtactaagtaagcataaggaagtaaaattatatagagaaattgatttagtgatgaagattaatattgtgtcctaatttcccatttaataatgtacaggaggaatgtgcaaagaatgagagacttagaagcatagcttcataggttttgtgtacatagaaacatatgtgacaaaagccatgttgatgtgttgatccacctattgatgtgaagttttccttttcttttttcttttgcacaaactacaaaaactattattctctcttttcatgtacaaaaacttgtgttgtgttcaattttttgttttatatatttactcacagcatatgcagaaaagaaaagtacttatatccatttcttttggctgttgagagagagaaagcattcttcattaaatgctcaaatagcatctacctcgaaatgatctgcaaaagtgttttggtaccagtggccgagctagccacctattttagtgggggcaaaaaaaattagagtactaatattgaaaaatataatttttagtggcataaatataaaaatattttattggggcaaatgaaaaaatctataaagatattaataaaaaaaacattaattttttggagacaaaatgtgaaatattcaaaaatatgtatataaaaataaaattaataaaaagttaaggaagggcaaatgacctcacatgtctttccttggctccgcctctaatctgtaccccactcactacacttttactcaaagtcaaaattcaaagtattaagtttgtaagagacataaatttattatctaatgatttttttaatagcataagtatctaatgctaataaaagtgtaatttttttctagttatatcaattagactaagattctatgtttttgagtttagatgaaaatatgtagtatgaattttgtctaaattttcttttaataaagtcaaaattgagtgtattaagaaattgaatgaaaattacacttttaatcttttataaatattaaatacttatattaaaaaaataataagtagatttatgtcaacacaatttttttaatatttgtactgtaatttagacaaattttccattataaaagtaaaaccatctcccatggttaattgttttggaggatgcttattatgtggattgtttatttagtaaaatacaaaaatattatactattagagataagatgttatcataaaaaattgtattaatctcactacatagtattgatactatttttttttaaaaaaaaaaataaaaattaaaaataaattaatagagtgataatatttataattaaaataannnnnnnattaaataataatgtgtgaaattataattatcatattatttttatataataagaatacttttaaaattagaagtgtcaaaaataatatgaaaaaaaaaaaaaaatttaacacttatatgttagctaccaaatatatatttcttttcattctctcttagtctcctcttgattctagaaagattgtgtaatgattgtattactcagagtatctttttgtaagatacatacaccaaagagttggatttatcataactagaaacttaattaagaaactcttatttttttcacaatatggaatcttattagtagagagaattgattgagggagatttttttctcataataaacaatttcaatttctttaaaaaaaaagactatataaaatgattttttttattatttaaaataaaatatataattatattaaaaataataaaatagtaattttaataattattttactctttattctttcaattttatttttaatatcaaacagaaagaaaagtaaaaatcttttccgtcttttctactctctatcttttcaaaagtctccatctttctctctctccttcctacaaaatttagccctaggttttctaattaatatgcatggtttggattttctctctcatgaaatagcaacacttttttcatgaaatatactaattctttctttccttgaaaaaaaatactttataagataagagtaggtctattattatgtgagaattagaaaaatgtaaaagtaatatttcacataatttattattattattattattattatttgtaagtataattttaaatacaaaattattttctcttaatatatatattagaatttagaatgaaatagactaagatgaatgagtgtccattgtataacgaatgacttttaagagaccacaagatcaaaacgtaatatttgaaagaatttcacaagattaaattgcaaaatctatgggtgtacatattgagaaaggctcacaatagatcacaagcagctttgataccatgttagaatttggaatgaaagaagctaagatgaatggagttttatcttaaaatcaattaacaatgagagaagtaactcattcatcttatatatatatatatatgacattttacacgtgaacaatgagagactaactctaataatatatctatttttagaattctaatagttatattgtatctaacaatatttttttgtgttttatttgaattgtgccgaccatgaaaagattaataagagagattattacattgaattttttacttatctattttatttatttatttgtaacaagacttaactagtgttgaggtacaatgatgattatttagaggctaagatgtaggtataattattataaaatatttaatat

SEQ ID NO: 23442 - DNA, 3286 bp, Cannabis sativa
  modified_base (3231)..(3247): a, c, t, g, unknown or other
atgatacttgacccctctgtttttatgggagtggctgatatacatgatcgtcatagggatatgcgactagatgtggataacatgtcttatgaggtaagctaaaatgtgaacagaattttaattcatactcatttatgtttacacttgtttcactaatgtaatcatggtgtaattataggaactgcttgctcttgaagagcgaatcggaaatgtgagcaccggattaagcgaagaaaagatacttactcaattgaagcaaaagaagtatcttatagcagaaaagtatcaatcagaggccgaaccatgttgtgtgtgtcaggtaatgatcttcaaatattagtagtgtttcttgcgttccatgatcctcaaatattgttaagaggctagtttaaatatatatatatatatattttaattttgttggttggttgaattatatactactatatatgcaggaagaatataaagaaggagaacatattggaacacttgaatgcggccacgatttccatagccattgcataaaacaatggttgacgcacaaaaacttgtgccccatttgtaaaacgacagcgttggcaacgtgagaaggaagacacattatcccttctagtctttctttcagttggaaccttcaatcttagttcttcacaaaccacacctcaccacaaggccaatagtgccagaacccacattttttacgttcaatatatttttaaagacacgattgtttggagtccaacccgaaatttcgagttgaagaaaccaacttagaaacaactttcttttatttatgaatggactggtttatcttatctaaatttaccagagcactcttttcattttccttttgtcctattaaatttcttatagcaacactagacagtctttttttttttccttgaagtctagacagagtcctatttggtatagtggattgggggaaggatggattaaagggtgtggaatatgaagattattagggataaatatacaaaaatgataaaaagaaaaattattttacggatttactattattattattattattttttttgtggattttattatattttttttacaaaaatatagtgttgttttttttttttttttgttttgtttttaaagttgttgttgttataggaaagtaacgtggtttatgtttacaattatacagaattttttgttgttgttttagaataatgttgtttaggtgttagtatagggaagtaacatgaatttatttttcgttgagaaaaagtgaaaatttgtaaaaatgtaaataaaaaagagaggtctaaaaataaaaagaaaaaatcgtaaagttgtaaaagaaaaatttatttttaaatgtattatgtaaatttttgaatttagtatggattgtcattttcttgtgcccaccaaacatgactatccagtatatgggtggattaatgaaaaaatttgagaatttattttttaaaataattatgactaattttcttaatattgttatttattctaaaatagtaaagaattatacttctttcattccttcctattttactaaacaatttttttttttaaataaaaaaccaactttaccctccctccatgaaggtaaccgcggggaactatggttattttaggctttatgccatgtttgacaattataggtatgttttttcgataaatttgtctttatttaatatctctctcctttaacactatccaattttgtaaatgatattttatactgaagaatgatatatgcacacacaaatcaaatacaaactccatatacttatgtagcatgtaatttcaagcaatcatattcattaagatgagttccacccatcaaaagtaaatatattgtgtgtgatttatgtgtactatatcattactcttttgtcataattctatgaatctttatttttaaggcagaaaagaatgtataaagatcctttagcaatgatgagaaaggaaaaaaataaaaatgaaattaaaaaaatatatgataaaaaaaaagatgtttagtgatggtgtcgtttgatattttacgcaagtaaatcattgcaaatcaatgtttgatgatagtctgcgatggtttcatgagatttttaaagcaaaaacgatgcaaaatgatatatcaagatttttgaggtaaaattatgcaaagaagattgtatgagattttttaggcaaaatcaatgcaaaacaaaaccatttatagttttgctataatttgagatttttaggtgtcattttttagtttaattttgctattttttaacatgcgcaagtgttcagaatgtgtagagctttaaatttgaggagcataacaacaaatatgagatttgtgctattgtgtgcttgaagacataatcaagattaacgttaaaaatttgaggggcatgacaacaaaatttaggttctacacaccctaagtttaaactgattttaatgcgtaaaaatattaaaagaaaaccacaaactaacatttgagtgaaaatttatacgcgaataaaaaaattattaaatttatggtaatcctattacgtcctatttggcattgttttgcttttaaaattaaattttcatagaactgccgcttaagactttgttaaccatccatttatcaccatttttttgccaaaaaaacataaaagtattcgtagcgtcaacatcattaataaaatatttttccttcctaaaaatatcaagtttttctgataccgtcactagattattatattttttttatgagataaaatgctattatattaaaacaaaacgttataatataatagatattagataaggcggcacttcctccaaccataaacaatcagtgtccaccgaaagaccgtgctcaactaacaaatgagcatcattattcgcagatctgtaaatatgtgagatctgcagtctaggaaaattagacactcagagaaatatttactaacaaataataaaaatgagaagcattagcttgagtagattgtaatcctttcaccaccataagagaatcggtctcgatatagtgaataggtatctaaagatctttaagccattatagactatacatcaaagccactacctccataacctctggtcgaaaatgaaaaacctaacagtgtcaatttcttcttagttgattttaaagaccaattcttatctcagattgcaagaaataaattagaagatacagatttacaagcttcatcttgttgggaatattttaccagnnnnnnnnnnnnnnnnnaagtatgttgattaatatcctaaatatgaatatctctaa

SEQ ID NO: 23443 - DNA, 1539 bp, Cannabis sativa
attggattggattttgaaatctaattcgattagatgggatgataattttctaaatccaattactaattggattggatgaggaaaaaaagtttaattggatcggatgctcacccctacaagtagctattcaaaaacatgaataacaagcatatttactgcattattaatttattatatattttgttaattttagtaattattttaattttattttcatattgtataattttttttattgtattttattttattaaaatttcatatcttttatttttttctagtcttaatttttaaatatatttatttatattttataaatgtattttaagaaaatgagaaaggaaaaaaattaaaaaattattataaattaaaaatatatattttatatgaaattaaaatataaaaatagagtgtagagtacaaataaaagccccctcaatgtagcatttgaaaaaattattccaaaatttacaaaatatctcaaataatttcaaaatgtagaagtagcaaaaagtttatttttagatttcctatttagtgagaatcccacgttgatttcaagaattaaaatctcctattaaaaaattgtgtgtcatattgtgttaaaccaatttaagtttgacacgtcaattaatttttcatttattaaaaaattaaccatctatctaattttttttctttctaaaatactcaaattaattgatgtgtcacaataagattggtttaatacactataaaacacaatcttttaacagaactgatttcagcctctttaaatttaataaaacttattataaattattcaaatatatatatatgataagaaatggtaacatttctcccactcacacacaacaatagaaacgataaatatagtagatttacacaatctttaatttgcttatttaagcaattcatttgctttgttcaaccaaacaaagtaaatctcttcaagaaacataacaaagtgtacctgcaaagaacaaattaaccttaatatttcaatttcaaaaacttaacaactcaatcaatatataaaactgtaagaagttactaaaccataaattcataaggtattgataatagtagaattagaaaatcaaatgaaaaaaaaaaaaactgaacttttatgaatgaatgaataagactaggtgtgtttggaaagccacaatgtaattggatttgtgtataattggaggtaattacacaatttggcatgtttgtctagccatgtaattatactgtaattgtgtaattactctccaattctcatggcctcccatgagaattggatgtaattacacagtgtaattactaaagactttccatattaaacattagctactaaaaaatattattttcccatgtaattactaactattttgccaaacaaaatattaggaattcatatgtaattactgttagaattattattgtggactaatataattatgagcttaataccataaacacaatcattaactatgtgcccaatattttttcactaccataatgataatcatatattatgttagaggc

SEQ ID NO: 23444 - DNA, 5804 bp, Cannabis sativa
  modified_base (3606)..(3608): a, c, t, g, unknown or other
ttttcttttttttttttttacagatgaacctttaattaggagctaatcatattcccgcacacggttggctaggtgaaaaaccttggtcgtcaccttccaccgaaccctcctccaccccacgtgaacccctctctctctctctttctctctgtcactttctctctcttctgatccagtttggacttctccgtactataatgggtttctccaaagtctcatctttttttcttttcagctcaccgagctttcactttcaacaatggagtaatagcaccccgtgaatttcaaacgaaaatccattactctgctttctctctcggagaagacgctctttccggagtctagctataatcacttcacttgggaattttttcttcttttaattttatttttattgtttaaatgaaaaatatactttaattaccactgatcggagcagtaccattgaagggtgggagcttggtcgtcggagaagaagttacaggcttcctcggcaaagaaattgtgctcttcaatcttcacaaactgaggctgaaacgacgccgctttctggaactgaaagcagttggaggaattattattattattattagaagatgaagagcagttgaagttgagggaagccgaagccgaagcagccggagtttggagaagggcagttgaagaaatggcggcattggggctgcaactgctgttattattattactattgaggtttatgtcgtcgttgagaattgcactggagtcactatcagaagaaccgtctttgttgaaatcagggaacatggaggagacctctaaaacgacaccattattagtgtcgtttaagctctcaaagtttagttctttacactcctcagatggacctcagatggaagaacatgattatgatgatgatgatgatgatgatcaggatgaggaacagcttgtttgttctccgactctgttggtccaatattatgtataagtactagctcttctttcaccgacagattgttgctctctgacttttcatcttggagtttggatttcaattcccttatctgtataaatgtaaaaattcagatccattaaacaacaaagtataaattgacacatatatgtagtgtgtgtaaagtaataataaataatggtacctctttaacaagggattcattatcatgtttaagagtgtcatagctcagcttcaaggcatcgtaatttgctttaagatggccataatctctttccaattgctttgttttccacctagctctgcggttttggaaccaaacggctacttgtcttggttggagaccaagttcttgggcaagcttaacttttctctctggttcaagcttattctcaacctcaaagttcttctctaaagctttgacttggtcaacgcttaaccttctcttcttttcggagacatgcccagattcttctacacaaccttcttcgtctaaaccgtccaacatggacctgaattctctaccataaatatggttgctactcgggctatgttcctctaaaaggaaaccaaaaaaaaaaaaagtaaattagtgaaatgggatcttagtttttactgaattacgttctaaagtagtacactcaaaacagaaaaaaattaaaaacccagagaaagaaaaaacagagatgaatatatgaaaagttccacaacaggaagcaaaaaagataaaaacttgtactagtactaggcaaagtgaacaaaaataataataataattaaaagggttctattcatgtattgaaaagaatatgaagaaaaaaaaaagtaaacgaagtaataataggattctttgttatgaacctgtagttgggcagacggacattagagcacctagagaatcatcgctgctaagcctcttcatgatgactgagaagaaaataataacaaaaacttctgagcaaatagatcttattatagatcaaaagctcttgactttttttacttttcttttattttaagatccttaatatattttcagtgggtcttttttaaagctgggattttgtttttgtgtttctttttttcactttaagcaagcaatgggtgaagaagaagagctagtctcatgtctgaaacaagaccagcttgtacagtgattttggtgtatgatgatgatgttactacacaacaacgtgttagctctctccattttcccatctttctcttttttcagtacatcttctacttctgaacccatcaaaagataaagaagaaaaaaaaaagtactcacaaaacgaatccaatttaactatatatgtgtttttttttttgttctttattttgacaactaacaacgaaaaaagaataacccaaaaaaagaagtaacaatgaagatagctctctctcacaatacaaatatttctctctctacatcattactcaatcagtttcttagaagctagttgggaagacagtatagtctacgactgttcatccacaatggaagagaaagagaattgtagaagaaagaaagaaagagagagaggagttttggtttgagagttgggaaggtcagtgaagcagttcacaacccagctggccttactttctctctctttaaataaaccaacttgggtcagttatggggttaaaatcttaccaaggttaagttgactgcagttttagattattatcattattattttattattattaattctacaaatgaaatgaacccaaaattcaatacaaatgcaatttctgtgtcaccgcctacagccggtggacaccccgttttcgaccgttttattagggagacttttgattttaacgtttgctgtggaaaaacattaaacttaaaaagtgaaaagaaaacaaaagaaagagagagagagagagagagagaaaagaatagtgcggctcggcgtctggcgactcggcttcgttttagcttcggaagatttttgttgcgtcagcgtatcaagcccgcactacggcgtggtcggtgtaagtaatcggcgatttcaatagttttttttttaggccttatttgtttgtatatttatcgtatttttaaactttctttctttcatttccttttccccttgaatttaggtaatcagcttcggtttaccagttctctatacaaccgtacaaacattttcttcttacatctttttcagtgctttttttaaaataaaataaaatgtgagtttaaaaaatcaaataaaatttctcaaaaaaaaaaaaaaattattatatttttttcaaatgcataaaataaaataaaaaaaaaaactaattagtaatttttttctctgaactttaacatgtatcaaatcgtgacctctgaactttttttgctgttataaattcctcttgaactattgagattgttaaatttaaagacttttgtttaattttatttaattttactatttcagtgattgtttatgtactatactacgctccttagactttgatatctaccaaatcatgccacttaaactttgatatgtactaaatcatgccctctgaacttttattcatgttagaatttttttactaaaattagacaaaagtcatcaaatctaacaatctcaatcgttcaggaggaatttttaacggcaaaaaaagttcaggggacatgattnnntacatgtcaaagttcggaagaaaaaattactaattagccttaaataaatagtgtcaagctctaggaccgacaacgggtcagacaataacacgactcgaaacccgcgcgagagttaacgggtttgggtttaccttaaattggttcgagttaactcgtctaacccgtttaataaatgggtcgtgttcgggttgacacgactaacacgaacctgacttgttaatgacatatttaaagttattttagtactttaacatatcataaatgggttataaacgggttgaatatttcataaatgtgttattggttgacatgtttaaacaaaatatgcttataaatgggttgtatttgggtttctttttctgatacgattattaaacggattgtgttcgggtcgagcatatacctgttatacatgggtctcgacacgacacgaacacaacccacaaacacgaattgtcaccctatcaagctccaacaaatatgaataaaattagaaaaattattttatatattattttttttatttttatagtttgaattattttgatatttaagttgttctgttaattgttatgagagttgttatgtgaatttttataaaaatataaaataaaaaaattattttccaaagtgtgacaaattattttccaaagtttatttctcaccagatatatttggtgttattattattgctatttgtgtgtttctgtctaaacttaatcttgtatgtttgttttattattcaaatttgtatgtaaataaaaaagtacatatctacttttgaaaatttactaaaaaaaaactgaatttaagatagcctctcacgttctcgtgattattttagacatctaagaaaaattatatgttattattcatttgctataatcagtttatatgaaatcgtaggtaaactatgcacctaattgaaaactctctttacctttttttttttaaagaaaaataataataataataataattaaagtgtatttattaatgagaatgatctcctgcgatcaaattgaactgtatcaatccttaagctaacattgaggcgaaagaacaaacacaggttttccgataattaaatgacattattattattgtcagaactttattaaatgcacttagactacactaatgaaaatcactaaacaaaatatgacatcatgtgcttattctatatagtatacttaaaaaggaattatgagctaactaggtagtagggattatattgttaggttacgtataggtaacataaattaggaaatagtttcattccaacatgaaatgctgtctaaattaaagataagtatgggtactatacactattccttgttgcgcttttgaagttgtgaaaacttaaatggctatactacatttttctttttttttttttgagagggctatactacatttttattagtatatgaatttattattcgatagaaaattctcaactcgacaacagcttactaaaattatttgatggaaaagtagattgaatcttttcacggccgatgaaggaaaacaccgtactactactttactacaccaccatcactgggttgaagaacaaatacatgtataccaaatgtacactacaaaaaattactacttttggtaacaatttttaagtcacgatatattttttttacgactaaatgtgacttttaatcacaataaaatattccttgtgactaaagggtggtattcagggccggcccaaatttttggcagcttgggccattgcacaagacccccattttctaaggcccaatttttttaaaaaatgcctatttttgttgttttacatttttatgttcaaagtttctttttaacatgtttatattattttataaaaatacaagaaaataataagaaatccacatgaaattagcaaaaaaaataacaacaaaacaacataaaaaaataattaatataatacaaacaaataaaaaaaaaaatcaacaataaaataactaaagtacaacataaaaatacatcaaaagatcatattttctgtaaataaattttaaaaaccgtaaaaatatttaatattatgtatgatcattttttctgtaatttatttgttgtttttgttatttatgaaattatccctaaaaaaattataattaaaattttaggaatgtatcttaaaaaaaaaaatagtaatggatttgtggtcttaaggta

SEQ ID NO: 23445 - DNA, 1818 bp, Cannabis sativa
  modified_base (1788)..(1793): a, c, t, g, unknown or other
taattagtgagcctaatgattctgaatgaatgcacgaccagtcacgcatgactaattcatcagggtcctacacatatattagtgtatatataagctcagcagattttcattcaagctgtagatagtataattttggttttcttgattaatacttactgagtgagttgtacaggtcctcgaggattgtatttttgggcaggagcgcagggccaatgagaagaagtacaataatcattggtagtagtcccgttgatatgacaatagccccatgtatgtgactcagtatcagaccactcactttcacctatatatatataaatacaaaaataattccataggcatgttattagttaccaaacattgattgatattattgaacaataagtaattacacacgagatattacctgtagttgcttgagaagttaaagcaaagaaagcagcgatctccctcttacgagttgacacatctccagtagtagcaaagctaggaaaggattgagtagcagcgacaaaagcctcgtagctataaaagccctggctttgacaatcacttctatgcttaaacatttcgttgtaaagtgatttagtgactattttggttacagaattttcacgcacagttggtgttgctgcgaaccagcactggtatcggcagtttccgcccctacaataatcggatccgctaccacaaaagttgtggatactgcaacaccttccgtctccacatggaggattgccgaatggaggaccacattggtgatcgggtctttcatctgcataaaccaatccaaggcataatatattagccaaacatagtgtgatgatgaggctgctcaacgacttcatatctttcttctcgttttgtaagatatgacaagtagcaaagtttgagtagttttgttgtgtgtgtgctttttgaaagagggtttcatggctatttatgggtgaggtagctcaattaattaagctgtctattataatttacacttacataaatattaggtagagaaatgctaggctgcaataatatcggctcttacgtaatcactcatatatttaaatatttatattaatttaattatgttttaatatgtgaaatatactactatataatatttttgaactcatttaattaatattttaataaaaatgttaaaaggtactagtggtgtctagcaccatcctatgtgtcctatataatttaatataagaatttttagagagtatcgctagtcaatcacaatgtaacgtgtcaagtactagacactactggtacctaatagcaatgctcatattttaataatgtggaatctagctttgaaaatattatttaatttaattatttttgaaatggatatttaatttaaatttaactttaaatatttccacattgatattatctaaattgcattaatgatatattgatatgacacatcctcaccgtaatgacttatatatggtaatgttatactattaaagagcatttcttttgagtatgtttaacacttataggtggcgtctttttattagttatttatattttttaaaaattagtaaaataaattatataagttgatgcttaatagtattgaaattatatttaaaagtgtactaggcactcttaatatttattttataataaagtattattattgtcttataattggttagagatattttataaaaattattatattatattatgtgaaatttgatattgtttttcttatgaaatgtgaatatttaattattctaataataatataagggaaaaaaacagaaaaannnnnnaaaggaaaaaaaattacaaaaatac

SEQ ID NO: 23446 - DNA, 2256 bp, Cannabis sativa
attgactaaaagtaaattggttttaaaacagttttcaaaattcttgttttttgtaactttgttttctgaaaactgttttaaaaaaacaaggccaaacatgtcgaattgttttcaaaaaacagttttctgtttttaaaaacaaaaaacagttttttaattatgatgccaaacatgcacttagttaccttaattttttttattttttttctaatttcccttggctgttctttttgatatttttgtttcccacaaaataattttcaaaaaaaattatatttttgtaaaaatgaaaattctccggtgtcaaaactactctctcccatgccaatatgccatgtttgatccaatatgtaattatcttaacaattttttttcaaaaatatatatattatttgtttttttacagcaactgtttcatgagaaattaaataattgtgagaataaattagcaatattttgttgtcgcattgagtaaactatactctttggttgatgaaaaggaataattggtgcatcgaagagataagagtaaaaaaaaaagagagagacagtacaaacaatacatctcagctcagtcaaaaaaaaaatgtaagaaccaaggactcatttctacgtagtttttaataagattctttttcttttagctcaattccccaaacttttaaaataaaacatctaagaatactactatagtactatacctacctcattcacattattaattaaataataaaagtgaaaaacaaaacacaaaaaggagtgtccctctcatgtgtatccaactagtgctccacctttttatgtctcttttttattttatttactcaccacaatacacaaataactatagttttactacttaaaagttacaaatcaatcaccacaacaaatcttgtatttactatgctttatttccaccttagtataaaaaaaaagtttaacgacagtaatactttttgttactattttgtgaaacgacaaaacatgttgttttgaagcatatatattttgtatgcaaatgaaataaattaattttaaaatttattttcagtattgtgagttatttaaatttaaataaatattattttagatcttgtgttttgtaaaaattataaattggatattctgttttgttaaatgataaaatgaaccgcgtatttttaaaatagtataaatagaatcttaagctcaattttcgataatttttttttaatataaccaacttgaagaaaattcttaatacgaacagatataaaaatttaatcagttgtatcataacacatctagatcagattattattaaattttattttggtaaaaaatcaattcaggatcctatttgtatcatttttgaaaatataagatccattttattatttaataaaacaaaaaattcaatctataacttttacaaaatacaaagtccaaaataatacttaccaaacaaattttgcaaaatttagtgtaaattcttaaataaataccatatatattgtgaaattataatttacatggcaaaataaaaagcacttactagggaagacagaaggaaagcactcactccctttttacattgaaatagtaagagttgttagctggctcctaatatttcaaaataaaataaaagagtgtagaagaatagaagcatcatattatatatacaaaaacctaaccaaatataccaatgtgtttttgttactacctttgggaccaattgttattgtcagcaaactacaatcttactcttataccaaaaccaaaaaacaactcccaaacgtgtcaaagaatatattaaataatatataaacaacaaagattgtgaaacttgaaataaattatgtaaatatagttttatattgtaggattttttgtttttttaactggttttattccagtctaggaatattaatccaagcaagtttgataagtgataacatataatatactgcatgaacatgtgcataatataagaaatatatataatatgatgaaaagtaaaacttgaataagtagaaagcaaagtaagcctatgttatactttaatatatatatatataagtataatattataacatattaggggcatcatgtagatgtatagattattcttgattgcagagtttagcaccatagaataatacttatccattaggagaggaggaataaaataatagtgggatttttttgtttttttaaaaggaataatagtgggaaacttgagtacttaatttggatgtgaaaatactattgacaaaa

SEQ ID NO: 23447 - DNA, 1679 bp, Cannabis sativa
aaaaaaaaaaatcaaagaattatattccaacaaatcaaataaatacattattctaacaacacatttgtaaaacaaaacctaaccacaactatatatacaagaaagaatctaagtaaaaatttataatttctcaaactattctctatttggattgccaatattcatccatatatgaatattattattgttgctttgaaattcatactcatcattgtttgttttacactattcattcatatcctatatatattgtgttatagaggcatttattagttaaagggttatatatgtatatatttagttaattattagatatataatactaattttactaattaattaattaataataatggttagaaatattattcttttcttagagttatggtaatgtagatatacaaagatttggtttcgtgtaacactagtggagtggagtttaatgtttttgtcataacaaacgtatatttaaagtaatatataaatatatatatacatatcataaatgcatgtgatgtgagagattttaatagtacaactcttatttttaattgcacaattaatttgtttcaagaaaaaaaatcacatttaatgtgataatgatattgatggtatgtgatttttgcttactaattttgatgaatcactatataataatttatgagatttgttaaatggtattgttggtttttagtattttcttcagtgttatatcgttattggtgtaattaagtatcgaattttatataacttatgaaaataactgtaaatatcgctaacaaattataatgcgccacctataaaaaatactgaaaaacaatagtcctcattaacaattctcataattataagtggatgtttttcaatttgctactatttcttggaaacttaaagtgtcgtttgtctttttgctaatttttattttagatcgatttagataatgttaaatatggtataagttgagaaatattttttttgtattcattaattaaaaatatccttaaaatatatttcattaaaatatacctatttttatgagtgggttgcccaatacaccctcactctctacttaagtctaatacataatttgaattaatttaagggtgtaatggggacatcatctataaaagtaggtatattttaaaaaatataaaaataaaagtaaaaattaaaacatataaagtaaagtgagtatacaatataatttttttgctaaatacgggcttgggctgggcccattatcgagaaagagtccatttcacaagtccaaggagatttcttacctcaaaactatatgataataaaggagtaacttcttattagtcttgtaaaatgatcaacaatctcttctttattaatgtaagatgctcacatgtgatatttcataggtccaaaacacacttttgattaataatgtgtgttgagagttataaggtcataatactatatcaagaatcacatatgattctattttaaaacctttttttttatagagaaaatagtctcaagaaagttacctttagagcaaataactcaagaaggagcaaaggctaaagcaactttcattgaaaatttgcatttgccaaaatatgtcaccaaatacaatttgaataaccaagccactaaactataaacaaaatgcagtagtgttcaaagcatatttagctaaagtatgagca

SEQ ID NO: 23448 - DNA, 1397 bp, Cannabis sativa
catgtctcgctaaatcataatgtctacgcaatctttcaactgtgaacagtttctaatatcagaacaaaaatcctagccatatccacaggggattaacatgcataattttagaatatttctatcatgaacctgactcgaaacatgctttcagtagatcttgttaatgtgacaaatctcaatttaaagagttacaagagatacgtatggggtgtttggtatggggatttgggttggaatgagaatgtaaaaccaaatatatgtttggtataattttagtagagggcttacaattaagtggaccctacttttaagtttatttttgagtaaatgtcaaacatattgaatacttgagtttgagattgccttaatctcaaccccgtacccttacaacaaaaacccactagtgaaactcttacacttatgttgatgtcacattgtcaccacagatagaattgcctaatgaaagtgaagcggtgctttttgtttcgtttttgtgcattgtctggaattacgtgatggtaatctaaccaaaacagtaaatcaattgagaatattttcaattcagagcacaaattcaaataaaagtaaattacaaaaatgtatgtttaacagtccgacaaaatagaagattatacttacttaaccctttcgaaatttatacccatccgtttaccaccatcttggcctaaacaaaatcgtaggtatgagtaaacaaatcaataaacagtttttcttcaatataaactactacttgccacagctacgaaaaattgaacagaaagaaataataaaatcaatatacaaaatggatgtggaagcataagaaactatcccaaacagcaatataaaattaagtaaattaatatttgaatcttaaatggaattgagaacccgaaaattgaaatgggaaaacaaaaaagaagaaaaagaaagggaaatcgatttaagaataagaaagcacctggtaagggattgtaataaccaagaacttcaaggtgcttgccgtctctaggagacctgctatcagccgccatgacccgataaaatggcttgttcttgcatccgaaccgggccaatcgaatcctcaccaccattttcagtgaaatttaccaatcagtgtcggcgcaatacttgatagggagaaaaagcgaaatgccgcgtgggtgtcgccctgctgcgtggtgtcgggaagaacaggatatgataaaggagacagaacaattttcttgcgccggcgtcggcgtggggagggagaggccaagtttaggtgcgctagtagtatttactatttggtggtcgttagccgagagggaatgaactagagaagagggtctagtttagggtttttctgtttttatttttttttaattttatttatttatttattcttttcaagt

SEQ ID NO: 23449 - DNA, 3339 bp, Cannabis sativa
  modified_base (697)..(699): a, c, t, g, unknown or other
tcctggtaaaatatattcaacaataattctaacaacaaatgttgtacaccccgctgtataccagtctgcaacccatcatggatagccaaaaactattattcattgtgtggttatttgaccttttagtaaaaaaaaatcacatggtttagactatgggtgaacatcataaatattatttgtagtgaatgcttgaattttaatattaattaaacaaatacataaaaactaaactgtaacgtgagttcttaggatttttttttaggaatttccttatttagatgtaatacttcatcaaaaattattgaacaataaataaaaataaaatttaaatatttttattattatatatgaataaatataacatatttgtaataagtattacatgtaattaggttagatcgattttttaataatttttaaagttttctccaaaaattgatctaatctaaatagaatataactactcacctccaatcaaatttaattattatggatgtctaatttttaataattagattgaatttgattgattctgtgtaattggattagtttagtgtaattagatgataaatcagatcacaattattattaaagctaagaagaaaaagttttaaagtttacataaaagtataggtaaatactatttttgactctgtattttgtaaaaattaccaattagactctctattttgttaannnacaaaatgaaccctgtattttccaaaattgtacaaataggaccctgagctcaatttttaaaaaatttattttttaatataaccaactttaagaaaatttttaacacaaacagatacagaaaatataaccagtgttatcataacatgtgtcgattggattattattatattttattttgacaaaaaatcagttcatgtcctatttgtacaattttaaaaaatacagggtctattttatcatttaataaaatagagggtccaattaataatttttgtaaaacacagagtccaatatagtatgtatcttaaaaatatttaattacaattaaacttagtgtattattatattttattttgagaaaatacaatatttaaattataatttaattaaataaagagaacgaacaattatttttaaaatggaaaatgaaatttatattttatagttatataaaagaagaaggcaaaatgatgaataatatactgtggttgttaacatttgattaagtcaatatgaatattaacacaaggatcaggtgccacattgaacgaataaaatcattaataattatgattatttatatggaaaagaaatacaatgaaatgaaataacttaagaggccaaggcctacccaagcaaaaatttcttactaaagtcttgtcttgtatattttattaaacttataattaatcttctattttattttattttatttttaaaaaaaattctttgagagaaaatactctccttaaaacttcaagagtaaagaaaaaacaaagagggaaaatattatttactttttttttttgagggaaaaaatattatttacttcataaatgagatttaatgaaaaaaaaagtaactataaaaggttgtaacgtatatggtttttcgaaaaaagaagacaaaagcttgaaatattttctttctatttattaagattatgagaattattgtttcaaaaaaagaaagattatgaaaattatttttcgtaattgtttttttctccaagtatttatgaaagatataaggttgtccatttttttctgctcaatatacgaaaaataattgatttattcgatctttctagatggaaaccaaacaaaatagacaatatatatccactaatgtaagtatgttacgtggcacttatctccaatgtacacgtgtcaatcacacagctttctagcggctgattgcttcacttttttagaagttaaacatttttttaaaaaaattcacagcctgtcaaccaatcagctgttcacgttgtaattattaaattaattaaaaataaaaataaaaccgggaaccgtctatatccagtttaacaagcctcatgtgcttcagtataagtaagctcagagaggtgagatgtggaaaacaaacaagtactataagcccctctctctctcatcctccactcgtgtaccacacaccgtccgatcagcaatcttgatcatcatcacaatatcactatgccgatcagagacatcgccgtcggtaggcccgaggaggcaactcaaccagacgctttgagggcggccttggctgagtttatctcaactctgatcttcgtcttcgccggttcaggttcaggtatcgccttcaacaagctcaccgacaatggtgtcaccactcccgccggtctcatctctgccgccatagctcacgctttcgcactattcgtcgccgtcgcagtcggagccaacatctccggcggacacgtcaaccctgccgtcaccttcggcgccttcgtcggcggtaacatcacactcctacgtggcatcctttactggatcgctcagctcctcggctccaccgtcgccgccttgctcctcaagttcgtcaccggtggtttggtgagaataacttttttactgattatttattaatattattataagtttgttacgatttagttagttagttatggagtagtcacgagctttatttttaatgtgggttttgattcggtgtttcgcaggctgttccaacattcaacttatctgctggagttggagtatggcaaggattggtcttcgagatcgtgatgacctttggattggtttacacagtttacgccacagccgttgatcccaagaagggtaatttgggcattattgctcccatcgctattggtttcatcgttggtgctaacatcttggctggtggggccttcgatggggcctcgatgaacccagcagtgtcttttgggcctgctttggtgagctggagctgggagaaccactggatctactgggccgggcctttgatcggtggtggtattgctgggctcgtatatgagttcgtcttcatctcccacaccggccacgaacagctcccaaccactgattactaagccatttaaaacgatgctttagtttcacggcttggtgtatttatttggtttcgagggttttttttcttttcattttcaatttgtgtttaatctccaccgttgatcttttcattatctcaacaaaatcatgatcattttgatctttctccctactctaccatgttaatgttttgccctgtattgcattattgtgtgtgattattcgatggaagacagggtgattgaattgatcatttctctcagttgtatttattattttagcttttattttctccctt

SEQ ID NO: 23450 - DNA, 2420 bp, Cannabis sativa
  modified_base (268)..(281): a, c, t, g, unknown or other
tagaaccgacccagacctggacctcaacctcgaaccctcgaccatggacccgaaccccaaacccgacccatatctcgatcttgacccagactcaaactccgactcagaacaagaaccgaacccacccccagccctgacctaggtccctaccctggcctcagacctcgtgtttggatttatgccttgaaaagcctataaatttattttagtttctaaatataagttgaacgttcttatatatgtttgaatattaaattattaatatttnnnnnnnnnnnnnntatatataaatatcaaaaaatttcgtatacatacatgaggcagtgtattttattttacggagtattaagatcaataagtcatgaataaaatagtcaataacatattaaagttattgaaatagttgctagtgtgattcattggtactcggtattcgatgcaagcaatctcgattcagattgctgatgtagtatgacatctaagtaaatgtattttatatgattgagattttaattaattgaaggcttagacggtccaacaaagttacaaaaatatccttgcaacgataaacgtaagattttgtaatttatttctaatcttttcaagggttgtaagattagaaatattcaattattatccagttcatcatcatatttatttactacttttaaataaatgttcattaatagttgattaataatatgctcatacattagtgaataacatgtcatacatagaaatcctccacagttatattacatacatctcatagtagaaacatgatatattataattatcctatatgtttatatatttaccgttattgaaaccaaaagcatgtaaattatctaagattaatttaaaattaacttgataatttaaaattaacctacccattaaaatagttttaaattatgaattaaatagttttaataattatgacagaaaatttaacgccccaaccatgtagaaactttgagtgccttcttcatattttattcttctaactatatttttttagcgctaatattaaataattcagtttctgaaaatcttggtaaatagataattatagaagttataagaacccctcatccataatttagaagtctacacatactctagatgagttatagtaaatatattgtcatagataatatatgatgatattttaaaagtaataacattaatcttataaagtatattatcaccaaaataattagatcatatgtgcatgagggtgagacatattcatgttgtactctttttttcttagctcagatttgtcccactcgattttcttgacaaggtttttaacgagtcaacttgcaaataacaatgaatatgaaatatatatcttgcactctttttccttagcttaggttttatcacactgagttttcttgacaagctttttaacgaggctacttcaaatcatgctaacacacttgcactttatgaaataagatgaaaatgtgtgggagtaacatcattgacataatatattcggaaaacatatagattgcactctgtaacgcagtatcaacattaggaattctctattaacataacgtgaaatgcattgctcaactaaaattataataaaagagatagaattaaacccatttaatcaaattcttctttgcacacaatcttcaagagagtggtgatattaactgatgttcaacaaatttaatcaagtatcaattatgcatacttattcacaaagttattacacatcaatatttgagaagatgacatataagcagggccgaccctgagttgaaatgggtcataggtaaaaaaattttgtggacccttactataaagataaattgtattcttaaaaattgttaaaaaaatatgtatattttttaaaaggtatcttttttatttgggcccctaaaatgagtgggtcctaggcgcgggcttagcccctacatataagatcgatattcgtcaattagaattgctccacgaacgcctagatgaggggaagttaatttacactgcactctttttcttttaaccaaatcttttcggtaagattttcaatgaaatatatttatggacatctaagagagagtgttataaaatattattatggatgttcaaattaatgcattaattatcacttgattatatttctttttatttcattgatttagtttctcattgtataaataaaaattcactctaaactatagataaattatcattcactctctcattatcttcttctcttcttacttttttattttatattattttataatattctgatgtttgtatagaaaaagaacttgattcaattgaaaattttcttgccaaatgatttttttttttgttctctacacctttttttgtgctacattttccttcttacatgtttgatgtttcatttctcaacaaaattcaaa

SEQ ID NO: 23451 - DNA, 3171 bp, Cannabis sativa
gagagagagagagagagaaatcatgaaaattcagcttatatttcttttgtaagcaatttgatagcttaaaattatagcatacttgtcaggaagactcaaatttggatagagttgtcttataatgttcaaggcctccaaaatgtgcacaacgtgtccaacgagacaatatcttccactagctgaaggcacttcaaatgcttgaacatgcgccaatgcaacatctctaacatcaacatatctataaaatacgttggaaatattggcttctgcagcaaaaagaaaacaaaaatattacctaccccaatcacaagcagagcatgtaacaatataaaattagaaaggaaagaaaaaggggcttaatgtaccaccccacaaaatgaaaaaaaaaaaaaaaaaaaaaattaaatcactagagaaaaagaaaaacagtcaatgtgaagtcttttctaaattacaatgagcagccaccatggatcttctcagctgagaagtaaaaacaaatatcaattgggtaatagcaaaatatcagttcataaaatgtaccgtttatgtgattcagaagaaattccacggagagattaagagttggctgtaacaaaggaccaatcacaaaacctgggtttagtgaaaccatatcaatcccattttctttggtaaatttccaagcagcctcttcagctaatgtttttgaaagcatataccaaagctgtagcaagaaaaatcatgcaagtcaaacttatctgtgaaagatagtgcagctgtggacaaatgctttactttcttatttttctcttccctaaggttatggtagttaaacataaccaatatgttaagtatgacaatacacaataaaactgatagtatcatccaaattaaatgtctacagcatataatggaattcatctcatacttccagcagctggattctttaacatgagctgagcaatggttaactaaaacaaaaagactaaagagaatatcataaacttagccatcttgcttattgtagttagtagtcaaagtagcgaagtatagaagagtaaaggaaaccaacttccagtcttccagttccagtctggctatgaagatgttcattattagacaacatcaggtgagcatgaacaaaggcaaagggaaaaacatcaacaacttcatagccagaaaatttgtggaaacatagaaactaactaaatctagttctgtcattagttcacatcatccgtataataccatcaattacttcaagtaaaatcactactatactaatagaaagtacttaatgaatctgcacacctttgacttctcacagaaagttggatctgagaaccatgtctcatcaactacaacatcaggtgtcaggggtgttccattgaacgcaactgtagccatagaagatgttaagatcaccctcttacaagaagcacttttggcgcatgacctaagaacgttaagtgttcccttaagtgctggttcaatcagttctgcctgaaatgttaggtgaaacaatcatcttttaaaaactaaaatgatgcttcataaatcaagatattaaatttcaatattccaaacagataaggtaagaaaatgactgaaacatattcaagcctgagcagctaaggggactaacctgtgggtcattgactgtaaagtttacaggtgaagctgtatggaaaacaccatcacatccatcaactaaagaatcaaaagatccttcctccaataaatttgctttgaacaaatgaagtctttccttggctccatcaagtgaaagcaagtgttctgttttcttaggatcacctatcacattacaaataaagacaaccagaatgttcatatgaaaactcagataagataacataaacttgtacaatgaaattatacttgcattaacatttacgtccccattgttgttcatagagaaattggatcaagcaatcaaaatccacacttactgtatcatttataaagaaacccaagctagaacccaaaacatgtattacctcatttctgcctctttcggagaaacccaattagtaaattgagagttcatgaatttgagaggttgttatatatagaatatatagtaataggatgtgaatatcatagtgtagtcagctaaaaaagaaaaacataacccagaatccaaaagtgatgaacaaaacttagaacaagtattgggtaaagagagtttactgaggtcacgaactgaagctttgacagtgtatccatggtgtagcaagagtttgacgaggcatgaggctatgtagccggaagccccagtcacagacaccacctttcctgatccactcatcttctttcttactcactttgctgctctgttcgttctacaaaagagtggtctccactcccaactcaactttccactaattatttattactaaaaatttattccctattttgatctacattacattttagtcactacttccacgtgtcaactttaaaaaaaaaatcaaagaaacttttacaaaggtaaatggaacattcttctatataagttagagtattaatctcattcaaattctattattttatttatagtgcatcttattcgtattacctgtagattttatattttaaattgaaaatttgtgtaaaagtataaattgaactggttattttagattgattatttttttaatattcaattatttaatatttattaaaaaaatatattattattttatgtttctaacgataaattaaaataaatgaaataaagttttcaaaaaaaatgaataaatgaaacaaataaataacaaatttaaagtaagaaaaaaaaattatacgtgtagagaaaagttaaattttgttttagattatatttttcttatttataagaatagaatataaatttgatttattatattttgaaatatattgttattagatttttttaatttaaatattagttacatatataattttttaaaaaatatatctaaatatgtgtggattagattaaatcagttacttttacatatcaattaacatttacaagtacggattttagattttttaatccaatccattccacacaaatgcacatatccatattttgcggattgaattaaattgaattgtaggaattgaattagataggtattttatgaatatctaaaaaaaaaaaaaaaaatataacgcatttca

SEQ ID NO: 23452 - DNA, 5840 bp, Cannabis sativa
  modified_base (115)..(119): a, c, t, g, unknown or other
  modified_base (2550)..(2555): a, c, t, g, unknown or other
  modified_base (2894)..(2897): a, c, t, g, unknown or other
tcgaggaggaggagtccctagtccctcaatggacatggacatctgacatctcagctttcattggaaatctgagtatacgtgtcctctaaataggggtctggtctcgagtttctannnnngagaaatctcactataacataaacagcagaagacagagtgcgaatttcaaagatcaactgcaatactggaggcattcttcagatcgaatctagttgatgatgaagccatcttcgtctatttcttaatttcttgatcctttgatgttcttctacgtcgaattataatcttactttttcttcttgcaaaactaaagctctattactactgttacattttttaataacactgaattcaacaaacatcaaagttgaaataatcaacagaaatagagaaaacaaatgaatcaaagcttgaaaccaagaacacaaattttatccaggttcggccaaaaaacaaatgcctacatcctgctacccctttaggtgatattccttgtatttcaattgatgatcatgattacaatctcagctaagaacacaactccaaagcattacaaagagaaccccaacactctcaactcgagtactctaagaacagaacttagactgttctctcaaactctttctccctttgtttcttctctttcctttcaatctaatgtctctcagtttttttaacattagcaaaatgagaaccttataatgcctttacatacatatgctacatgaaaggaaaatataaagaaataacatcctaactacctaagctcaagaatgtgaagtcttaaaaaattaactattcaagacaattagaaccgattctaacttataacagaattggttgtaaactaattttgtttcactatttggattatcaaaactacgataatattttgacttttcttgttcattttgtttagtgatttcttgtttattaaagaggataattaagctgaatgacatgttgggtcttgatttaaatgtgattgattattgagcgttgttgactttgatgtctatttgtgaaatagttgaaaatacttctgagtttcatgacagccaactgcctaataaagtttggtgattagtcaaaaaaaaaaataataataataaataaatcaaaacaaagtttaatgagactctttgagagaaaagaaaagcaccaacaataataataataaaatttgtacagtgtgtataataatattataggtattcgaaattctataatatatatactaaataattaaagtgaagtcttcttcaagattttacaacattatctggcaaactatttttcttttatttttctaaacgaggatgttagttaaattgtgggagatcgattaggtgtttggatagagataattatttctagaatgatatacatgcatgatcatgatgcatcatattcttaccaacctatctaaaatactgtcatgtaataatgtcgtggttaaaaatcaaattatgatgaggtaatacaattaataatgttaaacgttgaaataatattatatattatggccaatataaattgtataagtgtcaccctttgatttcatatagggttaagggattggttggaatagtgggccttattacaattagtgacaaatgtgggcaataatattatacaattttggaatttgctgtaatttgcaaaagctaccctttattcttcttataaattacctttctttctttaatcggcttttcgcttatgtatgcaatcacaaagatttatatagcaaatggctctatatactatataataaaaacaaacaacaataataaagtttctttctataggggcaggtaggacaaccttagattgtttaatgaaactttgtcactgaaaaagaaactcaagatatatagaataattattttttaagggcaaaggaatgagtggaaagcccattaagatcgaagaagaatataacacctggcttaaattatagaagtttgttggagtctatgtagatttaagctaggttggactagtgtaatatgattggcacaacaatatcttcaattcttcatcttacaagttattaaattttgttttgttatttttattcaatttatatatgatatactttttgagcaatgtgagacaaggtatgatgaaggaagagaaggataatctatttgcacatggtcattcgcttgctataaaattccattaattatatatggaatatctacatatataggagtggattttactcagtcaccgcatagttcgctggtcattttgtggtcattacaaccattagatcaagaatgattagatctaacggttaaaagccaaagtatatcaaacaaagattataattaatacatcacaaaatagttggataatattttcaaattttataaattaagaagaaaatacttattaaatttttaattttttttaaaagtatataaatttttaaaaatataaaaatattacaactaaacatactctcaatattaaaaataataatattgttacaaataatatattaaaatttatatatttttattaatttaaaataaatannnnnnatatttatatatatttataaaattaactttactaatacagtcaaatttaacggaatattattttattagttatattcttagtttttatttttgttttgtgtattttaaaatcttataaattaaaaagaagtcacttattaattttataatttttttttaaaaaaataaatataaaatttaagaatattaaaattgaagatacttttaatattattattaataataatattataaataatatattaatatttatatgtattttaattaatctaaaataattaatattaatatttctattctatataaaatgtgcctataacagaatttttggtttatgannnnttattgggtgatttttttttaaataaaaaaaataacaaatcagcatccatgtagttagttaaacataaatataattaatccacctaaagtgttgcaattaataataaattttttcatattgtttatttttttattaaaacttattttcaaattttgatatttagaattagttaaattttaaatattattttaaattaaatttgaatattttgatagtttaaccatatgagtattttcattaattccgaagataaatttaagataaataataattttttttaattactattacaaaatataataataatttttgtttttatttaaatcactattatgcttttaaatttcaatgattatcactgcattgaatattattaattttaaaattatgatattaaaaaaaactaaaagctaaaataaaattcttggcacgtaatatctatctagtatatatatatttataaatgtaatcttagtaactattaaatttaatagaatattttttttattttaaattataacaaaaaaataataattaaatagctacttttttttatatatatattacaaattcatgaatataatatgttatgaacctaaaaaaatgatctaaatcaaatgctccattattattttccaccaataaacgtacactaaagaatcagtagtccaactattctaaacacacaataatttttgccatcacacacacctgctttccatgatccaacagtaccttttggccaactatacattttccctccatttctctttccttccatctttccttctttctttccttccccgcttcttctctatatatatacttcataaaccaactgcacttttcccttccctcacaagatatgggaatatttatcatggaatgtcaccaaaccagcttcagttgtaaccagcaagataatcatgatgatcatgatcatcgtgatagtagtgatcgtgaagatcagattgatcttcagtatcctagttatttctcttctcagcggagtctccaatcaattccttcactcgcttccaattttaaaccccaaaatcactaccagttttgcttaatctccgatttcaagcctcattcaacctacctttcttcactcacactcgccgggaagctcgtcttcaccggctcctcagaccgagaaatcggctcttggaatatcaacaacagtcacaataataacatcgttttggctggaaacggggcagttaaatctctcgtcgtttctggcgacaagctcttcagcgcacaccaagacaacaaaataagagtttggaaaatcgaaaacgaacacgaagacagcaatagagacgacaagaacaatcagcacgcgatgaagtacacgcgcctagccacgctcccgacgttaggtgaccgagcggcgaagctcctcttgcccaaaaaccaagtcaagattcgccgacacaagagttgcacgtgggttcaccacgtggatacggtgtcagctctggccttatcgccggacgaccggttcctctactcagtctcgtgggaccggacgctgaagctgtggcggacgaccgacttcaagtgcctggaatcgatcaccaacgcccacgacgacgcaataaacgccgtcgctctctcctctgacggcgtcgtttatacgggatcggcggacaggaaaatcaaggcgtggaggaagagaattagcttgggggacaagaaacactctttggtctgtacattggagaagcacaattcggggattaacgccttggcgctgagcaacgacgggtcgtttctttattctggcgcgagtgacaggtcgattgtcgtttgggagagaatctttgaaaacgacagtgaagataacacgattaatgttgtcgttttgggggccctgagagggcatgggaaggctatattgtgcttggcagtggttgaggacttggtgtttagtggttcagcagataaaacggttagagtttggagaggtattgagagaagctattcttgtttggctgttttggaaggtcacactggcccaatcaagtgtctaactgctagtagtagtagtagtagtaccgttgaggattgtgatacgacgtcgtctggtggtgttaattcgtatgtgatttacagtggcggattggactgtctagttaaagtttggcaaattattgttcccaataatcaacaatttctctaatctaataaataactcttgatgagatgagtgtgagattaattaattatatataatgctcgcattgattaggagactatttggtattagatttggtggtaagcgatttggtgttgtgtagataatattgatcagtttatcatttttcctttcgataatattttgacttttcttgttcattttgtttagtaatttattgtttattaagaggataattaagccgaatgacatcttgggtcttaatttaaatgtgattgattattgagtgttgttgactttgatgtatatttgtaaaatagttgaaaatacttctgagtttcatgaaagccaactgcctaacaaagtttcatgattagtcaaaaaaaaaaaaaaaaaagatcaaacaaagtttaatgagactctttgagagaaaagaaaagcaccaacaatacaatgtgtataataacactacaggtattcgaaattctaatatactaaataattaaaatgaaatcttgtttaagattttacaacatatgccaaactatttttcttttaatttttataaacaatgatgttagttaaattgtgggagaaagattaggtatttggatagagtttatttcttgtagaatgatatacatgcatgatcatgataaatgaatattatttattttaagaataaaattaatgaattaattataagataaatgaatattttatatttattaaatttggtcataattaattagttgatattttatatatggtcaga

SEQ ID NO: 23453 - DNA, 5484 bp, Cannabis sativa
aaacttttcatgtaatcatatcgattgtattataactatttctgataatgaaacttttcatttcactggtttctatggctctcctaatgcttctcaacgtgtgtttacttgggagctgcttgataaactttattataatgctccaaatctcccttggcgtatcatgggggattttaatagttatcttttttatagtgatgaaattggtagtgatcattataatgttacaaatatggatactttttctaatttcttaaacaaatttcatctattacctctttcttttataggcaataaatatacttggaacaataataccattttcaaaagaattgattgggccattggctctgattcttggtttaacttatttccttctgccgttctttaccatttaccatattatggctctgatcatagagccttgaaagtaatgactaatcaacatgttcctaaccgtaatcctcatagtaataagcgatttcattttaagaatgtttggcttgagaatccggatttttataccacccttagtaatgcttggtcccataatgattccactttaggtgcttatcctaggttccttcattcccaaaaggcttctattacctctcttgcttcttggggtaggtcaattagaaatgactctaagcttcgaatttcctatcttcaacaggatattgagagaatccaatcctcccatcatagggatagggatacaatttctcacatcaaatatcttcaatcacaacttgatgctcttttatatagggaggagatttattggcatcaaagggctagagttacttggcttagggctggggataggaatactacattcttccatcgttatgcctctaagaggaagtgtaataatactatttcatttcttagagatgaaaatggtaatactgcaagtagtttggaagatttgagtactcttgttacttcttattttgaggatctctttcattgtgatggttgtgacacggagactgttaatagcatggtccccctcttgaggatttggaggttgattttttgcagcagccttttacgtttgatgaggttctaaaggctgtattccagctctcgggagataaggctcctggtcttgatgggcttaatgcctatttctatcaaaggaattgggacactgttggtagtgatcttattcatgcagtcttagattgtccaaataatggggttggtttttctgaggttaactctactttgattgtccttattcctaaaaataagagggctagatttcttagagattttagaccattagcctttgttccaccttttataaagttatttctaaagtcttagcaaataggctgaaattggttcttcacaaaattatctctcctttctaaagtgcgtttgtggctggtagagtcatttttgataatattttgattgcacaagaggtggtccatgctattaattctcggaagaaaggtaaaagtggatgggcagccttgaagcttgatatggctaaggcttttgacagggttaattggcactatttggaaagtgtaatgcttcatttcaatttccctgtctcttttgtttccttgattatgaaatgtgtcaccacttccactctttcctttttgattaatggctcaattactggatcggttaaaccttcccgtggtataagacagggggatccgctttcaccctacctttttctactttgtgttgagggattgtcatcccttctctgtgatcaccaaaattctggtactcttcaaggtatagctatttcgagaagggctccttctatttcccatcttctttttgctgatgacagtctcattttttgttctgctgatagggattcttgtaactctctcaggcatatttttcatctttattctctagcttctgggcaagttattaattttgctaaatcttctatcctcttttcccctaatactcctcaggatattagaagtcttttctttgccacatttgatcttgaagataagccttttgttagtaagtatttgggtttgccccaatgccttactagatctaagtatcattcttttgcctttcttaaggataaagttctgtctgtgcttactaattggtctgttaagtggttttctaaggctggtaaagagattcttctcaaggctgttattcagccaatcccagcttatgctatggcttgctttaggcttcctgttaaattatgtaagggaattgaggttgcgatggctagattctggtggggttcttcagggaataataataaaattcattggagatcttggaaaaagctctgtcaatctaaatgcttaggggggttaggatttcgctctctaattcattttaatcaagctatgcttgcaaagcaggcttggaaaattttaaaacaacctgactctttgttatgtcgtgtgcttaaagctagatattttcccaattcttctatcctggaagatgtccctggtcataacccttcttatgcttggaggagcatcctttggggaagagatttgatggcattaggtcttatttggaagattggggatggagaaagcattttaaccattggtgatcattggctccccaataacaaacatctttgctataaagatggtaacatgcctccttcacctaagctttctttttttatctctgattctgggttttgggattctagaaagcttaggaatcatttttctgaatctaatatccaggatatccttgatgttccaattactggattctctggtaaagatgatcttatttggtctagagatagctctggtcttttcactgttaagtctgcctatcatttggctctttctcatcaggatattccatctacttcgtctgctgtaacttcaaggaagttttggaataaaatttggcattctaaagcccctccaaaaattaaacactttatgtggagagttgtgtctcataccattctagtggcttcctctctttttactcgccacattattgattccccactttgttctctttgtaagagcaatcctgagacggttcaccatgctctgttagggtgttcgagattgaaaaaggcttggaaatcctctaggtttgtagatcattatcataaatataaacatcttgatattactgattttttgttgagctcttttgagatgttggataaggattatgttagcattttgttttgctttctatgggcattatggaatcacagaaataattacatacctcgtaaaaatgttatacctgttactgacatctttgattggagtatcaattacttttttcagtatctggatacccagcaaaatattcagccgaatcgtatttcagttcaggattctagcagggtctcggaaggtacttctagctctaatttacaggtttttactggtgctgccattgatattcgttgttaaaagcatagctatggtattgtggtggctgatgagtgtggtgttgtgaaagctggtgtagttaagccctgtattggaagtatctctgctgttatagcggaggctaaggctatttatcatgctctttattgggtgcagctgcttcatcttctagtggatattttaaagacagattgtaaaactattgtagataaacttaattcttgtaaatggaatgctagtcctttagatgatattttagagggcattaagaacttgttatctttcagtcctaatcttataatagagcatgtgtatagggagtaatcatttggctcattgggttgcaaaattaggattaggattagaaaacgagatagtatggaatggttctttgtcatccttttaacttgtaagctttgtattgactggtttattttaatgaagcacaaattattctcaaaaaaaaaattatattgtatgtgacatttaaataaaatcataagaatattatcttgttcttttcactacttaagattacaacttaataaataattaaacaataaagatattgtacacctcctcaatgtgaacatgaacatgataaaaagccaaatttactcaaaaaaatttaacaaatacactgaacatacattatgaattaacaccaagtatatataattttcctaattactttctagctcttatactcatcactaccaacctcatcaatcaaaggcactggtttcaacctacgactgcataacttttgaaacattaataacataagatcaatctcaatttcaaaacttataatgtctagataattattggcttcttcttcaaaccaaaaatgtatttttgaggccatccaaaactacaaattaagaaaggtatagatgcagaaaatatcaagaatgagaagaaaaaaattagagagaacatagcaatttttccataccccctttcaactttcttgattaatttttcctcaagagtcatccaagaggtcttggagtacaatctaatttttcttttttgctaggatagaactacaaatgtgcataatcagactatcaaaagtcattacatctttcaagttgtatactcattttgattactgaccatattacctcatgcaaaataataaaattccttaaattcaaattagtgaaaatacattgtttctcactacatataacttgataacctttcttattttttctttaaaaagagaaatcctttcgtattctttaattaaaaagagaagacgtttttttttcttcaattgaagaattaatattgattataaataattgataacagtttttactaatatgttattaatgggctattattattagcttaatttagatagataaatattgtgaaaatttctatggtgggtacacctattttgttcctatagtatggagacgtttttctgaccattgatatgtatgaccttgggatgtacatattagttaaagtatacttgtttgtattcaatcaattcaagaaccaaaaaaggtctgccttactgtccaccaaataaaattaaaatacgtgtcaactaactcatacatcataaattaataaaattttaattttatttctctttgttcccgttaatgaaatcaatatatatatatataaaggaaagcattagggagttgaggtggcaatttatgtgtgttttctatcctattctttgttttcttaatttttatcatttgtttattttttcaataatattttagctaaatatctattattattatcaatagaataactcacattcacatctattattattaattaataatagtgtaacttataactacatttaattactaagttatgatatattaatataaaaataatttattactttatgatatatatgaaagtaattattataaattggaaagcattatttacattatctaaaaaaatgtacattatatatgcaaagtattatttaaattggaaagcattattataaatcggctatgtggtatactacatttttaaaactaaatactttttgatcatgttttgactaaatctacaaaatgtactc

SEQ ID NO: 23454 - DNA, 1497 bp, Cannabis sativa
caaaaataaagaatcgagttcttgacccgctagatcacccgtggtctcgaagagggcttgaaacttatcctggaagtacttccgatatcagtacgatcacgaacccactccccagtatcatcattcacacaacccatgaagttacgtcttctacgaatgagagtcgacttgtgaaagaattttgtgttgtcatctccgaaacggagccacccttcccgagacttttgcttccaaattctattcatattttcttccgtgctcaggatttctaactgaatctcagcctccttcatgatattataatcgtttataggctcattttgaatccgtcccagttgcttccgcagctcaattaatttcctgtcacaaaaaccaaacacattttggttccacagtttcaactccttagcagtgccctttagttttatctcaaactgagaggtgcttagcataccctaccaagcctgactcaccacttccccacaatccggtcttgttgtccaaacttccaagaatcgaaacgggtacttgagtttagcatgatctccccaaacattcagaacaatgggagcatggtccgatccaaggatagggaagcttgacacacgggccctcgaaaagtccatacaccaatttgcatctgctatggcacggtccagtctctttcgaactcgattacaagccacacgagagttttgccatgtaaaacaccccccatcacacccgagatccacccctcccgtttcaaacaaaaaattattgagcaattccccttcattcctgttgtatcgcctaccaccagccttctcagaaccattagagataacatttaggtctccgatcacaacccaaggagagtcgcaatctgcgaccttctccattagccattgccaaaaactatttttctgtgcctgatatggggaaccataaacacagaagaggctccaaatgggcagaccatttcccaaattaacttcaattttgaatccaacttcaaaggtttcgataacgtggcattgaacacccaaactccaagcaacacaaaaccctactgagattcccaaagaaggaatacatcaaacatttgcaaagcccaatcgattactaatctcagtcatcctattcccatccaccttagtttcagcaaggaagatcaaattcgcattacattgatggatcagaccccgaagagtcctttccgccgagggtctacgaagtccccgacaattccacgagaggcacctcatgaggacggtgggggcatggttgcggtcgcctcctcgcctcttccaaaattttgttcataggtgattttgggatatcaacacaatttgcaagaatatttgacagattacttggcaattcaagatcatccaaagcaattatcttcttcctaccactgcgaatcctaactcctgagaatttcctaatggcacttttcttctcctttccttttggtttcctgccacgacgattaccaattgaaccctccccctt

SEQ ID NO: 23455 - DNA, 4179 bp, Cannabis sativa
tttttcttaatgtaggtctatccaagggtgttcaatatgccctatacttcatcacatttcttggaatattaggatttttatgctacaattgtagacccaaatgccaagaccaagaaaataggatttttagcaataaccgttggaggaatagtaaccataatcaccaattgccgaatactaacactagtattagttctactactactactacaactcttcctcatcataatgaagccaattctgatggactaccatctactggaattgacaaaacgattattgaaatgtacccgaaaagattgtttggagagagtcgacgacttctgaagtctgattacaatagttgttcgatatgtttaaatgaatatcaagctaatgatatagtgagaactcttccgaattgctttcactattttcactcgaactgcattgatgaatggctcagattgaatgcctcttgtcctatttgtcgaaactccccacttatatctccttatagttaatgtgtccatcgaaataatttaatttttagagatatacatgttgatagagtgtaaatatatgtcttataactgtatttgtatataaatatactttcaattttttacacactcaaattagacactataatttacaattgatttcaatcaaataattaaatataatgtgatcatcatttaaaaatattcatgataactattaattacatatcttagtgtcttattttttattattatttttattttttatttttgaaaatatcttagtgtcttatttgaatattcacattaatttcacaatcaatattgaaaaaggaatattggttagtattacaatttattttttaaaaattaaaaattaaggaaagctcatcaaatgatatttgtgacaattactctttatatatttatgatttcgtcagcccagttgtaggcccaataaagttgcttaaaagagtttggtgtagaagcttatgagttatgaaaagtaaaaatggtattacttaaaaaaattttgaaaacaaaattactatttgataaaacatgagagtaagggcatctcatttacaactgaaaacccacccaatcgaaacccaaaaaacttaaaaaaaaaaaactaagtttcaaaaattataagctgggtttaagttacacttctggttaactactcggttgagtttgagttttattaatttaacactcgaaaaaatcgggttacacctggctacccacaggtcggaatcgagtttcattaatttaacacccgaaaaaaccagattacaccctatcttgcctgaaacctggatgtatattattttattttttaaaaaaaaatttgtacacattttatattcagtcctaaaaacataaatttaaaggaaaaaaaaactaattctcaacaatgatatattatttttattttagagtttttacaccacatactgaaattttaattttttttattttttttacagttgagcgaattttttttcttttcaaaaatactgcataagttttatactgtgtactatgttaagtttttaaggttgttttttagttgttcatttgttgttttaattaatttattttgttgttttacgattgttttataaaaagacaatatttttgtaaaaaattccgtatgatagtaaaattataaattttgttcaaagtatttttataaaaacgcctttattttcttcttctttttatattctttctttcattttctttttatgaaaaattatatttttgaaaaagaaaaaaaagccaggccaacccaaaacccggtcaaaacccacacggacccaaaatccaaaaagttcacacaaacgggtttggtatgcgaattctatacactcgaaaacccgaaacccgtcaaaactgaccggatgtgcacccatcatatacaacaaaatatagcttatggaattggtatttgtacaaaaatgcacttttctttttctgtactttaaattgttggataatttaagtaagttgtatttttataaaataattttttatgatacgtacataaactctattttgttaccaatcttgtatttgtagtaaactcagtcaagtttatctagtcttagttaagtggaagttgattattatcaatttcttggtcaaagtttttttttacttattatcgtgtttgtttaactcgatagtcaatatagattttctttttgtacttcataacatctttttaattatttttcaagccaaagattaatgaaaacaaattattttttgacattaaattaaattgaaagacattataaatattgttcaaaaaattcatagtttcaaaatgagtttgactgttggattttacttaaataatgaccaagattaatctttgttttgactaataggattaatatgtcctttaataaaacaaactatagacttacatttatggtagaaaagaaatatatatattttaagtactactcatgagacacatttaaatattcttggtaaagtagtctttttatgttctaattaattcacatacatatataatttatattgtatgtatgaaatagagtagggaaaaaaatgaacattttgtcaaacaaaatggctatatatgacatgttggagaatattcaatattacaactcaataatatgactgaaaaataaagacaactatataagtgctcaaaatatataatatgatgaagaattgtataacttcatcttaactctatatattagtatgatatttaagaaaattttactttatacttattttctatttttattttgattttatagttattttattattttttaatttatacccaattttatatattatatccttattatatacattaaaaactctagttttgataaattatataaaattatatttggtactttatgtaataaaaaggaatattttttaacttatttcatgatattgtctgttttgggtttagcgcacatagttttaatttcgtgtaccttcttacaagatcttttattaatagagtaactagaacacttttatctaaaataactcttacatattcttctggtgtaggacttgagtttattagggtcggccctcgagctaggcccgcgtttaggatccacccatcttaaattcttagggactcaaataataaaaaatatcttttaaaaaaatacatatatttttattaatttttaaaaatattatttattttttataataaatggacaatttttttcctaagtaaaataataattaattagatctgtaacctcaagtaatctgtaatatatcttatgataaaactcatttaatatactttgtttgatttatttcatttaatcaaatactataatattatatatatagcatgataaactaataaattcatgatataaaatatgtaaactattttggcataaacattaataacatggaagtttctatttgataatgaccttccaaataactttgtggtcatttttagggttttcaacttaatttgaagaatatttttatttgaatgatgggagttttgacttgatcataggattaggaattataaatgtatagttgaaatttgtaaaatttattaaattctttacttatcttcaattttccaaggtggaatctctagtgggaagcctaagtaattaagtcatattttttttattattatcattttgttttgttttttcttatgattttaccctataataagaaaaccagtcattttcttatttctttttttttttaatttttattatttacaaaagactatatatatatttttaattttccattttattcgccaaaatagttgactaatataccattcacaacaccatgcactaaaaataccaattacactatagtttaagctatttaacattatcattctttttaattagtatgaataatccttactacccaatagaattttcttcttttcctttttcgattattataaaaagacttaacaactcatatggtataactttcacttgtacaaaattcttaagagtaatgctaaaacatgtatcatactattcaaagagtttgaccaaatgggaaaaatatgtcacatcaatattttatacaaaatttataattaaattctaatattgaaaattatatattgctaaaattttgccactttctaaaatcattgcagctaataatatat

SEQ ID NO: 23456 - DNA, 5697 bp, Cannabis sativa
aaaaaaaaaaaaaaaagaaccacacataatactatatcattaaatttgtgcgtgatcacttacacaatatacaatttataccgctacatcttatatgtatgtacttacgtacgtacgtaatatataattatatataggtaagagtatattttttaaaagatgggttttgtattttaaaacgttataatatcacgtgttttatattgaattcatatatgcaataagaactcacaaaatattgatatatatttttatcatatagacatgtacaagttttattgaattcacaatacatatatatgatgatattaattaatattttttatatagtgcactttaattaaaaaataaagggaaagaatgtcaagaaatgctcaataattatgagacgcatgaagatattattatagctaaatttaaactctttttcatcaaagaaataaattaaaagaaaaaaaaaacactattatcataattaatatgcttagtgcaaccatataaagcagagtatactccgacaatacctttttaaaatatgtatatttatataaatgtaacagaaaaagaaaggggaaaatataattaaatagaagaagaaagaatatcaaattcgatgtggacgcgtgtacatagaacttttaacttgtaaagaaataaaatgatttatttaataaattcatcaatgcatcgccactcactatatactactactactaataataataataataataataattatgatctcatcaaccgggtcactgggcgcgttatacacacgcgctggtatatacttatatataacactggttcatttcatcgtgtttccctctatagagccaagctagtagagtagtgttcttcttcttctcgtgtcttcctcatcactttatataagtcacatgtgttgtttttgcatgtgatcatatactacttactcttttatatatatcttttcaatataaataatcctttatagctttattaactagatttcctttttaatttcctttcactattattaactcttctcgaaatgatgcctcctgagcaagatcaaacaacagctacaaccacaacaatcactactattgctaccactacgtcagcacctaatttgaacaggtcttccgataccggttccggttcagtccacgccgaaccaacgcccatggcgaacccggtctgcttttcgggtgaagataataacaatgatcaagtactgctcacagatccatctcaatctacaccttcggctaataaatattattcatctaataacttcattttccgcgaatctttacgccctgtaactctcaaggtattttttttttcttaataaagtaatttgagtctgaaactatttttttttattgaattaattgtgtaatattttattgataattgtatagtttgaagatgttggttatgaaatcaaattgagaagcaacaatggtaaaggaagctgcagcttcttaatttcaacatcatcatcgcaactaaatgagtcgaaaacgacgtcgtcacgaatcgtgctgaacggggtgagtggaatagtccgacccggggagctgatggcaatgctgggtccatcagggagtggtaagacgacccttttgacagctctagctgaccggttaccgggaaagatcaccggcaagatatcatacaatggtcaaccattctcatgtttaatgaagaggaaaaccggtttcgttactcaggacgatgtcttatatcctcacctcactgttttggaaaccttgacctatgctgctctgttaaggctccccaaaaagctaaccaaagaagagaaaattgagcaagtggagtccatcattgtggagctcgggttgacccgggtccgaaatagtgtcgtgggtgggcccctgctccgtggtgtatccggtggggagaggaaacgggtcagtattggtcaggagatgctggtaaacccgagtttgctgttgctggacgaaccgacttcggggctggactccactacggcgcagcgcataatagcaacccttcgtggattggcacgtggcggtcgcactgtgatcaccaccattcatcaaccgtctagtaggctttacaggatgtttgataaggtggtcgtgttgtgtgatgggtcccccatttatagcgggtatgcgaatcgagtcatggactatttcagctccattggatatgctcctgggtttaattacatgaaccctgctgattttttgcttgatcttgctaatggtaagtcttccacttgttttctttttcttaaatatatattttgaatttcacttgtcaagttgtccaaatttggactaaatatagtatcttaggcttacccggaagactgaaaacatatacattatattagttttacatcacaattaatagtttatatattattattatattagacataattaatgtgtcaaaaaactttggattatttggttatatttcttaataaatgtgtggatggacacaaccatgtaaaacacaattctatattttactttcataaagttagtggggatgcaacaagggtcttttggtctttctcaatttgtcaaagtgtcaacctcacaaactgacatatacatagttaaaattgttacaaccaacttaacctttaaccttgtaaacacatacacagaacggaaagaaacattcacccgttaaattatttatctcgcatttcaaaagaaataaaaaataaaaaataataataaaaaaagtatttatgtctcatagtacattaaattttgttttcccttagttctaaaaaaaaataataataataataaatgtttttcctaccataaaaattttgaatgtaccaaaccgaaggggattcgtacacgaaatcgggtgccaattaccaaaggataagcattattattattattattattatggaatcccttctccatactaaagtagaaacacctaatttaataattaaccagctagctagcttagcttttccatcaatgtatttgacagtggcctaaactatatgaattgattaatcatataataagtaaattgatttgaccctcaattatttgtttataataactgtatgcaatccttgctgttatggtttagtgtcctttgtcatgactagtagaaggaggctatgatgggataggttgtagtagagaagtaaaattgcaacctcttagatgtatatccatataatgtataatgtactaatatagataaaatagaaaaagaaaagataaatattttatgtaaaagttttaaattttcttttaatgaatgatgtaaaagttctaatttgtttgttggagatggtgatttaggggtttgggatagattgtctattcaaatgaagagggttcaatggacttactgatgaaatatatgatccactctacattttgggatctattttcttttaaagtttgcattatattctttcccatttttatagttgattgtttgtaaatatataaatagatatatgtgtaatatggacaaccgtcctttaaaatatgttttgactttaatattgttggagatgattctccaaccccaccacatctttgcctaatttattttctgtttctctcatttagtaacaaaaaaaaaaaaaactgcatttatttcatttatacttgatgtgtaagcctagtacttttgtttttcttttttcactttttttcttttgaagatttgtgctacattgcctcatattccaccttattaactttcactattcaattttgtacatgcagggatagtaactgacataaagcatgaagatgtattagaccatcatgatgatcaaaattcaattaagcagcacctaatctcatgttacaaaaagaatatatgccctgctttgagagctgagattgaagaaaataataataagagccctgtcagaacttcactgtctagaggtaatgaattgaggaaattgtcttatttgttcggattaacaactatagattctaatacttgcttctctactttgtttatggcaataactaatggaatatatgctgaaaatgatcaaaattatgctatgtacgtataggtagtgataatcagtggattactagttggtgggagcaatttatggtgctgcttagaaggggtttgaaagaaaggaagcatgaatcttactcaggcttaaggattatccaagtcatgtctgtatcgtttctctcaggtcttctgtggtggcactccaacacttcaaatatacaggatcaggtagatattttttttttctttgttcagctttcaatgtcatggaaaataactatttaactagttagtggccattatatgaagcacagaagtcaactttctacaagtcatatatgatttattggatattgtccatcattgtctcacaaattgacccaaaagttatgactttttgaagatcatatcactttagcaacaacaccatttaatacaattgctttcatattggaccattttgatcattactaacaattttgacaatgttgaaacagattggactattgttctttttctcaatcttctggggcttctttcctctattcaatgccatctttgcattccctcaagaaaggcctatgctaataaaagaacgttcctcgggcatgtatcgcctctcgtcctactactttgctagaatggctggggatttgccaatggagcttgttctcccaacagtctttgtaacggtgacatattggatgggcggcctcaacccgtctttcatcacatttgtgctaactctgttgataatccttttcaatgtgttggtctcccaaggactaggactagccttgggggccattctaatggatgttaaacaggccacaacactagcttcagtgacaatgctggtgttcttacttgttgggggatactacattcagaaaatcccagccttcatagcttggttgaagtacatttcattcagtcactactgttacaagcttcttgtgggagttcagtactcagaacatgaagtttatcaatgtgaagttggattacattgtagggttatggacttccctgctattaaatgtttagcactagataataagtggtgggatgtggctgctttgactgttatgtttgtggggtataggcttttggcttatgtggctctgaagatggggcagcctcactaacttttcattgacacataaccaaaagaaaagtaaagaaaacaagtttgagacactaatgaatatgcatttgagttgaagccaatgtaaagaatttgaatgaaggttcttattctccaacttcatcacatataatcaccttggctgactaaatttctaggccgactctgttcttacttaggccttacaatgtattcaatttgtatgcaagtgtttttatgagcaatttactaaatgaaaaattgaaattatatgtaattgatttttatgcaaggatttttctattttttactccaaatttgtcagtagatatatacaatcactctaaccaaaaactagaaagctctaagtttagtatggcttagtactctctatttcaggaaaatgaaaatcagaaccaaagagttagaaagacatcaatttttactacagtccctaaaagaaatgtcacttttaccagcgcagttcgctactgcgctggtaaaagtaacttttacaagcgcatttcacaaactgcgctggcaaagag

SEQ ID NO: 23457 - DNA, 2270 bp, Cannabis sativa
tcatctttcaaaaccaagttaccattatctgaaagctctacaattgaaccatttgatcggacaggaatattagttgaccagataacagacttgttcttaccactcaccagctccagatttccgttactaccaattatgagacttgcggaagcagagtctacaacttttaatggtttatctctgttagccacccagacaacagtacggggtgagatattcttataccacatgcccacatactgatttgcagaattatttggattgaagaagcctaactcaaaaaattggttcggggagactagagtttgtgtttgagataaggactgggatgaagttatgttataaattgcatagcaatattgagactgaaagcagaagaaggataacagaaatatattgaacatcgacatgctacacaatacaatctctggtgaatggactacttttgtccaaataacattcttccatattattaaatttgtatgactttatatttttatttttatttatattcaattttttcccttcaatttttatgtttctcaatttttatttgtttgtttgcttaattgaaaacctaaactcattttagacaggtctctgaactagataattttaactagttggtcactaaatttttttctttagcaaatatataaattttggcaaattgtttcttaaattttattttttcagtaaatttatacccaaatttttgttaattttttagtttttaatttcgtatttttaactttttttttgtttgttttcaaatatttattttattttaataaatttttaaaagataatgtatagttttttacatttattttcacttttaacaaatttatatatacattgtcaaagataaatgtataattaacatatattttctcactgccagatgtttcttttcgctgccattgttgaaaatgcaacttaattggtatttctaatatgatatactgactgactgcactttcaacgaaaatgcttgaaagttttaatttgatgagatgagtcacagtgcatgaataaagtccaagcaacaattaatataggaagtaaacgtgtgtggtcatatgtcgtaatataatttttgaaattttcataaattaacacgtccggaatttgtcaaatgaagaaagtggtacttgaatttaaatttatatttatataaattaaaaaggaatgacaaaattattgagtctaaagacctctgtttaagttgtgtattttgattaaaataaatataatagtatccagtttattatcggccttgaagtaatgacagagtggcttcattcagtgagcttttacttatgttttggggttgacgttctcgttggaaagtaaagataggttgcttgggttgaggacgatcggtttcattggtcagcatgaaaaccacatcaaccatggttggcctatcttcagcgtgatcttgtacgcataaaagaccaacatgtatgcaccttattgcttctgatgcatcaaatatccctactaatgctccatcaaccaactctaatcccctgctctcactccacaattcccatgcctgtgtacatttcacaattcacacactcaagattaaattagaagttgacccaaaatatcaaatcaagagaaaataatgttagtatgaactcacataagcaataaggcttgattgttgctcgtagtaatggaagctagtgttcttcctcccattcactatctccagtagcataacaccaaagctaaatacatcagacttctcggaaaatataccagccatggcatattctggtgacatatagcctctgcaattaatacagacatgaaataagtaaatgtttgttgtgcttgaatgatttttgtagtgagacaacagcacaaagtgcatattagaatcaatcagaataatccttacaatgtaccaacaaccctatgagtgtttactcgatccaatgttccttcaaaaattcttgccaatccaaaatctgatattttcgggttcatattctgatccaagagaatattactgaccttcaaatctcgatgtattaccctcaaattggagtcatgatggagatacaaaaggcctctagaaaccccatgaataatgttgaagcgtgaaggccaattcagctgtgcactttttgttggatctgctcaatgcaagcacacacaaaatttgaccaacaatgtttggtattactgatgcagtcattttgttttcaaatcataaagaagtgatgaaatcaacaattagtctattgatttag

SEQ ID NO: 23458 - DNA, 4602 bp, Cannabis sativa
ttttacaagcttcccagtgaacaatcgctggagcatgaaggaactggctaagtttatttattatgaacgccacatcaggacgagtgagagacaaatattggagagcaccaagggtgcttctatacaaagttatgtcttgaaacggttctccatcaattaaggacaactttacacttgaacttgtgggatttggacatgattttgcaccttccatatgcaacttcacaagtaaatctacgacatactttgtctgagacaaatacataccagtattgtctttatatctttccactcccaagagataatgcacttgtcctaaatctttttgggaaaacgatttgttcaaatcagaaatgaaccttgaaatcaatgtggaatttggtgcagtgatgagtatttcatctacatacacaagtagaatgacgagattggtacctgtcccatgtatgaacaaggagctgtgatctgtacgagatccttaaaatcccaagacacaagagtttgtctcaacttgtcattccaagccgcggagcttgtttaagaccatatattgctttttgtagcttgcagacatgagttgggtgagttgaatcttcaaagccagggggctggcacatataaactgtttcattcaagggcccattaagaaaagcatttgtgacatcaagttgagacacattccagttgtgagaaactgctaaagagagcacagtgcaaactgttgttggtttaaccacaggactgtagatttcttcaaagtcaatcccagcttcttgtagatatccctttgccaccaaccttgatttatatctatttagagaaccatctttgttgagcttgaccctgtgtacccatttacacccaataacattcattgaagagtcatatggaacaagtgtccattttcaagctttcataagagcactcatctcagtatcgttgcactatgccattttcggtcagttaaggcagctttaagtggccgaggttcagaatggaagagagactctggcaatggatgtttggtggcaatgtaagattttggtttcaaaataccattttgagaccttgtacgcatgccatgagttctagtcacatttggtggaataggattgtcattgtttagaggttgtgttgatatattgtgtggcatagttggaactgtactgggtgtgagattatgaactgtatggtcattgtcatgatcagtatgggatgtagtgggaataagtgtatgaggggtcttgtggttgatttaaatggttctcaggatgtgctatggggttaagggtaggtgtggcagtagggaccacatgtcctggtgcgagatggtctatgggagagtgggtaacagtaggcatattttggagagtgacatgttcttccatgtttagggaggttggtggttgagtggggttcacagggacatgtgttgaattgccatgtatagtggggttaggtgggacaataggtacatctgttgtacggtttaatacattttgaggtgtaacaaaaatagcagatgggacaagagtgggaagagacgagtgtacctgtgttgatgtgttcttcgatgcagcaaggaataattgctcattaaaaatcacatttcttgctataaagagtttgccttcaagactttcacacaaatatcctttgtgagatgaagagtatccaaaaaaaatatactgttgtgttcaaaactccattttgtgtctattgtatggcctgagatgaggataacacacacatccaaaaggctttaggatagagtaatcatggacttgacaaaggagaaatttagtgggattagaatagtcgaggacatgagttggtagcctgtttatgagaaaaacaactgtgtgaaaggcctgccaccaataggagaagtctaggctagattgagcaagtatagtgagtcccatttctgttatatgcccgtgtttgtgctcaactctcccattttgttcactagttttgggacaaggatgttgaaagtgaatcccttgatcactaagaaatttagagaatggtcgatactctcctccccaatcggcttgaactttcttgatggatagattaaattgtttttctatcatggctttgaatttgatgaacatgtcaaaggcttgagacttttgtgttaaaggataaatccatgtgtatcgactgtagtcgtcaagaaagtggatatagtaaaagtacccatctttggatttgatatgggaaggaccccacaaatccgtgtgtattagcttaaggggctgtgtggcttttgaatttgtgctaaaaaatagttgtttgtggcttttgccaagttggcatgcatgacagaattggagttgttgggtggtgccaaggtgaggaacctgagatagaatcttgttcaatatggtagatgatgggtgtcctagcctatggtgccatacattgatatcatgtttagcactggttcgtaagggttatagagagacatgtgagtaaagttgtctttattgatatgggttgaattacatgaattgtcattcattacattgggaaattgtaaagaagtaatacaactcatagcagtaggtctataaccattggacacacttttctttaagccttcttccttcgatgcttttgaccattcttctagcacatataagccatctttaagggtccccttgagaagcactgtccctgtttgcttgtccttgacaaagcaacatgttttgtgaaattcaagaaacacaagattatcattagtgagctgagatacactgaccaagttttttgttattgcaggaacatgaagaacaaaatttagattaagatgaatattattactagtaggtaaagtagctaggccaatgttagagataaaaagtttcttaccgtctccaatagcaaggccttctgaatcaggataagccacagtggagtcaaggttttcaagaccatttttcacgtgattagaggcaccggtatccacaaaccaacctgaatcgtctccaaaatcaggaagaaaagaagtgggaaaagcttgaggatcataatcgagttcatgttctgtcatgtaagcacgaggagtagaattattggtggttgtagatgaactagcagatcctggtttgggagtgaaccaatttttgtcaaatcggtaatgacacactagtgtaggttgtccataacgaagacagagttggcacaaagggcgatttgtggattctggccatagatgttgactctgcttctagttttggaagattgaggaggatgataggggttgttccttgatccagtgaaggccacatttgcttggagtttcattgttagatctgtcatggaagaatgatgttcaagtcggctctcatgagagagcaacaaagcttgaacttcttcaaacgagagaacatcacttcttacagtgatccctgacacaactggatcgtactctggtccaaggccatttagtaactggagtatgagatcttgatcaagaattaaagaacctgcaacaacaagtgagtcagcaatggattagatcttgtaaacataatcggagatgttttgcccacctttgcgaattgtggaaaattgattcttgagttgaagaaatcttactttagattgactcgagaacttttgttcaagtgcaagccagacagaatgagaggaggaaaaacttgcaacagatgcaagaactcctttggtcatcgatgattgcagccatgatagtaacaattgatccttgcgtttccaatggctgtactcaggatttggttctctagtaagtaagtgttggagaggaggattgccaacaagcaagatctcatccagttcgtgtccaatgatagtagggatcacctgagatttccaagacagaaaataaattctatcaagtttaacagttagaacagaggttaaagaattcgaaaaggggttccagttggaattcagctggtgttgtgtcgtattggcagcagccgatgaggttctaggagctggagcaagatcggaggacgtggactccatgaatgacgttagtcaatggtgagtgataccatgtagaacttcagagtatgaagatcaagaacaaaaaacacaaaagaaagaacagagagggaaatagagtatgtgagaaagagtaaaacccagaactaatttctttattgaatgaatgtctatttatacacaagtaagacaacagtaaagaagagtttgttacagaaaaaataaatataaagagttagaaagactaactgaaaaatcagacttaactaactatactaacacattattcggaacgaaataaaagaaaaaattcatcaagatctaagaaagcttttcattagccatgaaatcagatcaaacgaaaaaaaaaattaatcaatatgtatatatcgacaggtgtaacgatttctaattaatcaaagaaaatcacagcggttttaatgaattcatcaatgtaagccccgacgtagatcgagatggtaactcggcgcggatgactgttgactgatccagttgaaagatgaagtgttcagcttgacgaagccgcaggcagccatggctccatatacacaaacgacgacgaattagagagagagagagaga

SEQ ID NO: 23459 - DNA, 4694 bp, Cannabis sativa
ataataataataataattcaaaatttaaagcaaattaattactcatcaaaattgttaatcacctaagtaaattagcatccattaagatttaagataattgttcataccttattataaaaaatcttgctttagaacatctattaggtttaaaggggtttttattgaattagtgaatgaaaatgcatgatattagaattttatgtagtgataatagaaacaaggatattatctaatagtattttatggatcatttattgatgatatttttaaaaaatttagtaggttttgtttaattttgagaatttaaagatgaagttaggtttggagttttaaaattttagttcaagtgttaaaatatatattatgggagattcatttaaaagttgtttatgatgttctacattattgtatgttttagtagccaatcgactgaactttgacaattagtcgaccattgtatggtagaactagttttagatagcattcgttttgtttgaattttgacacttagacttggagatatttttttaaggttcctttagtattgataaagatgtttaatgcatgttgtttaggcttagtaacattcattaagaaattatggctgctagtttttcagctgagtttgaaactaaacttagtgttatacattttatgaactagagtttcgtaaggctgcttaaaaggaattgtaggagattgttgtagattgtgttaagacctaatgtaaaaaagagtagacatatgcacacaaatcgtatgcttgacgtaaatctgttttgttgatgttgagaaatagccaacatagtatgtctaatgagctacagttgttaaaattttttcctgaacttttacatttacagaaatttagtgattttgttaagtttcattctattatttaatttaaatgcaaacgtgtctttgtaaattaacaatttttcttcctgaactttgacaactatcaaattgtactcccttctaaataaaaatgtgaaaatttcaacatttttttaatcttaaaaaaaatttatatcttaaaaaaattaatttgaatgattaagaaaattaagaaataaatttaaatttgtaaactaattaagtaatttaaaaaattaattattttattgaaaaatccatttagatataaaattgtatattacaaatttaatatttgtaaaaactaaattttataggaacaagtttgactctattcttttctccaaaaaatcttgatttgtttaactaaacgtaacacttctttagtttaatttctattctttttcttaaataattttattttttttatcaaatttttaattattttttttaattttgtaagatatgagtttgtaaatataaaataaacttaattttttctaaacaatacttaagtttttttaaatgaaattactgaattttcaataatttttggttaattttttaagatgtgtttataaataaaataaagtttgaaaatattttttttaggattaaacttattaaaagggacatgattatgtaactattaaatttaagagaaaatttttaacaggtcgtatattttaaaaagcatgatggtagtgacaaaagtttaggagacaataatattaattattcttaaaataataataaaatattacaagtctcagaaatatgttgggaatatttcttttgtgacaatatgagactattaaatgatgacatgcctctctgatgaatggttgagatattttgatgttgaatcaatttgggagatcgaatttgagtcgttcgattagtttctgatgctttgatattgacaaatcacaattcaaaatgtaagccaattttttatatataataagtataatttttatatgcatgtgagaaatccatcgaaagattatcaaaatacctttctaattcagttggaatcgtataaacccgagttgtattgagtgagatactacctaaacactacaacgtgtgtggtttctttgctatcagcaaccaagtcagcgtactagtgacaaggtaagcatttaacgaattcctcagtttagcttgattttaacatagtttaagattttaagtgatattggtgcatcacaaagccaaaatcatgatttgcttacatgactttggagaaaaacatgattagagcccctggtggtgcacgctacacgagcttggcgtaggcatcaccttggcacccaatgcctgggcgataggtgatgtttctactaatctctcgaaatgttggtcaaatagcatgattgagtaccacatagttgattttgacgaagaaatttatccattcttccactcttggtgattgatgcttggttacgagtacttattcttggtgcaaaataagcataatgctctaggtgcttattcaacctgatcgatggttattctaagtgtgcataacctaggcacagggtgtcaacttgagcgttgagttttgaactaaagtgttgtgttgagacgacacaacacctaggtgctcttggataaggtatactcacacaaaattgtcagaaaacttaacagagcctggtgtgagctaattgtcaatctggccactggtaacctgaaatgtcaacataggtgcaactaggtgtttcaacatccagatggattcatttaaatttagaaagctattgtctcctcttatttgatgaaaatgagggaaattcttaagaaacatcttcagaaaacatgttttaagcatccaaggtgaacctaggcactgggtctaggttaaacatgcctggattctacttctttttcgcccaataattttcttggcggaaaatgttcatgcaaatctagttctgtctaaagcagtaatgatttgctcagatttttcacttgggtgacttgtgcacccaatgagtgcacactaccaatgagggcactagtacctgtttgtgccccgacctggtacttgctgcacaaactcaattacacacattgtttcatgatagacttggggaatcatgactgaaagaagttctcaaaaaacataaactcttgtcgttgtgtgcctagggtgacatgatgttaacttgggcgctgaaacctatatgggtgccccctaagtagggatctattctgaaattggttacaaggcttgaaacttgattatggcatgtcttccgtatactttgttgcatttatctagtcatttgcctatggtattgaatcttagaaccaaaattgatgtgatctagggcacatgaatttacattggtgctaggtgcttacctgggcgcccaagtggacttttgacatgtcaaagtgatacctccagcttctaaatctcattctagtgtcttcgtaacccattttcttagactgttgaatggcaaaacttgaaaacaattttgtaggatcttaagtgcttagttatgtttccccgtttgtcaacttaagccctactatagttcccaacatgcaggttgattgccttgtctgggatgtgggatgtggggcctagggttcttatgtttgtgccacatgttaaaaaaagtgtccatagtgtgtatattaacgatgatgattggtgcagctacaaagctccaattcaagggagatggtactggaagagtcttgtctcccttatagatcaattcaaatcctttctgaatggccaacattttctatagaacaaatacacagtttttaatagctataaaatattttgtccctcataaaacaaagctcactggagccatgaagtttgggggagattctatacccagcttcatactatggatggctgttaaactcttgctaaaaataaaggatcgacttcttagatttggtatttctgttgaagagacatgtatgatgtgtaaccagcaaaaagaaacaacattgcatctgttctttgaatgtcaatatgttttctagtatttgtaggacactaattacaattggctacaacgggagcaatttctatttctcttcttagtccaattcggtggattcgcagagcaaagattagtaagtttcaaaaacttgtgttgataactgctatggctagcttggtttacaacatgtggaatgctgaaaatggtaagatatggagggataagttagaggactctaccaagcttatatgtgctattaaagaaaacttgaagcagagacttgatttggtctgacctgaaaggtcatgagaaagacaaaaaaaaatcaattctcataacaatttttacatgatattagcacttcaattcgataaatgcatatactgcactggttcactcatctatagtgatttagtattgcatctctcttatttttttttgttttttgaaaaaagtagtatttagttgttgatattaagaacaataaattttaaaataaaataaataaatgtaatgcatctaggacctccacgtgtccatatttatgagttaacaaaagtggtagtaacagatgtaaaagaattgtaatattgggtatttttgcctccaaaaataaccaatttaatttttagaaatgatacatttttaaattttattaaaaagaatgtccaatttttttttcaaaaatatcatattttaaatctatatcagtactttataatgaaaatatatgattttcttaaacaaagcctaattgaaatttttgtttacaaaatcttgaattatcttgttgtggccttgatacataataagcatatatttgttgggtatttt

SEQ ID NO: 23460 - DNA, 3326 bp, Cannabis sativa
  modified_base (3288)..(3294): a, c, t, g, unknown or other
cttcaaaaaagtgattaattgttattttagttgttccactaaacttttcccaatataaacacactaaatgagattgttcgggttaaaatcacctcttccaactcttcaattggcttgagttggttattatcatcatggatcctaggatccaaatcttcagtttccttctcggttttttcagtcagaattaccatcagctgatgactggctcttttatttttaagctccaccctgtaacattctcaagctaatagtttgtcaccttaattttccctactcgagaatgtggaggaaattttaaggacaagtgttttatcgagcttattgcccccaatctacctaaagttgggtgacccatcaacacaatataacaacagaggggatatttacaactaagaactcttgcatttgagtcctagacaatggtgattcccccatagttaagggaagctcaattatgcctaggctcacgacactgtcgcatgtgaagccacaaaaatttacgatacaaggtcttagttttgcctcttctaatcccatcctcttcaatgtttcctaataaaggatgttgacagagcttccattatccacgagaaccctctttattctttattggcgagttgaattgtcatcacgagaggatctacatatggatatcgtacatgcttcgaatcttcttcataaaagatgatgggtggtgcatttgactctgctctgttcaaaagttctagaacgaatgctgacaattcattctttacttcattaatgtgtctcttttgtgcactattaatatttcctgcaagatgtggccctccagaaataactaagacatcctcgccctctacagggggaggttgtaatctcgagttattcagtttattgggctgattaggctcatttccttatgtcctcacgtattgcctaaaataccctcccgagattaatttttcaatttcatcttttaactaacagtattcctcagtagcatgctcaatatctttatggaaactataatacttagttgaatctcgcttattcctcgcatgcctcatcggttctggtctgcaaaatatgacccgattttcattggcaaggtagatggtctcgcgagtcttattcaattcagtatacactgaataaatgggtacatacttctcatgcttcttttgtttcttcttatccttggattagtctcttgactcatgtttcctcttggtatttgatccatttggattttctaccttagtagtcacggtgctcgctattactgtgctagtgctgggtttatctcccaagccttattttaacagcttcatttcattccgtgcttcttcattttgcacaaaattttgtggttttcattaaattcattgatattccttataggatgcccttgcaaatcatcctataattctccccctgcattggataaatcagttgtaattccaggctgaagagctgttaattgaatgctatcattcaaatttttgactttagtcgtagctgtactgatgtgactcaagtacgctttaagggactctcttgattgttgcttgatgttcgtcaatgagaatgcctctgttcgatgatctcttgcagcctgaaactactttttaaaatccttcgacaattgctaccgggaagttatgaaatggttggtgaatttttcaaaccaactacttgagcctcctgttaaggaagttggaaacaatatgcaacgcaagttgtctggaacatttctttcttgcattatggtgttaaaattctttaagttggcgacatgatcagtggttccgtgatattgcgagacatgcaaatttttaaatccttgagaaaattgtgagtttaggatgtcaggatggaatgatttagtttcttcatctgaatcatatcctggcagtttccatactctccatcttgatatttcctaaatttgtcctcaagatccaaaggttgttaattaacgttttgattaagttagttacgcaaatcaagtgcatttttaaatgattgcataaagtattgtggattaataataaaacttgctaatttatcaaaaaaatcaagtgcattttgattcaagtgttcacaaaggtctggttgcctttgatttaatcgctcgcagaaattgggttcacaatacatgtgctcataattactcatgaatctagtccctgagtaactttcagactggtaactacgtgagttactcatactttcttggtcagtaaaataacatcgagatctattcccatctcgcgtttgcctatttattccagtcaaccttctatgcctataggcttgtgactctcttgtactcgaacttgcttcacgtgtctcatctcacgttgatcttcttctccgaaagagatttgacacacgtcccctacttaagtaagtgtgtgtattctctgtgttcgtgcgagaaggcctttgtggataccttgggggttcactagtcccaggttcatttccaatattttttccatcattacaagggatttcctagtttcctggttgcaattgtcttgcctttgcattcatgcgagatgactcaggtacatcagtttgttcattcccctagttcacaaacccatgggaagttcctggagcgtcacgtcgatgctccaaatttcttgtattacttctgttgggtagattttctctatccattgggacatccctagcattcccaggtttttcttcttgagcacttgtgggattccctttgttattttcatgcctcctggccttggaacctcgaggtcttcctcgtggtctccttatagatggatcaagttaagtttgaggaatggttccctgtgtatccctggcaactgcggcttcttgctccaactcagcattttgtttgttttattcagtcaggcattgtcgaagtttcctgttttctaattcaactagtgggacatatctagtaggatcataagcattttcacttcatctctctgggatttgttcaccggcaggtttaaaatttccatcgttcctcgtagaatgtggttttttagtcgtgttttttctctgtgatgttgggttttgtgccttaaataaaactcatttatatataaagatttactaattaataaaagatcagaaattattttatgttgcatgatttacatgctttatttcatgattatatgtttaatgtataaattatattcaatccagaacatatagtaattcgtgattatagtgttatcaacacaacgaaatataatcatgattaaatgtttcaaaagtttatgtgtaacaccctaactaccnnnnnnntattacgtgattttttaaacgtactgtgcagc

SEQ ID NO: 23461 - DNA, 2662 bp, Cannabis sativa
aacatcctaaatccttgttctaacagtcacatgcataatatatccaaaacatagtttgaataaaaatttctaccctagtgttaaattgaaaagttcaacagagtttagatactaatttatttagcaattcaaagaggagggttgttgtggtaaaaaccctaaaatttgcaaacccaatcgatcacctagtcagaacgtacttgaatgtctaagttttcactaggttgggggtggatcatactactgtccaaaggtgcaccgtctgggaagtagcttgctcgaatttccaaaagaagactaattagggtgtcaaagcacttgaacatccattgaataatggaaaacgtaaggttggagctctttcaaatctcttgaaataaggtctctagtttgagtttgagaatgagcgaagttagaaatttcagaaatggctaaaagaggaaaaagatgaagctcgcgcctacttatagtgaaaggccagctcatgaaatttaaaatcaaatgcttagataatgcaagccaaaaagcataaagtaatccagttgttggggaatcgaaaggaccatatttaatgctcctcaaaaaaattaaggcatcttatcatcaattcccccaggccctaagcacattaaagagtcgtggcttcataactctacccctacttttatttccctacaagaaaggtgcttaccacaggcacatatgactcgcaggtcgcagaacatttgacacacgtataccaataaatatttaacaaaggatctaaaaccttacaacttccaggtggcaaaaagatgcttgcccatccttaaagttttaccacgtatcttagagtatgccctagaaattcagagggaggctgtaagcttttaccactcaagagtcccagaactttcgggtatatgttattcgtgtttctggaagaagaaaagatggcaaaaaaaatgaagacctcaatctaatgatcattgaataagtctccttaatcgtagaagggtctaatctgttgaagacttgatgatttaccacaaggagaataataaacagagatataaagccatatccttgcttcgagatttataagaccaacttgtctataagtgtaagcaaatgctacacattcatgtgaacagtctaagatggatgtccactatagaagaagaaccagattcacatgctagatgagagactaatggatttaagaaggttattcttgtctgacacaagataaggtcttatcctccgtgttagactatggcaatacgcttaccaccccctaaatactctactttgcctgacggctcaactgagaattttttccaccaagtggaagcctttgcctgacacgtgccctacaagaccaatggtccccactgtacggacagtttgacacacgagaaagaacaatcttggtggcccaatagtaatatttttaatatattttaccctaatggtgggccttttgtagaattcctagacgggtcattggtatgcacatactttatccttgctatcccaatttttttcctcatgacctgacatgcttacgtggacaaaatcagcaccacgtggtagtacagctcacgaataggaaggccaagccagcaccttacaaaatagaggccccgacactcaaacaagcatcatgtgacagaggaactccctctcaggagtgggtcggtcacccctgccaagccctattgctggctagcctagggactgcaccatgactagcttgcttggcctccacaggggcctagttagctaagaggtcccctgcatgctttctaggaaagttctacatgtagacagcaacacatgggctgcaaattgggcactaaaagcccaacaaaatagttgaacaataatcaagggcaattttttctttggtaaatatctaacaaactatgcaagtattgagggatttaaactataacctaggattttaggcctcctatgtaaggaccttaaacttagcctagaaacgtaagttacatctaagtctgaaacctattatcggctttcaaaaagtttagcccctacttccaggcacagcctacaaatgtgtacaccgatcaaccactatggcagcttttgtagaaacttgaagcatcaggatgactactcaaatgggccattaagcttggcttgtttgagataacataccaatcaagacaagccataaagggtcaagcccttgggactttgtggctgagtgaaccaatagtactcttcagatccctcaagcctcaggagaaaagaaagagcagcaaaaaaaatcctaaagaactaccatggaaactccatgttgaagaaaactaaactgaccagttgtcgagtacacgcattgcccttacaacacctaggggtagtagttgcacgaaacaatcaaattcgacttcaattccttaaacaatgaggttgtgtatgaagccttgatagcttgcctcaagctggcacatgaagtacggggtaaccacctcgccatattcaacatttctcaactagttgtgaatcaagttctcggtgaatacacagctcaaggtgaaaggatggtggcctacttgagcaaaatcaaagacttgctaagttagctcaaaggctacatgatcaggcaaatccctagagaacaaaatgccattgcagatgaacttccccatct

SEQ ID NO: 23462 - DNA, 5299 bp, Cannabis sativa
ccagactttactgtgacgatatgttgtcactgtaggtataccaaacgccatcgttctgctcattttattaaaacaacagaaatttttatttgcataatatattgcgacaacatgttgtcgcaatagtctatttcatagattcattttttggcgcagaaactttttatgcggaattgttccctctaaagtattttgacctctattgtggcaaaatgttgttgcaataaatcaatagattttggaggcaagtttaccgccatttctatttctgataatttatcgtcgcaatataaattatatagaaaatatagcttctactgtgtccattactcatcgcaataaggttctagaaattaaaatgaatgatataatttgtctctgataaactaaatgaagttgcaacaacttttcgtcgcaataaatcgcaatagagacaaacatatagttgtcccaatagatgtgttttcttgtagtgtgttgcagtcgagaattttgttaatgttgatgagatcactcctcctattgagaggagaatcctaaagcttggtttacatttgcagtctctttatgctcagcagttgagttcatcatctaagcctactgtagttacaagtaaggttaaaggtttatgtgctttgcaacaatctgttgttgacgatgtcaatgatgatgatgagaaagcctttcatgccttgttcaaatctggtttgctgaagagacctacgtatgttatttttatgtttttgtctatgttatttgtgtatagcatttattttttttatatatatatgtgattttgtattaataattttgtttgtttttatgtttataggaaggatatgaatggtcatttcttgtattttgctcctgctgataataagcttgagccaggttttgattttggttatgaatttgttcagcgaaagatgtggtttcactctttgcttcattgggatcagtttcttagtgatttctgtgagttttttgttgttttgttagttaagtttttgtttattcatcttttcaattttttcagcatatggatgtgattttttattatttgagaaagaaagctaagcattctactacaacaaacatcaagattacaactacagattgctatttcaatagtagcatcaggtcactgcatggaaagtatgtaagtatgaatgaacaaatgtctcttgttcatccaaagcaccaaattgctcatttcataaagggtaaacgtcttcgatgtggtacacattggagtcaggctgaccatgtgctgttattggtgcacataaagattgttagtcattgggttatgggtaggcttgacatgaaatttagaattatatatttgtataattctctaaggaccccaaagtatgagactgcttctttgcttgctttggaaccttattctgtcatgttgccattgtttttctctctgttgggtgtttatgatgagcttccttataccttaccagcatctgtgaatcctactgcaccttttcctattgtcaatagtgaagtacttcttgaacaagtggataagtatgaattttaattgtttctgttatgttttaattttctagttttgttgttattttaacatctcatatattgttgttttgtttttgttgtttctagtgattgtggggcgtttgttgctgcttttgctgagtatttcattgaggggaagaatattcttgttgactttgatgttgaggagtatcgtctaaggctttctgtgttgctatacaagtttggacttatgaaacaggttgagaatgttgaaagtgagctagaaagtccacctaaacctccaaagaagacgaaggcgaaagctagagggaaagcgaaagctaaagcgaagtgatttgaattcaagaacaatactttatgtttatcttttgttgtttagccaggatatgatataatatgttgataatttgctgtaggcttttttatttttttatttttttatttatgttgtttagccaaaacttaaaacaaatgttggtgtcttgcttatggctatttttatgtttttttttttttatgttgttagcctgaactacacaacaatgttggtttattcctgaatctttctattctatataatgttgatattatatgtagttatgatcataattttattattatgttttttatttgtattttaaatgattattaatatttttttatacaatttttaaacaaaaaaatcaacatctatatctgttttctaacgtaattttatatagaaaccaatttctagttgttttaagagtttgttcttcattttttttaaacaacattaactttaaattttaatgtttttgcaacattaattaggccattttatggaattcaaaactaaacaattcattatcaaatcaattcatttaaaatgcatttcagagttaatctattcaatagcaataaaattcacagttaatcaattcaatagcaatcactatttaaaattccttgttatttcctctttgtatctgtaaaaatgttcaacttatgttgtttttttttgttgttatattgttttgtagttgctattttttcaatctatatttgggttcttgcatgtcctcctgctgtgtctttttcttctacatttggtgcatttgttttgtgtctttgtctcccaaataggtcttgttgttttcttttttggtcttcccgctttcaccctttcaagtggtggcaatatttcaatatctttgatttcttatggaaagtcccaattgctctaaagagttgacagagttgaccgagtcaacccgccaacccggtcaacccggccaactgaaacccatcaacccgtgacccgccaacctgtgccctattcgggtccgaattcggttttatttttttgaacctgaaacccgtgaacccaaaacctgcgaacccaaaacccggtaaactcgcccgatgttcagccctttctatgggtcgagatacatctctttcatcactactaaggcatgcgcacatggcatttcatctatttgaaacctgttgtatgtgcatgttctttgttctagattcaccacccatgatctttttactttgtacaattcaaatatgtattcatttgatgctctaaccggagaacaaatatgttgtgtatttattttgtttttataacagaaaaaaaaaacattaattcaacattatgaaattatgttttagaaaaattttgtacctttaatttcaaagcagctttgtagttgtccttcatcttcatctctgcaactggaatcaattatgtgaatgttccttttgccattttcctatttttgcatgtccattcttggattaaagtcctcaaagcttctattagtgttttattggtagttctctagctgtcaggtttgctgcatttaatgattcaacaacattggatgtcattgtactgtatcttttgtttttagaatacaacattgaccatttctcatatccaatattttgtagataaggtcgaacccgtttgtctaaggcatcgagctctttcatgtgatattcgaattttttagcagtgtatgcctttgctacacgagaaaatagcttttcaaagaaccttgtatttttcttgaatgttgtctccaggttgttgagtaggtgatacacacaatatccatgttgtattttagggaagacttgttgagctacttttattatactttcatgtctattagatataacacactgttcttgtctaataccaaatttggctcttaatttttcaaagaaccatttccatgatgtatcattttatgaatctgccaaacaaaaagctaatgggaatattttacttgttgcatcttgtgcactagctgttagtagtgttccctcatatgaagctttaagaaatgttccgtctactactgttataggtctgcatttagtgccatgaagcaaaacaagaagttgttgttttctgtagtttcaatgtgcactacagattctgggtttgttttttggagcatatagaaataactaggcagcaactaataacactcctttacttttcctccaactatgtttagaccatgtttcctactcctccatgccttcatctcaaatctaatatctgctggtgtagttgttgtttttatgttcaaaaacttgtaattaacacagtcccctattatttttgctgaagtttgcctttgatctccaaatttgatgcttagtgagcaagtgtggtttttattgtatttccttattataaaattctatgtttccccattccttgaagctcttagtgaccatttacaatctttatccaaacattcaatttgaaattcctttgtgcaagattttttcaccttgtattgaaattgttgttttattaaaacgtagctgagtacgttcttcaaagtttcctcatctttgtacattttgcctttctcaatttctagatgtcatttatctgtgatgacaaatgcttcttcatcgttgctttcttgttgatcttgtgtctgtcttgttagttgagccatcatttctgcagcaattatttttgcatagtcaacaaagtcaaattcatcattatcttcttttttgttttctttttgtcgatgtgttggtgttccccctgactgagttccatattcaagcatgtggactttatgttctgtgtcaacctcagtaaaaaaaagtagctgtgatgttgtttttgtgttggggaccatatttatgcacaaaggatgttttgtcatgtcattttcagttgattttaactgcaagtaaaactccgggctttcatcatctgtgatctttaatgctggatatctagactgtaaatgaaactgcatttgtcgggtacttgagtttttgttgcagttatgttttttcaacagtctgtccactaattgtgtatatttgcaatttatttggatgcatatcccagttgtttcaaaaccagtgtactggttgttctcatcccaatgtccattgctttgaactagtacaagtattgatttcatttgtctgcaaattaacagtatgttcgctaaattgtatttttcatgtatgaaaatatttgaataacattaattaaccaataaatcaatatttttttaaataaaatattatttctttttcaaactaggttttaaaatttctaacaggcaattaagataaataattttattctaacttattaactttaaatcaacaatttctatttatttgaatatatatgtaactatatatatatatatattttaattcatgaataattttaacattcaaatgatttacatatttgaatttatttgtatttttc

SEQ ID NO: 23463 - DNA, 3430 bp, Cannabis sativa
tatatacaaatgattaactatgtaacagtttgagagttagcttatctctctccacaagtcagagctttgttctcgattttcatctgtactcataagagaaatcattgtgcactgtacaaagtaattgagtgtggtccatacgtggatatgaaatactaaagatttgcagaaaaactggttgagaagcactttttctgtaaccaaattttaaaagaaaaacatattttttactctctaaattaagttatgaatattcaaggtgaatattgatgttgcattgtttgacgaagacggaagatatagttttagtggggttatttgggatcacaagggttgggtcgtggctaggattataagattgcggattgggcaagttcttccaaagattgttaaaatcatgactcttaaagaagtgttatcatggttaaaacgcgatttttagggtgttaatattatcgaatctcattgtttggtattagtacaaagcggttagaaatttgaatgttttgtcattcattttgggtggtgtcattgaagattgtaaacaacttttctattcttttagtaatgtttctttacgttttgtcaaactgtctgctaattagagtgcttatcttatgactagacttgtttatatgttgattgtattttttagaagtataatctcttttttgatgttgttgatagtattgaggccaaattgatttaggaaatttaccattcaagaaaactaaaaaattgatttaattaaattatgaagtttgtactgatgtcaactaattgtaagaaaatcttcattaaagaaattattggaattctaatttcttcaattttatttttccaaaaagatcctaaattattcattatattttatatatgttgaagacacattatctttacaaaagattgtaaaaatcttaaaataataaaacaaattaatacaaaataaattttttccctcagaaaatataaattagtttgatttaaaattctacatactcttctagttaattaatgacaaaaaattaattgcaaaaaagatatatttgtaatgagattataagaaaagacctatatgacttattcaaataagtaataattaattccatagaattaagtttaattaaatacacaaaaaaaaattaattaattaaaaccatcaaaaattcaaaaaaagtctgtacattttttttctttaaaaaatataatgttttttatcaggtttaaaaatatctaataaccaagatattattattaagtccaaataaaaataaaatttatcttttttacgatagatttttataaattttacatgattatatatgtattatatatcctaatcctattcgaactatatatctgaaaacctttaaataaacaccaaagcttaagtacgtacttttaaaaaatactgcatataattattattattttggttctcttatatttaagttattttcttccgtactgttacaaagttcaacatctcaacatgaatcctccctacgagtctactgaaaacaaagtaagtcataaacttatatttacttttctaaaaatttaattaaaagaatagaaaattttgagaacaacaaaactttaacattattttcttaattttatttaagaaatcttattctttttatctgttggatttttttaattatttttttttatatttctctatgttactaaggttttctttcttttttttttttttatcgcttattaaaattaaactatgttttttatatcttaattttcttaaaattaagcgttggaattaaacttattatatatatataatgattactaaaatatgatgagactaaataaattcaaaagataagtgagtaataacaaattatctaagtaagaaaaattaaatgtttaataagtattttcttataatttaatattattagatttattatgaaaaatttgtgattatatgcttaaaatagctttattcactaaaaatatgttactctattttacagaaagaaaatgatatttactttgaagaagacgaattactgggtatcaataacaacgaggtatttcttattataattccacctaatttcaatttgtatttttttcctctctctccaactattattttttaagtaattattaagaataattatttttaacacttttgaaacccactcagtatatatatcacttgaaaattaactaaattataccaatgttagactctttgattttgttaattattttatagcattattataatattgtatatttttcatgcagaatgaagatcctaataatgagccttcaaataatttgatgatgatgaggtacctatatatatataaaaatctaaaataatatatattagttaaaattgtgagcatttattatacatttatgctatttatttattaactttgaatatatttagatttgataatgtttgattttttttattttcttataaattaacagcaccatgccagcccaaacaaatcaagtagagattaatctttatgaggaaaaatcatcggaaaaaaagaggcacgtaactaaacatattattattattattattgttattatttaatgtctagactcgaaatatttatgtactatttttgtggttgcaggagaggcaaaggctattgcacttgtaaaaagacccaatgcttagttgggtaagtaataataataataataataattagtgtatttatttttagatatgtagacatatgtatagatactatttatgtttaatataatttgtaattttttttaataaataaattttaatgtatttttttttttcttgaaggtattgtgattgttttttgaatggcaattactgtgggaatttttgcacatgtgaaacgtgtaaaaacaaaatagaaacccataatgaggtggagggggctctcaaaaaatttaaagctcgaaatccacatgcatttgattcaaaggttattatttactatactttaattatttgactctaaacatattttttattgaaagaatttctactttcttcattaactttatacttattaaaactcatttgtgtgtctttatttggataaaaaagcagaacaatagaggatgcaactgcaaaaaatcaaagtgcctacaaaattattgttcttgttatggggtaagcaaatatcaaatatttgtattgtttatattatgacataattcatattttaatgaaatataattccttttaatttcttctgattgattataatttaatttttgttttttaatttgatttttaagatggaaaatggttgtttcgaaggatgcaattgcgctaattgtgagaatacttttggcaaaaaatcatcaccaacaatggaaggttagccatgccattattaatcactaaatatatacatttctttccattcaaaaatatatatat

SEQ ID NO: 23464 - DNA, 3729 bp, Cannabis sativa
aaaaaaaaatcaaatttaaatttaaaattaaatttgctggtacaacggcgccgtttcacaatgtcgggtacacaagaaagcatcttttgaggagattgccagttgtattgtatatgtacacatttggttccatttcattatttctttactttctatcgttctctactcttccttcatcctctctaccaagttcacctttcgtttttatcattaatcatgtctgcggaatcggctactgcaattccaagaagccaagtaagtaaacccaaacttttttctttaaacaaaaaaaataaaaaaaaatactaaagaaaaatatgaagagaacttgaaatctttcaactgggtatttgagggtgaagacccttttctcagattcccaagttataggcttagttagtaaccaagggtctgtggtggggaggtttgttgtttctaacgatggattttgtaatgatcaggttgatctggtggacttcattgactggtctggggttgaatgcctcaaccaaagcacgagtcactctcttgcaaacgctctcaagcaggtaagttttgggtgttttctattgtaaatataattcaggggccttgatctgggtatctctcttgtgcttttattgaaatactttcaaaaaccataaaatccaaggtaggattttaattttttctttaaaaaatttttccgttgttattgtttgtactcttgtatttgcctcttttctagttatgtggggtcgctgaattatgcttgttattatgtttgaatgttccaaaatctgtatttgatatttgataccaattaccaaggtattttggtggtcttattctgaaggaggggtttggggaagatctctttgattttataattctttccctttatcgacttcgaatatgctactctggaataagaaactgagttacctaagcttgttactccgagttagtgaatattaatattactttaaattacctaatacctttattttgtgaaatgttagtgcacaagattagttaagtgttttgctatcattccttttgtaagtaagtggataattttttttttctatgaagttgtacactaattatgaaatgttaatgcacaattttttttctttctttttctattttctgctgtataaaacatggggagtgagactaaggtaatgaaattattcttggcttcttcgttcaacgattatgtagggttacagagaagatgatggtttgaatctggagagtgatgcagatgagcagcttctgatttacattccttttaatcaagtggtgaaattgcattcttttgccatcaagggacctgaagaggaaggtacaaattaatagtctttaaaatacaagtattcatgaatgcattgcatacctttagttcttttatgttactgttttcctttctagttatttgctcccctcttactgggaaccatatccttatttatctctagtttcacttacaagggttacataaattaaaacaaaggcttcttttcactgtgcataataaaacaaaatatatggataatctttggtaatttatttcctaacaatagagtgtctttaacactgcctcaagtttttccatgaaacccagtcacacacacctttgaattatgtaatgagaccccgatatatttttctcatacaagtcatgactaaaacacttttagccatttagtgatgaacttgatcatttgtttgtatttgacatagagggattgacttacaggtcccaagactgtaaaacttttttcaaacaaggagcacatggggttcaggtaaatttgtaggaataataacagttctggttctcaatagaaataatcaaaattcaagcacttacatctctttttaattttgtcagcaatgtcaatgactacccaccaagtgacactgccgttttgtcccctgatagtcttacggtagtacttcctacttataatttgagtaaaattaacttgttttgtttaagacatttttaccatatgttaatgaaggttttatgttataacttgcatgcattatgtgttgctgcagggaaaaccagttgttttgaagtatgttaagtttcagaacgttcgcaggtatgctagtttttccttatcctctcttttaattcttaattcctgttattacttgcaagtattcatacattgtatttgtatcagcttgacaatatttattgaggacaatcaatctgattctgaagttacaaaagtccaaaaaatctgtctctacggcacaacgtaagttgttatattttattttcttcctcatttgtattcttgcaacttcgttactgtcagctatcgagttcatcatgcttttttatttgttgataccatctgagctgacctcacttgtgatagagttcatcatgttttttgtctcaagtagtaaatgtcagtcccatgtataaaaaaaaggctgtattatattgtagaggtagactgaatgatctttgtgtcgttttgcttgtcatccagggtggaaacgacagacatgaagggtttgaagaagattgaggatggccactaaagaaatgaattagatgggtggatacaacaatttggattactggaactattgttgattttcactttgctttttcaaatttttttgattgaaattgcaatttgcaatataataactttcatgtgaattcaagttgcttttttataaccaattattgcccccagaatttctggttaagcctactttgtggtttgttatttgcctcattttattctggagagaaaggattgatggaatgacaaaaaatcatttttatttcattcttaatgactatagactttagaatagtttttctaccattaatctaataattttaaaatattgagtaaaatgtaattcaaattccaaggttttcttccctgggaaaatgcaaggttgaaagaaataaaaaagctattaaaactactgaggttgtgtttgacagctgtgtaattaaattagtatgctgaaaaaagaactacacattatttgtgtaattacacattgcatgtgacttttttttttttcatgtttaattgtatacattagtttgcaataaatatttaggaggctaatttgaatttttactcatgaattttaacatacactaaattatgttcttgaacttttaaagtcgtttaaaatgtcttctgaactattgcgattgttggattttaaagatttttatccaattttagttaaaaaaaaagtctaacatggatgaaagttcaaaatacaggatttagtacatgtaaaagttcgagggacataatttggtagatatcaaagtctgggaagcatgatttagtatataaacaatcactaaaatagtaaaattaaatgaaattagaaaaaaagtccttaaatctaacaattttaatagtttaggagaatttttaacagtcagaaaagttcagaggtcatgatttggtacatgtcaaagttagagaggtaaaaatcttaattagcctatttaaaatataaacaaatctcatcttactcaaagaagccttagaggtgttttcacaaagaaaaaaaaaagaagccttagagatgttttgcccaaataactttttttccttcgtagttttgagtctattttttttttatgtggtgaacagagtcacacatgattaataaggaaacaaaccacaatcggcagtggaatctccttgaattaagatagctcatcgtctaacc

SEQ ID NO: 23465 - DNA, 4007 bp, Cannabis sativa
caagttgtaactactagatctagcatttccagaaccagatctagcttagcaatacttataaccaataagtataaatgaatgatagtaaactcacttgaatgaataaatgcgaaattgctaaaattatgcttaaaatgaatcataccaaacataagggttcatagccattcaagccttaacaaaatcatctcatacttactttagttttcataatctaaaacaaagtattacaatccatgactacaaatcagtttttataaaaattgagagtaataaaaagagtagagatgagtagaaaaatacaaatcctataaataagaatgatgggggctccttttgtccttctccttcttaaattcgaagctccctttttctccttcattttctgtattttttctttctgtaattacttttctcccaaaaatggcagcttagctcctaatcttcatggaggttgtacttgacaaattaatagctaattagggtacaatgtaataccctaaaaatagaaactcattcctttccaatcttggcccactaggtttggtttccctcctccacaacagccagctgacgtgactttaagtggctactacataaatactgatgtggatggatgaaattcgttttgcaacttttttcatgtcactgcccagaatgctgaatttgttgtagcaatgcttcagcaaatcagcccagtttcagcttctattgccactttgtctttgcatcctttctttttccctagcagtataattcttctttcctaacagcaaacaaagaacatttaattaaataaacacaactaaaaatagcaatttttacaagacttagaaattagcttattgaatagaaaatgaagataaaactagttaaagtcaatcaaacaaacacactttcattactcttttcatgataattcaagtttaaagccactgaaaataactatataccataaagttatcatagtctaagattcattttcctttgttttgccttcctcctcagagaaaacaattggttcaattcccaaaacttcatcaattaatttagttttccgagtatcagaactagaagcaggtcccttttttttccgtttcttagtagacagaatgagttttccctgcacttttgctcttgtttttgccatggcaccagcacgagctaagagagagctagagagagagaaaaaaatagatcttatacgtcattgggatttttagtgcttaataaatttgtttagcaactatgatggctttcactttgagtgtttcctactctaatgattttagattatagtttgaattttttgcaagtttgttatctaaattttcaagagtatttctaatctgcgttacttatgaattagttgtgtatgctttttggagtgattaacaacttgtttagctagataattttttataattgatgtgagacgtataacatattggaaaaacatgtagagtacctatatcgattttgacatttagaatagttttttagttttatttttttaggttgtactttgtaactattttaaatcacctgttaatatttaattttttttaataatttatagtgctgaaattgaatttaaaataatttatagaaaatttgaatcgcctgtaaatattttgttgtttgtataaaaataacaaaataatttaacttttatttttgtggtagtaaacattttgcgtgtacgatactttttagtacaaatcgaaaacttatttttaacataaatggtatactttaagagagagaatagtcatctactattctctctgtctaggtattatgtcttcccagttctttttcattctttctgttgtgttgtccatactcgtgcgcttgtgtctttgagtctcttgttctgtgtgtgtgtgttgtgtcaaaggttgtctttccttttggtttgcttgtttaggttgttggatgctattctgttccctagtgttatcgtcctctttgtctggtgtgtcccctggtgtgctatcttttttgtggtctatggggttgggtgtggcgtagttgttgtcacgtgtttgtggtttggtgtcttggttggtgactgtctttattatggagggttttgttagttgcagtggagttaagaaaggtagatgtatctcatttaatgaggcattgattactcttgcccctagtgcttagttagcacaagttctctccaagttctgtcttattggtaagatcctatctgttaaggttttgggggaaaaagaagtggccactgcttgtgcaaaactgtggaatacacaggtgacggttgactccttatttgttggcaaaagcattctctaatgtcttcaggttttgctttgagaagacttcagataggaagagggtgctggagcttggtccctaatgcagtaaagggaagatcatggtccttctttcatggtcttctggctttggtatcaaggagctggtggttgacacgatacgagtctggttacaaatacacaacttgccacatgattattattctagagtcaatgctaaaatgctgtctgctcaagctagtaaggtggtctatattgagcttgatgaatccaaacctgtttcctgggataagtggattagagttcaagtcaatgttgaagttaaaaaccctctattttgtggttgctttttaaaagtgttgaatggtgaggcctgctgggtacaaatcaaatatgaaaaaattggaaaattttgctacctgtgtgggaggttgggtcactagaggagtggttgctctttgcagttgctagtatctatctgcaatgctaatggtatacccttcccggtgtttggatcgtggttgaattcttcgtccttgtacaagagctgcttctcaggggaaagcgttgggcctagctttggcaaaggcttgggtggtgcgaagtcggagtcgagaattttgaggtcggcacagcctgcaacggtggcaggggtgaaggcagagatcgtcgaggcagaaccagagcatcatactcacgactcgagtttcgagcccaagatgaaagggacagatcatgtttgtctcagacctagcaaggtgtggagacccaaggtgttgtcatctatgacgtgtaatgaagaacatgttttggccaattttggtaagttttcttctaagcctttgctgcaagttggaaagccttctgctggtttgccgaaggtagaggatgatttgaatttgggaaggtctcgtgctagctatgtgaaggggaaaggtcaaaacaattttgaccatactaatcagatgttgacttgtgatatatgtgggccaaagcatgaaaatgtggagacaggccaaggctttagcttaagggatttaggtcgtgatttattagctcctggggagttgggtggtggcttcacctatatttgaactgggtagtgacttaacttctcttgggaagttggaacatgtgaatagattggagaatgtaggtcgtgtgaattatttaaagggcttgggtcttgatatctcggtcaaggcttctgggccaacctttgataatctattggaggggtcgtgcgatgtggggagagctatgggtcgtcactattttttggataatggtcttctgggtgaagacctaaatagctcattaaaaggccaagatgtatcagaccatcttgatgagaatagatctctgtccaaattttttcaagcccaagaaggttatttacaagaacttaacactttgggacctcaagccataataaacggaaagcttccttggtagatattggggtccaggcctcttctaagattaacgagcacactacacctatcaagaagcgaaggttggactttaaaactttttcacttgggagtaagccaaacctgttcattagaagagtgaagcatgtagtcagagatttccctcgtggagtgggattggtgtgtggaaatgatgatgcaagtgttgttcaggtttctactaattcattggagaaacctaaggccattaatgaagtggaaaggatta

SEQ ID NO: 23466 - DNA, 4099 bp, Cannabis sativa
gtcggtttgtgggttcgggtcccggtttgggtacaagtttaggtcttggtttaggtccaaagtcacaggtctcggtctgggtccaagtcccggtatgggttatggtttgagtttgggtttaggtttgtgtccaggtatgagtctgggtaaagatctgggtccgcgtcctggattcaaacactgactacaggttaggtcgaagccttaggtccagattcggatctcagtcttggatctcggtcttattctagtttgggtcctgggtcttgggccgcgtcctaagttttggtttgtgtctcggtttagggttgtgtctcggaagtcaggtcctgggttttgggtccagggtcgggtcccgtgtctcgagtttggggtcgagttttgagttcggtcccggatctggggctcaattttgtgtccaagtcccgcatctgggtaaggatccttggtccaggtataggtccaagtttaggtttagggcctaggtcccccatctatgtccagatcctaggtcatagtctaggtccaagttcaatttcgggttgggatcctgagtttaggtctgagtctaggtcccagtacggttttaggtttgagtcagggtttgggtcccggtctgagtccaggtccctatttgggtccggggcgggacccaatctgggtccgagacaacgtctaggtcccggacaaggttttggtctgggtttgggtgcgggttcagttaagtttgggtctaggttcgcatctagatccgggtctgggtcttggtcttgggttccgatctcagtattggtatgggcctgggcccgtgtccaggttaaggtttacggtttacagtattgggtaatatgtttagggatttagggttcatggtttagggcttagggtttaggggtaagtgtacagagtttagcatttagagtttaaggtttagggtttagggtttagggtttaaggttccgcttccagtttcggttccaattttgagtcacagggtacgatttaaggtttgagtgtggctctttgtctaagtcctggtttgggtctaggtccgtgtttgggttcacgttcgagtcttggtccaaaatccaaacatcaataacatgtcgagtctagttcgagttcaggcacaggttcgggttcttgtccaagtctgggtccaggtataggtttaattccttgatttagacactgactataattcgggtctaaccctcgggtcttgggtcctgcgtcctgggtccaaattcagatcgtgttcatgttctagctcttacattgggtcctgttttgggtctcaggtctaggttttggtcttgggtcctgagtcatgggtctggatccccaattcaggttagggtcctaggtcccagtctaggttagggtcccagtctgagtgcaggtcctagtccgtcttcagtactggtccttgtctcgggtcttggccttgtctaggtctagtcacaattcgattctcaggtcccaggtccaagtatctggtcctaggtcccgatctcggtcttgggtcccgatccttgtctagcttctagtccaagtccaggtttaggtctcggtcctagtccaggtttgggtcccaatcctgatctcggtccgggtccaagtcacgagttcaagtccgagttatggtacgagtcttgttctggttatgggtttgggtctgggattcagttcgtgtttgggtccgggtctttttctaggtctgagtctgggttctagcacaggtctaggttctggtccagttcccggatcatgggtcttgggctccgagttctaggtcgcaagtcctgtcgcaagtttgggtcgaggttcgggtctgggactgggtattgatcccagtctgtgtccgggtccgtgttcggttccgcgtctagatctggttatgggtctaggtccaatttttgtttccaaggtcttgattccggttcttgttccaatttcatgtctcaagtccgagttcgggtttggatcttggcttggaaattgttccaagttcgagtgttggtatgattccaagatctagatgccgactacgggttgggtccaagccccaagtcgagggtcaatattcggatcctaatcttgggtcccactctcgttccaattcggatcttgggtcctggtccctgtctgggtctgggtgtgggaccgagactagggtcgtgtcatgggtcccagttccattcttaggtcccgattctagttctaattttgagtttgagtccccaatttaggtctggctcctgcgtctaggtctgagtctctaatcccgatctgggggtttgggtccgagtctaggtctaagtccgtgtttgggctcgggtttgtgtctcgagtcccgatccgagttttgatttggctccgcatctcggtctgggtctgggtctaggtcttagtcagatttaagttcccaaactcaaacccaaactcggactcaaacccaggtttggggtacgggtctgggtttaggtcagcgtctatgtctaagtctgagtttgggttccagtccatgttcggttccacgtctagatccggttttgagtcctggttctaaattcgggtctcgggttcgagtctgggtttttgcgtggtctggaaatggttctaggtgtgggtcttggtacgattccaagatctagacaccaattatgggttgggtccaagccttggatcgtgggtcatgatccaaatcccaatctttggtcttggtcttgttttgattcggatcttgggtcttagttcgtgtctgtgtccgggtctaggacctagatcggggacgggtattgggtccttatccaagtcctaggtcccgattctggttctaattttgtgtttgggtccctaatctaggtttgggtcttaggtcaaggtctgagtctccaatctcggtccaggtcctgggtccgggcttgggtccaagtccgtgtctgggttcgagttcgtgtccctagtctcgatccaagtttttattcaggtctgtgtctaggtctgggtcctagtcagattctagttcccgtactctaacccaggtctcgagtacgggtctgggtctgagtgttggtctcgatttgagtctaggtatgggtcccaggtcgaaacactgactacggatcaggtctaagccgcgggtccagatctggatcacggtctcgggtcccagtctagttccacttcgggttccaggtctcagtccgtgtcctaggtcagggttcgagtctggggtaaggtcttgggtctcggtgccaattctgatgccagtgttccaggtctaggttccctttcaggtctgagtcctaggtcccggtctgagtcttggaccgggtcgaggttcaagtcctggtccaagtctaggttcgagttttgatctcggtctgggtctagatctaggttcgagtctaggtcctggttcaggttcgagtcccaagttttgatctgggtctaggtttctaggcctaggtctaggtctgggcttgggtcctagtcccagttcgaattttgatttagtgtttgggttccggtatgggtttgggtctgggtcaaggtgtgagtccaggtccgagtttgggtctggggtcagggtcatggtctggatcgcagtctgggtctaggtttgggtccaggtctgtgtacaggtctcgggtgcgagtccaggtctgggtcttggtcagtgtctcgtctagatctaggtcccgagtttttatcctagtttgggtctaggtctgggttcgagtctaggttcgtatctggatccctatctctgagtctatgtctgtgatcaagtcccaggtctaggcccggtctgggttcgggttcgggtctagatcccagtttgggtacacgaccatgtttgggcccgagtttcggtcttgatttgggtctggatctaggtctgagtttggttctaggtctgcgtctgggtactggtcacaatcgtactcttgtttaagggtcctattctcgtggtcctattcgggtcctggtttaagtcccagatctggatccctgtcacgtgtcccggtctggttcttgttcaggtcttgggtccaaggtccgagtttgggtttgggatcgagactagggt

SEQ ID NO: 23467 - DNA, 5235 bp, Cannabis sativa
actagtgttggtagggtttgaaccttatcccgagtaccactaagtgttgtaccacatgcactacataccaaactctactagttttcgtaacactgggggttgtactcttaaatatcatagaggctgtaccacatgcactcagtaccgttaatgtactagtgttggtagcatatgaatcatataataccatgtatacaaaatacatacacacatacgtatataatgctagtcttacctcatttttgaatttaagcgtgtcggtcgatctgaatggaaaatcacacgctaaacggaggccctatgtcacaatcacataaaatgataaacaaccttttaaaacctttttagggatctaaactcaaaattataggtttttctatcattaaatagcatggcttagccttatgtatcgaggaaacatgagaaaaaaaaataatgaaatagggaaactacctaaaaaatagcaggtcgtttcaataaaaatggcaggccctttctgggtgtgcaccagtaaaaatggtaggaagtttttgcgaaaacggactgctgtttttcactgcagaaaaacaacaactcaaaaaaccaccccaattcaagctcaaaccttaccacaagctctagaatacatattcacatcataataaactatttccaagtgacaaaactagaaatatctcaatgttacacaatttaccattattgaaccaagtttgagttgttgaactcaaattgctcaactcaagaatcaaccatcaaaataacctcaaacaagcctaaacaacctcaaatataactcagaaaataactcaagaccagctagggttcagacaaaacctatctctaaatcttgcatgttcaaactaaaaagaagtcttcaaaattaaaggaaccaagttctaggactttaccttggctcttggctaactaatctccttcaattctttgctatattttgctaggattatatgaattaaggtttggctcctttaggtttggggtgagaccgagaaagagagagatgaggtgagagagaggttgataactttgatttttcttttaatgcttatccttaacataatattattttattctaatataattatcaacctaaaacaataagattagtttaggaagtctacttaaaaaagactaaatcttaccaattggagaaattccaattttacacctttgcttcacaaataagcaaattctaggtctacgggtaaaatggtataaaaccataaccccgcctaacttcaatattccaattatcaacatatggatgccctactaactaaaaagattctaaactaacccttgtgattaatcggtcatctgtcgcattttgcatcgtcaccgagcgaaaattataaaaatagtaaattttgcatatagcataaataatacaatcaaagtttaataaaatcttcaaaatttaaaaattataactgtaatgcccattttttaaaatgggagccacaataaatacaaaatgatgtataatcatataatgttaataattaatgctaattgtcttttctaatccataatctaatcatgtagtcattacaattatcccccgtataaaaggattttgtcctcgaaatctaactgggaattttttggattttgagtcctcatgatggactctatctcctagatggcttcctccagctttctattcctctagagtagtttgaccaaagctatggtcttgttgtgtagaacattttccttcctatcaaggatttgaattggatgttcctcataggaaaaatctgattgtagttctagggtttcgtagctcaagatatgagtcgggtgtaacacatatttcctaaatattgaaatatgaaatacattttgtacaaccaataatgcttgtggtaaggctagccaataagctgcctgcctgactttctcgagtatctcgaatggccctatgaacctagggcttaacttgcccttcttcccaaagcgccttttattggtgaatcctgcaggaacatggtctcctacatgaaattcaatatctttgcatttaggatttgagtaacttttctttctgctttacaaagcaagcatctgagccttgatcttgcttattgcttcatttgtctgcctgaactaactcaggacccaaatactttctttccccaatcgcatcccagtgaaccagggaacgacatttcttaccgtacaacatttcatacggcgccatccctattgtactttgataactattattgtaggaaaattctatcaaaggcaagtatttgctccatgaaccctcaaagtccataacacaagctcgtaataaatcttccactatctgtattgtcctctcggactgtccatcggtctgagggggaaaaagttacgctaaactttagctttgtacccatagctttctaaagactcaccaaaaattttgatgtaaatttcggatctctctctaaaacgatagattttagagccccatgaagatgtactattgcttttacatatagctccgcatactaatcaacggtaaaagtttttttcattggcaaaaagtgtgttgactttatgaaacggtccactataacccatactaaatcatacattcccatggttctaggtaaaccaaccacaaagtacatagtaacatcttccaacttccacttaggaagtgttaatggttgtaatgaccctagcaatttctgatgttctactttgatatattgacaagttaagcaccttgacacgttttcaaccgtgtctttcttcattttgcaccaccaataataaggcttcaagtcttggtacattttggtgattcctagatgcaatgaataaggtgtagtatgagcctcctcaaatatctcctttctgagctcatcactgctcggaacacaaacttgagccttaaaaagtaatattccattattcaagattgagaagtccttaggccgaccctccaatacctcctctcgaatcttaactagcttagaatcttccaactacacctttttgatcctttcgaacaagtctgattgaagtgtcaagttatgaaatttcccaaccaccaactcaattccaactttaatcatatctgaagccaattgaggtactatcattattgtactaaaaacctaccagggaccttttatgctcaaagcgtctgccactatattagctttctcgagattatataaaatctcacagtcataatccttgactagttctaaccactgcctttgtcttatatttaggtctttttgagtgaagaaatacttgagactcttgtggtctgtacaaatctcagacttctccccatacaaataatgttctcatatcttcagggcaaacaaaactgtagctgattccaaatcatgtgtcggacaatgttgcttgtaatcctttaactgctagaaagcataagcaatgactttgtcagcttgaatcaaaacaaatcccagaccctgtcttgatgcatcacaataaacaacaaacctttcttggtttgatggtaaagctaacactggtgctatgattgatcattgcttcagctcttgaaagctcgtttcacacttgtcagaccatgtaaactgttatttctttttactcaattccgtcaatggaattgaaatcttagagaaaccttctacgaaatgtcgataataccctacaatcccgagaaaacttcaaacctaagtaactattctttgccttagccaattcttagctgactcaatgtttcccagatcaaccataattccatcctttctgacaatacgccctaggaaggatacttctaataaatagaattcacactttttaaactttgcatacaacttatgttctctaagtcgttgtaaaacaatccagagatgtttctcatgctccacttccgtctgagagtatacaaggatgccatcgataaatactataacaaaattattgatgaaatccttaaacactctattcatgacatccataaaggctgtcaaagcatttgtcaatccaaattacatcaccaaaaattcatagttaccatacctggtccgaaatgcagtcttctagatgtcttcctcctgatttctcagttgatgataaccctaacgtaggtcaatcgtagagaacactgccttaccccgaagctgatcaaacatgtcatcaattctaggcaatggatacttgtttttgattgtcagcttatttaactcatgataatatatacacatccgaagagatccatctttcttctttacgaacaacaccagacctccctaacgcatcagactcaacaaccaccgcatcccaacctttacgctttatccaactaagcgcctccttaatgccaataacctcagctatttctgcagacacacagccccatctactttcagaaatagcttcaagtagcttgccatgattattacgtgcaacacaaccaaaactaaatttttggtgagccttaaaagtcgcaccatcgacattcgccttgaccgtaaaaacatcaggtttacgccaacaattactatgtgaagtgtctcctatagaaaataacgcattaggggactcaaactttgtaattttccattggccaaggacatgttttgccgactttaccacctccaaagcagtctgagatttgttctgccattgcacttcattgcgagtattccaaatactccaacataacatagcagcttcaccaccacaacctcactgcagtcagcaagaaggtcaaaaaaccagctgctcaactcggcatttgcaccagcagtcgactggtttacagcagaaagtgcccagcaagatcgtgaaaaagaacagtccaacaacacatgaaatattgtctccacatgcatattacacaaaggacacaagagatcaacattaacatgtttagattgaagttgtaccttagttgggaggcaaccagaacaagctttccaaagaaaatgatgaactttagaaggaatgggcagctgccataaattcttccaacaattctcatcttgcataaacaaccaattccctctagatgattgaaggaacttgtaggcacttttaaccgagtaaaatcccaaagactccatattccaataccaaccatccatagcccgagaatgactaagttgtatgcttctaatcaaatttatatctctctcttcaaacatatcattgagaatgaaaaactgtgtttttgcaaatgtcagttatatataagaaaatataaaaactgta

SEQ ID NO: 23468 - DNA, 4406 bp, Cannabis sativa
  modified_base (2412)..(2437): a, c, t, g, unknown or other
tactacaaaatgccctttccatgttcctttttcatgtccaacaaaaattgtgttggacttcaaaaatatttggggagttttacagtccaatattattagacttgaaaaagttattgttctagtccaataatgttagactataaaaatgatagtggacgttatataagttgaaagcttataattatcatatttttattttctcttcatttttttcgtagagcacagaccacgtccaccactgctggacgtcaggcctaattaaaacaccctagccccaccaaatcaacagcagcccattttaattctctccttctcacttcaacttcgaatgagcagcaaacccagcgcaaaaatggagaaaaaattcgcaaccatgcgagagagataaaatggagcttcattctaattattttgaggttgcttgttctacttccacttctcttctcctcttcatttccaaccagcatcccttcatgtgtaatttcagccattggagttagttttctcattttttagggttttatttagatttctaatcacaatctattcttgaattcttatagatagttcttcaatcttttataaatttctatcctaactcgattaagaaaaagtaaaagaaaaaggttttcacttttcgttgatttcttgtaaaaatcaaggcaagtaaattgattaatgcctatttctctactgctctctccatttctctttcgattaatcactgctattctctctactattattttttcttgaaattgttcatattcacccattcaagggtttctaagaatttctagataatcttcgtgattttaaacttcttagtttgggaattccgttttggaatgaaattctttctttttatcttgaatcagtctcgccggcatattaaatatgtttttctccttgcccccgtccaactctcaccctctgtctcccatcttttgtatataaaccctggtgagtattggggagctaatcttcatattgactaagatcttcttcaactcctttataaaaatcatcctcaatttggtgtgaactgaacttgtcttcgtctagtgacaacctttcaaattccaattttgaggattgggaagtcaacatcaatcatacagaatccctagagcctgtggtgcagcaccatcgataccccaaccaaatacatggagaagggtacaatcgttttatctgggaaccaaagaaaggttagaggcgttatcttccttcttcttggacgtatagggtccatctgggtgttgttgatacacttctaaagggtcgggcaaccccatctactaggagtactattgtagctgatatcactgtgactgttgcgagacatacatctaaaacaaaatgactgtctaaacatagaatgattgcacaaaccaagcaaactatgaggaaggccttggtatctgatcctcaccttgcctggctatttgctacagttggggtggagcaagccaggcctctgagcgaggatgaagtagttgttggaggggacattaaagtctaagagattgaggaccagggtgatgtttgccatgttagtccctccaaggtcgagggagaggaagaagaagaagaggaggaagtttgggcgcttacttttggtggctacaatgaggctggagagtctatctttgaggagggagatgtcttagtggcagcttgagagtacgtttaggagaaatacacagaggctcgacctttaaacaatcgaagtctgaagggtgcttgatgggtctcaccaccattcgtgctaacttataagagattgactaatcttgatgaagaaggtctccttgggaaggtggaggcatttcttcctagtctcgaacagctcgcaacaaattctaaattttctctttcacattattctttttcttaatatgaataattattataattatattttttcacaatttttttaaatcatatatacatttttaaaatttttgtctaataaaattttatataattctttattttattttttttcttagtatttaaatatatattttatttttattttataggtatattttttaaaaatatgagaagaaagaaaaaagattgaaaaaattaatataaattaaaagtaaatattaaagtgattataaaatgtgctgttttttgagttaagattataaaatgttgttctaaaacaaaaaaataaaataaaaatgattagagacttcataatatgaaagatgtttgtacaagttataattatgccaagagcacttgtgtgtctaacacgcttttaagatataatatattactattagtacaactcaatatgtctcacttgttttactttaataaatattatagacatcgctaatcaattatagaatagctttatgagtgcatatcatctcttattattattattattannnnnnnnnnnnnnnnnnnnnnnnnnattattattattattattaccctatggctgctcacttagatattttgaaactataaatttgaatgttttcaacatcaagttttctaaaattactgccttttcttgtgatgaagaactttccccagttatatggtttatattttggaggattcttgtggtcagtcatctcctcaaaaggcttgaccattgtgtagtgtgctggatcgaggaagaagggtatggaaaacctatccctttcagaattcactatcgctctgtgctctggactctcatatctttcattgctccaaacctttgagaaaacatatataacaattaagcatacacttacatatcttattaccaagaaatatattttaattaggggattatataatatactccattaatgtgatacatgcttttccttttcattattgatataaatttgagtcaaccatatatatgttgcacaatcaaaaaatcaacaatcaattcttatcatatataaattacaccattataattataaactagttggtttatttacttacaagttgggtttaatgaaaataaaagaataggaatgaaaaaaagaatgaaaaaaggataaactttactgtgcatatatacaataataaaataattatttattgattaaaaaattattattattttttgtcatccattctaatagtttttctgtttattttaaattttaatagtcattttactaaatttattttattgtaataaaataaataaatgaaagaaaaatttattatttttaattatttcattcaaatatttcttttaaattttcataaagaaaccatatagttttactcaaagaaaaaaaaaatgaagaagaaaaaccatacctgaataatgtcaccaatgttgatgataaatgaatcgggtgttggtttgacacgaacccactctccattactctttttcttaacttcgagtcctccaacatcatcttcagccagaattgtcagtgcaccgccatccttgtggcgcccaactccgagagcaaggtctggattagggcatggtggatagtgattaagtcgcatgaagctagtttggtccttgaagaagtcattgaacctgttttcttgtaatcctaagcttatggcaattagttgcaccaacctcatagccagcttttcaacctctctagcatattcttcacatgcttccctgaggttttttttttgaaaataattcgaggatatataaataaaaacgagttagaccttctagtcgttatacacaaaattcactctaatggaagaagaaataaccattccaataatattagtagcaaattaaaaactcacttagtaattgcaattttaattctgtttattcataaaaagaaatgaaagggaaaaaaataagagcgtgcttggccacttgtttaaattaactaaaaatagtttgcagatgtgtcacgtctttgtttactattaaaacaaaaaagtattgttgttagtaaagacatgagtagtcagtagctttttataaaatttatcaaatcaaaaagtgtaataacttatattaaattgcaatgataataatatatcatattttattatgcttaacactttaaaatatattttattatattaatatatatttttttatattgcaccaataataatatcacacttaatataaaaatacattttaacatttaccataacaaaaagcagatatatagccagatttgtatctttaacatattatggtcaataaaaacaaaataaaacaaaaacaaaaaaattataatcaatcacctgattgccatcataattaatatgatcatcatcaacctctctatatatatagttggttggatcttaacctattctttaaataaacaactcgcacacacttcctttccaaaaaaaatcaatacgccaaatactatacttagatttattggatttgttgttaaaatatcggtattaaacccgaa

SEQ ID NO: 23469 - DNA, 1985 bp, Cannabis sativa
gtagaaaaatgggggaagaaattctgaacttttggagaaataggtccatttttgtaatttcaattttttttggctctttatgtaaatttgagtttatgtatttttcaaatgttattgcaattttgcccctgaattatttgtaaattataaaagtagtatgtttttttttttttttaaaaaaaagtagtagttatttaaaatttcatgaagacataagttgtagttatttaaaaatttcaagtaatttataatgttgaaaataaaatttatatattttattacatgtacgattatttttcttatatgcgtattaagtaattttttataaattatttataaatttttaacaatttataagcgatcttaaatagttacaacacgatcatgaaaaaattaaattaaaaaattcttttgaataccaaaaaatctactggaatgatcctttaggagaatcaactaaagaaatattcaaaatttaataggaaaaaaatagttcaagtacacaatttaacatgataattgaaatcaaattgatactatataatttttattaataattttaaataaattgatagtttgaattttttttaatctatatcgaaagataatcttgtattaaaaaaattatttgactaaaatagaattcaaatttttatattttacaaaatacaagaatttaaattatcatttaacaaaatataatgcttgcatatttacttaaacacgtgaccaaattactattttcttaatacaaaaattatattgctacaaaataagcatattcatgaatttaattttaattgtttagaaataatttaaagacccattaaaaaaacaattgaagaactattttgctaatgaataataatactaatatttttttttataaataataaaaataagttgttcacaacaaagggagaaacttaaattttttattttttattttttgatcttgcaaaaggagacaatttgtttttttacaatatttatatatttaatatttattaatttaaaggggtgtattaaaagcttaataactaatctaaactctgttgaagattctaaaaagcttgacaaaaataatattattaaactaaaaaaatgatcaaaattaaagtaatcttcacttttttatttccttttcttcttcttttgagtacaaattaattaatattcacttcgatctttctccttttctactttctacgttaaaattttgttatttaattaaaaataaaaataatgaaaataaacttattatttacgttaataaataactagtgaactaattattaatgattagttcctcacttcatctgattagccatttgatcatatggaaatgtaaatctaacgacagactaattatttaattaattatatgagtaatgaacatgattaaatataattaattaattattacattttttttttaaaaaaaaaaaattatgataattagctaagagagagtaacgggtgtcatgtccaatggacctaagctaattgagggtcttggccaaaaaatttatattatttttttttttaatttacttgtttggatagtttttctgttggtttctatgtgggttattatgtaaatttttgttgtgatttagattgttccgttagttgctccgttagtttaattgaaccttttttcatattgaaaaatcatttatttttttaatagtgtataaaggtaaaaatctaaaatatgataatagttgggtctttcatattaacaaaaatttaaaatatagcatttctaacaaataaaaaggtaaaaatctaaaatatgataatagttgggtctttcatacgaacaaaaatttaaaatatagcatttctaacaaataaattaagtcttttttttaggaataattacatataacacaattttttttgtaaaatttttacatttttctaatgttctataaaaacaacacgaaaacaataaaaaaaaaaaagctacataaaagtaa

SEQ ID NO: 23470 - DNA, 2029 bp, Cannabis sativa
gaatgctcggtcactcccaagcccccgggcattccaactgatgagactcattcctcctggcaggcctgtgagttcacagggcctgcctcatcacttgaaacaacctccacaacatcctgtcctgattgaggtctgtgtcttttcagcatttccctctgctcattccccaccgtagccagctgccttttgaaaccgctcgagggggtggattgattcttcttctggggtggccgacggggtggcacatcattgctgccaatagcaaacgccagagttgagggaatgtcagccatgtggcccacaggagtcgggtccagttgggcagtggaagttgatatcattaatggggcttgaagctggctagaggatggggaagatgaaccccgggaccctggattggatgactgctggggggagacagagcatgataaattaccaccagtagccactgataacaaggcagcaaagtttggccctgggggtgcaatggagtggagttgtccagggggagcaaaagaatggttggatcctaagttggaaggcccagctccttgatccccaagtgggggaattcccaggttttggctagagctcagaaacagtcctgcggcatcagcataattagtttggttgttgtggaaagagaagtcctggttcaggacttgtccccgtgggtgattgattggtatgagattggtagtttgataggttgttggggcatttgggagggatactatggttggtgagttgatgataagaggattggggagtattccgaaggggccatggtttgggcgagatgtgcctctcaagacattttcatagggaaggggtggtggttgggtagactcatccgaggctcgcatatattcagtgcaggacggataagagtgtcctagacggccacaatagtagcaatgatcagggatgtcctcgtatttcaactcgagccaggttggggaggctaaacccgggaaaactattgggataccccgaggtaaaggcttagtcacatcgaacatgatacgaacccgcatataagagccccaagtttcaagtaaggagggctgatggatttcaaggagggtgccagtgatttggcccagcaatttggcaagggagatggacctccgtgaaaaaggaatgttgtgaatttgtacccaaaagggtattttcctcatagtttctggggataaggtggagtctgtgtctcgaatctccagcaggatagggcatttatcaaaagtccaaggttgattgagaatggttctgcgtctgtcaccctcgcagtgaaacgctgcaaggtacaagtttgagttgggtgacctttctttgacactcactgggaagcgacctttccagtgtttttccaggtagtttttgagggcattgtggttaaaattctttgtggtgaagagggtggccatgagatgaaactggggtggggctggtggaagtccctcatttgggtcgacatgctcggcgagagagtggattgtattttcagtatcagtgagatgaagggctgcagagaaagatttagctaagtcttccatttttagtaataaagggacaaacgagtacagcagggaaggataatgcacgaaaagggttagcttccttaaacctagaactgatcttaaataggaaacaaaacatagagcaattaagaatctaccagatagatcccctaaatctagagatgtactcgagtgatacagggagaataagagacaggtattaaataccagatcaggcgggggattatccaaatccatccactgaccaggttggtagaaagagcaattaagactataacccctaagagaactggaataggcagttataattaagagaaaatagggatcataatgagatttgttcagagaggggatcaaacctgtaagggagacattaatggctgggcacgctttctcccaaatcgtcagcaaggttgacgattccgatcccagctgagagaaggctgatggatggctgtcaatcgccattaatgttgaaccaccacgac

SEQ ID NO: 23471 - DNA, 3974 bp, Cannabis sativa
ttgccaagaaggcagctgtctggttagtgttattagtacaagcacccgcaaaataaaaattagagatttattgtgaactcgtagctttaaggtgtcaagaagtttgaaaatgtaaaaatgataagaccacatatattcttagtaaacatatttttgtggatattcctttttctattttattttcaatgtgctttttattgtcttgtagaagatcaattgatgcagattagtggttctgcttttaaatgtgatttccagagttggtagaaagttcagagaatattttgctgtagagttaatgacaaggatgcattctattaccgttcaccattgcttaagggaaatgctgtcttttataaaatattctgttggtgctgaaagattatgtgactgcattgtttgtaaatactggtttgaatattctagtaaatagtggcagtacatcattaattttttttattgtgatttatgtttgatggatggcctggttgtgaacagacagatgcaatgtacacgcacaacattgaggggtttgtacagaaagtatgtgtgctggctcgtgtaaaaggggaagatcaccaaaagcgctgcttgagggcatcaagcttgcagtgcctctctgccatggtagctttgcaatttgattagtgtttctcatttcactgctcatgttatggtggtagttggggaatagagttcattttgtcggctatttaacatgtttatcctgttggcaggtctggttcatggcggaattttctcatatttttgctgattttgatgaggtcagatattttatgttatctataataaagcttttacgtatcacttctctgtattttctggtagcttgcatgaaatgttgtgctacatctgaattctaagttatgcaatttgttcaaaactgattgtctgattgatcaatgtttgcaatgtagcattgaattaggggtgtactcaatttgtaagaaaaattatttgaacaaaaaattaatgatgtacatatacatgtgtgtcaatctctttccatggaaaagttttgcatctttttatagaactccaccttatatcattcttttgcaattatgtttttaaaattaattttacctgatatttcttgtatttgcagattgtacatgtgactttggataactatgagctagatatacttgatgaagaagacaatgagaggttggaatcacaacataattgggtggacgaagtagttcgaagtgaaggcagaattggtgcgatccttggtagtgatgctagtccttgctccatgattagaccacggccagagaagaaggatccttctcttttgtcaaggtaatcagctttttctctgcagattttcctaaaagttgttcatatagtgatattataattttctctgcagattttcctaaaagttgttcatatagtgatattataattttcttttactgaaaatttcgttctttgaaataacttgagaaatgctctttttttttcagggaagaatcagagacaccaaaagtatgggctcaaatttgtattcagagaatggcagaattatcgaaggaaagcacaaccatgcgtcgaatattggacccaatgtttgtctactttgactccggacggcactgggtttctcaagggctggctttgttggttttgtcagatatgtcctactttatggaggcctctggtattttcttttccttttcatctgattagcctaaatatgcatgaactaatgacctaaacttcaatcagcttctaattgcaacttctgttccagggaatcagcagttgactttaacttatgtcatccgccatctcgaccacaaaaatgtctcacatgatcctgaactcaaatcttatataatccaagttgctactggtttagctaggcaaatcagatctggaacaatgctggcagaaattgggtttgtctctgatctgtgctggcatctaagaaagagtcttcaagccactattcagcttgcgggagagcaagagtccaactccaacgtcaatattatgctccagaattccatagaggattgcttacttgaaattgctaaaagggtaattttagtggttttattgattttattagatatatatgcatatagctacatgtttaatgtgtttcgtttttactagattggcaatgctcaaccactatttgacctcatggcaataactttggagaagctaccatcgggaacagttgctagggcgactattggatcattaattattcttgctcatacaatatcattggcactggtctcatcacgctcaaagcaggtaatatgcggggtcattagttactaagtgtgcattatagattgcatcaaattctatcaatctcctactcaatattattgagtgcatcatgttaaatattcagaattttttcctgtaggtgtttccagaatctcttcttgtccaacttttaaaggtcatgttacatccagatcttgaggtgcgtgttggagcacatcaaatattttctattcttcttgttccaagttctaatcgcccgcgacatgaagttgcatctctacgatctggttttctttaccaatcaagaagatggcactcgaatactgcatctgcctttgcatcaattactgccagacttgagaagctccggagggaaaaggatggttctaaaaccgaaaagaacgggaacacttttcatgatgataataaagaaaaagacattgtggaggaagacttcaagcaggggcgaggccgcaagaattcccctagtttttacaagattagctctatcatcgataggaaacccggttcaattgacttaaatgaggcagtaagtaattccctcattttcataagaattatatctggatgtatttgatattgtgtagttttgcttacttttctatcttatggtttgtcgattgcctcaggaaccatttgtcatgaggcttagtgaggatcaaattgtacatttgctctctgctttttggatacaagcttatctatcagacaatcttccctcgaatattgaatccattgctcattctttcattttaacacttatttcctcacgcttgaaggtgatatgttagatgcatgttatgtgctttcttattttcgtttccttgtgctatgttaatgagagatcatgctctcacttcatataatttttgacagcgaatgtattaattatcactaaagttgacattctgtcttacactttattgtttttagtggaaatttaaacgaagctttcatctcttacaaagttttagaaattgtaatattgcagaatccaacagacaaccttgtggtcaacttcttccagcttcttttgtctcttaggaaaatgtctcttgatcctaacaacggtgcggctggtttaaatcctttctctttcagttgtgaggaaattagaatttctaatgatattgttctctttctcatttgttcgtggggtgaaccagggatgttgacaccagcgggccagagatctgttttggtactatcaatgagcatgttgatgtttgcagctaagatatatcacattcctgaactgaatgattttctcaagtcattgattccatacgatgtaagtgacatcataattttgtagtctgccaatagtgtgattacgtttcttgattttgatggtaaaaggcttttttaccctaaagtactctgactcatgctcttctagtgtcgacgagtataaatttcttctaattttctgtatttattatgtttgcatattcagattgacccctatcttggtattagcgatgatcttcaagtatatgtaaagcctgatgctgatgtaagagaattcggatctgcttctgataatcagctggctacatcaattctttccgaattgcgaaataaaatatatgacactgagaatatcgtaatcgacatcttagttcaaaatctgacaaacattaccaaggtatggcattgtactaacactagcaatc

SEQ ID NO: 23472 - DNA, 4207 bp, Cannabis sativa
  modified_base (1354)..(1372): a, c, t, g, unknown or other
tattaatgaactaattaaattaacatacgccattatagtacataatggggggaaatggatcattaaccatgtacttatataaaactattattggcatgatggaagtccataatccaaatgttggaagaactcggaaaatgacaaagctaaactagtttttttaaaaatgagaaaaatctaatcttgggtaactaactcttatttatagtagagtagttttatatatacatatagttatatctatagagagagagagtttgggaggtagcaataagcgtgggagtgagagctaaaaacgacgcgtgggtggcgctgacagacgcacaaagcgctactactagtaatgctgcatcatctgcaccagcaccggagacatatatatatatatatatatatatattatattatgagaaatgttaaaagacacgtgccaaacactcttttacgtgttatattactattggtctaattaattatggggtctcatataatttaatataatagtttttaaagagtatcgttagccaatcgcaagacgacacatcttaagggtttaagggtgctaggcaccactagtgtcaccagcaatcctcttatattatatatatatctcccctcactctttatgctatcttttctaattaattaataatgttattatgattaatgtcaaaatatatatttatatatataaacgtatggtaattgtaatagtaaatagtacttaaattaatttgttaaaaaaaaaaaaaaaacaaaagatagaaaggaaaaccagagagagatgtattgaattgaatcatgcatcggcctcaaagttgtaaaccccatatgtttgtatctcattattaattaataataataataaaaaaagaaaacaaaagatgctctttgtcggtctctctctatgtggggcccaccctaactcttcattcttatcctctatccccacccccacaattcagtaagtactcccctatattatcaacctgtttgttatggggaaaatcaaaacttgcaacacaaaagactataacaacgccaacaaaagatagcataagattcaacctaaatttttctaatttgttaattcacattaatgtagttaaatttgcaaagtatatattaattttctttcgggcaaaacaaatgtgacatgttaatattgatgacacaccttattgtaaatgtgactactcattctttttcttttggctgaataataactacttctcatttagatgaccacctatatgcctaaactgacattatattaatattcatcattaactacagccaatccacccaattaaacgacaaaagatagcctcattaattctctctctctctctcnnnnnnnnnnnnnnnnnnnctctctatatatatatataatatacataaatatatatttttgacttcattaattgtttaatggggtaacatattattacacattataataactacaaattaagggtcctaaacgttgagtttgccattatttaacgaggatgtcatgtggggcatacatgtgattagaatatgtaacattttttttttcgagagggatgacctaaagaaaattacaaagatatagggtacggattctgactattccaacaccatgtgttatctaatcctaatgccatttgggctaaattgtgagcacctgtattcccttgtctgcgaacatgaagcagggaaacagtaggaaacgaagataacacctgtcgaatagaatcaataagagctccatagcttgagagtatgtgttcgtgtgatagtaagtccgtgactaaatttttacaatcaacctcaacctggtgaatgttaacttggttgtttaaacaccatcggaggccttctaataacgcccaacgttcagttactttcggtagcatctgccctcacggctagaagctcttgctgctaccacttgtcctatggaatcacgcacaatagcacctattcctgatttacctctgtgactagaaatagcaccatcaacattaagcttgagggagccaatcggcaggggtgaccatgtctccacatgacactcagtagctggctgtgattggttctgatgctgctgttgtgattcctgatgaagtccaaatattctcgggcttcttgttgaattcggctagagtttacatctttattcctgaaaacacagtcattcctgctattccaacacttccataacatgcaaacaaataaattaaaggagtcaagtggggaattttgctgaatgtataaaatgatatctagtatatgtaagttccttaatttcttcagcataggcataaaacacgtacctgaccaaacctttttcatatccttacactcaaaaaaagcatgttgcacagactcataatgaaggtgacaacgaggacaaatgggggaactaagacatttcctagtgtaaagattttcagcagtgggaattgaattatgagataaacgataaatgaagtgtcaaattttgggaggaatttgaagactccagagggagttccaccagcccttcaggatagttgtatttgaaggggatggttgtgttaaatttgtggaagtttttgccacatggtaccctgtcttaacagaataatgacctgaagaagtgtgctgccagaaataagagtctgtttgggtagtgtcaggtggggggagggatagaatatcattgatagtgtcctggggaaagtggctgcgcattagagggatgttccagtctcctgttggaaggagaaaatccgagacatggacaaggtggcttggaagggaagtggggatgaagcagtggtttgggatccaattatcatgtaaaattctagtggtggacccattttcaatcctcttacaaagaccctctttcaggagagatttaccccaatgaagactctgccaaacgtacgatggggaatgacctaaggaggagtttaaaaaggttgtgcgggagaaatattttgccttaaaaaggttggtaagcagaggtgactgattggtttggattcgccaagcttgttttgcaagcatggcttgattgaaaggcttcagagatctaaacccaagaccccctatactcttagcattgcacaaagctttccaacttttccaatgaagtttacgctcaccatctttagcaccccaccaaaaattggccatttccttcttaacaaaactacagaaagagtcaggaagtttgaaaaccgacatgacataagtagggatggcctgaatcgcagccttaagaagaacctccttacctccttttgacaggaatttaccttgccacttagacatgtaacatgatagataattttaccatgcattttttttttttaaaaaaaaaaaaaaacaatgcacactccctttaattttaggcaattaatttttttaattttttttaagaaaaacaaaaactatatgaaagtatacacattataattgttaagtatatcttctaaatttttcaaaaataataattagagtgcattttgcaccactatttaaatagtttttccatttaaaatgattttttttttttaattttgtaaaattatttttgttttttattttttaaaaatcaaaaatttgaaaacgagagaaatcgctttcaaaaactattttaacactttgaaaaaaagtattctaaaaatattttttttgaaatatcgtttattcgttttgtctttcttaccctaatctcgaagttggacatcagacattggatctcggttcctagtccatacctcagacttctatccccagtctcaacctgggcacggactctatcgaagccaaacatggtccccgactcggagcttggagcctaacctcgaccctggattgcactcgaaacctaatagctttcgcacccaacccctggaattctctttgaagctttgaagttggttgttcaagcttgtgaattttgggtgattatggtatttgtgttataggcttggattttttgatgttagacttgatgtggagctttgttttaatctttaaaatctctattgtgttggatataaatggtgtgtgatggaatttgtggttatgcatgttttggaacaagttttgtatgagatttaggtaaaattcgagcatgttgagaattggcattttttttggggattccaggacccctagtcgtggccacgactgggctcgccacgatgcgggaacctgattgttg

SEQ ID NO: 23473 - DNA, 4563 bp, Cannabis sativa
aacttgatcacactaggaaatactgtcatgcttatctgcaaaagtgtgatgaaactccaactcttcttccttgtccttttaccattgtccttcgaggaaaagaaaaagtcactgataaacccatgccctttcagtatcccgatctcccttctttagctgttgcaggtgctaattttagtacctctaatccatcttccacattgcttaccaaccaagttatcaactttccctcatttctcaatactagtgtgcctaatgcccctcagcttattccattccagccctctctagatgtcatgattcttacacccattaatcccaatctttctgctttgaacccatatggtagtaacgttagctttgcttctaccctgaactcttccacttatatctcttataccatagattatgttctggttgtgaatcagcctagtttagacagtttagagggcctgttgaatacccaatcctctactgacactcctccaaatactagagaggaggcttttctatgggctaatacaattgctcatccttctagtgacaatcctgttggtcaacttgacctttctgtacgaggcaaggttttgcctctacctctagtgtgaaatgtgcttctttttactctcaccagattatagttggtggttccctccggtccatgcttaaacgagcccgtgctggggacatggatggtgtttccttttcttcttctttttcattggaacaggcgggtgatgttgggcacacctgcctagaaaaatgagcctcatcagctggaatgcacggggtcttgggagtacccattcattcagaagactctctctgttggttaaggagcatcaacctttagttctttttttgatggatacaaagttgccttcccatgaagtggatagagttaagacttctttaggttttgattttggctttgaagtccacaagaagcattttttttttgggggggacttatgcttttgtgaaagtcttatgtttatgttcatattttaaatttctcctataatcatatagattgtaatataaactttaatgatatttgtttcattttactagtttttatggatctcctgtgcataatcaaaagcatctcacttggaatcttcttcataaagaattttaatatgcccctaatcttccttggtttataatgggtgattttaatagttatctttttcatagtgataagtctagcaatcatttttactctaataccgatatgaagtcttttgcttatttcttggataagtttagcctttttcctttttcttatattggtaataaattcacttggaagcatagttctacatatgatcgtctagactgggctgttagtttaaatacttggtgtgttatgttccctagtgctattctttatcaactactctttcatggctcggatcatcgagccttgaaggtgctgcttaacttagataataatgcttgcccaaattttgttagtaaaagatttcaatttgaaaatatttggcttgagaattctgacttttatctttctgttaagctataatctcaataatactaataaatgggctttttcaaattttttgaataagcagttttcttgtattttctctattaaaacttggaatgcttcgataaacaatctcttcaaaactaggatcaatgctcttaataaggctatagctgagctccaaagtttttgtcctttggacagtaataccattagccaaatttagaatctccaatctcatctgaatacttttttgtataaagaggaggtgtattgcgccaatggtctagggtgacctggctgaatgctggtgacaaaaataccaaattctttcatcgttttgcctctcatagaaaaaaggtaaataccatcaaatttcttaaagacgagaatggtagcattattaatgtttttgagagtatttgtggtgttatctcttcgtacttttccagtctttttcagtttgaaggctgtgatgctgagtccactgctcaaatcttagaaaatctaggacctccccttgatgatcatgattctgatgtgttagggcagccttttagtgctgatgaggtcaggagggctctctttcagttgtttggtgataaagttgcgggtcttaatggtcttaacgcttatttctatcaaaaaattggccgaccctaggtttgaaacttattgatgcaggcctagattaccttaataatggtactgacgtctcttctattaattccactcttattatccttattcctaagaagtaacatgctcactctgctctagactttagacctactagtttatgtactacactgtataaggttatttccaaagtgctagcttgtcgtttaaagatagttttcaatagaattatttcaccttcccaaagtgctttttttttggtagagtcatttttgacattattcttcttgctcaagaggttgtacatgctattaattctaggaaacaaggaaagttaggttgggctgccctcaagttggatatggtcaaagcttttgatagggttgagtgacatttcctagaaaatgtcatgtttcatttcaattttcctcttcattttctctcttaatataaaatgtatctctaccactaatatctcttttctgattattggggttgttagaggatctataaaaccgactaagggtcttagacaaggagatcctttgtccccttatctttttatcatttgtgttaaggggttatcatctctacttagagctaagcaagatagtaatcttctgaagagcatctttatctcgaggagtgctccttcattaactcatttacttttttgcagatgacaaccttatcttctgcactgcggatagacactcttgtgttgctcttagtgatgttttttccatctactttaaaacttcaggtcaagttataaattttgtttaatcctctatcatgttcttccctaatgtccctcaaggtattcaaaatttttctttaccactttcaacttggaagacatgccttttattattaaatatttagggcttccccaatgtctgtcgcgttcaaaacatcactccttcacttttctaaaggatagagtttcctctgtccttcattcttcgcattccaagtgtttctctagagctggaaaggaaattctccttaaggctgtggtgcaagccatcccagcttatgtcatggcttattttaaattgtcagttaagctttgtaaggagattgaggttgcgatggctagattttggtggggtaacttcgggtgattctaaaaagattcattggaagagctagaggactatctgttaatataagtttgtaggaggtttaggctttagatctcttacctattttaaccgagctatactagctaagctggcttagagaatcctcaatcatcccaatttgctacttagtcttactctcaaagaccgttattttcctaatacctctattctggaggctaagcctggtaataatccctcgtattcttagagaagtttactttgaggaagggatctgttagcttctggtatgatttggaaagttggtgatggagagaacataagaacattagaggagcattgaatcccaattgctaaatttaaatgttttactcaggatcctcaacctccctctgataagctttcatatttcattgatgaatcaggctcatggagtttaaataggcttagagatcattttgatgactgtattattagagaaattttggatgttccaatatcaggggtaaggggtaaggatgatcaaatttgggcaaaggagaactctggtttgtttagtgttaaattagcctatcaccttgctctctcaagacgtgacctcccttcttcatcctttcgaaccttaaaatcttcttggactaagatatggaattctaagattcctcctaaagttaaacactttatctagagggctgtctctaatgtttttcttgtggctgcgttgctttctcaggggcatatcatttgctcccctttgtgtcatttatgcaaacttcaatcagaaacggtaacacatgttttactagattactttagagtcaagaaagcttagaagacatcaaattttactagctttcacaactataataagcactttgatattatacattacatacagaacataattaatgcttttgataactcttctattgatatatttttatgttttctttggactttatggaagtagagcaataatgtcttttataaccgtatgtttattcctcctcgtgagatttttgcttggtgcaacagttttttgctcaaatacttggatgctcagcagaatggtttatccagtaacagtttggtaaatagatcctagatctcatgttttgatgtcgtgcttgagtggttgttttcggatttatacagatgcgacattggacagtacaaggaaaaagcataacctggggattgtggtttataatgaatcaaaccatctagtagcagaaattattaagccaattgttggcaatgtttctcctgctattgctgaagcgaaggccgttcttcttgatgtgtagc

SEQ ID NO: 23474 - DNA, 3598 bp, Cannabis sativa
aaaaaaaaaaaagaaagatgaagcttggatattataaccatgaaaaccaaaaattgaactttggattttttttttttttttttttgtgtgtaaagaacttaccaaactcatcgttactcacccttaattgtaatgatatgatcactctatcatcttcttaagcttgtgatttaaaaaattctaaccctttacgtgaagaattcaatgcgcatttatagagtatagaagtcatatacttagttacccttttcctctaatggagtgtttacaaataatatattactttgggcttatcaagtgaagcccagcccatgaggcagtgattgtatactgacttggcatgttgatcacggtcacagctgttactatttgccctattatatattgtggataattaattatatattaattgcttgatcgacaattatgtagttccctattttagcttgatattattctttgtccgagatttaaggaaagtgacttctttattctgctcgaaacaataaatggaaaactacagttggcttccacgtatacactgatgggttcttccagctacacagagctaagatctctctggagacggattagtcttgggagagactcgtttgagcgagaagtgaaatcgcctttccaaaaggccagggtggtattgggctcgacctagttaatttcgtttagggcccacaaatgggttttaaatagttttattgaatccacgtatcacatgctagaaatacggataatatttaccctcaagcttccgaaatattgttgattgtggaagtttgcttcagtctacataggtggacatgtggaggctaaaggtgtggaacctatacaattttccaaataaaactgaatgtgaaagatagtttttgtttattcgcttttaagatctgacgtggcattgtttctttggcttgcgaggcatcttgttcaattgatgaggtgtgtgtggcaaaataagtaaactgatggctattaatttttgcacgaagtttgaggagaatgtcataatgtgatttcacctcgattctaaacaatgcactaaatgttaaacggatggccttcctagatgttggatctattttgtgttttgggaggataacgcttgaccgttgacttagatttgcatggatcgtcttttgtagatataaatacctttaaacaccacattttaacacttttacctaaaattttgaatttttctttctcaaacccataacctttgagagccaacaaccataattagaatcgtgcacaaatcgaaccactttggagcgtgatatatatttttgcattcaacttcttcttcgaatcaaagctcgagaatttccaggcacaccacccctagtgatcttgactgcatcaccagaggaagttgaaaatctagatataaactctaaatgacccccttattgaccagaccaatgccatcacagagaggcttgatcgactcgaagatcctctggttaagagaattctcatacaaccatccttcgacgtaagtgtgtgctcccctagactatattttcacttgagtccagagttattgctttatttatcaccatgtaaattttcttatttctaattttttacaaactttctttcatgtttgagattactgcttgagattatatgtgggttatctactgtttgagaactaggactttaggcttttggctaggaatattattattgacaggagtaggatgttttgaataacttcttaaatagcttcaagaattagtaaaagttaaattcctttgttgaattgtcttggaaaattcttgctgctgaaatactcgcaaaaattttattttcttatccagaacccttatggttctggatagtatgcgagcttttctagtttcttttattcttgtgttcctgcttccaatacctggaacaaatactctttgaggattttgtttatggatagcgaataaggtcgggacatacccaagaagttatgggggaggattctcccatgcccttactatcttagttggtctgggtacctaactgcttggtacttttttcaacttccacaatgtctagtaaatctcagcaagaagcaatggaaggagacagagaaaatgtcatagcggagcaagcttctgctctaaaattggtcttaaattcatattcatgggagatggatcaatataaaaataagttctaggcttataacaacctctaaaagtacgagacgatgaaatgatagaaagtgttccaggacttttttttagaacaaattgcctgtcatggccgatccaatgtggtgaaggaggcttcgttgtttagaactggggctatgtggagatgggtgcgcatcttcctttgagatgctacttcgtggagttctacatagtagccgaagcgacaccttacacacatttatcccctagtgtatcgtgtgcttgccggatggtatgttttatgcttccagaagaaaatagggcctcaactttagaagcttgcaagggttaattggtgtgccccactagttttttgaagcatgtatgcagacagtttgatgaacccctaatgtcagatacatacatgtagatcaatcacgtgatgccatgatatcttcattgtcacttcagttgaaaagcaaatattaaaaaatgactcgattgagagaatgtactttatttgataggaaataaagtatgttctttatttaacagaaattaatattgcattactagtactaaaaatatggtgtatacttttaattttttacgatacaaaatataaaatcttaagataaaagtatagagaaaaagaaaagaaatcgcagacctatgtttttgcttatttcgaaataaccaaagacatagatctccactatcctgccctattagatacatgtggaggcctacgtctttggttatttcttaataattgaagatataagtttgtaaaaccctaatttcacatcttaaactttcatttcttctttcttcttcatctttctctcaacgaaaaactgtcgccacactatcgtccttaaagctctattttctccatagaccatcatttttctttatttttcttttaaatcttctggttttcttacctaaaacacatatacattatataaatttatttattttaggatatcagggtagatgtgagagtttaggccgacagatatttagggcttttggagaatgacagtcgactaatggcagtaattttgagaattttgatgtggtcttttaacttgcattaaggtatacattattttaatatggtggtaagtccactgcaattgttggaaaattatgcaccgattatgcaccgtgctcgaaaattcgatggttttaaatggtggtgattgaaaagtaattttttaaggattttgattttagagttttgtgggtttggagagctcacacgccgcggtgttaaatagtggcttcaattttgggtataaattaatataaatatgaatttctttaataacaaataaataaaataattgaagatataggtcttttgtacattttcggtgatttcaagacttacgtcttcgccttaatacttttcggtaccaaattttttttcaaccttagaccaa

SEQ ID NO: 23475 - DNA, 4297 bp, Cannabis sativa
  modified_base (2584)..(2585): a, c, t, g, unknown or other
  modified_base (2663)..(2663): a, c, t, g, unknown or other
aaatatggtacttttttttttctgttcatcaatttgaatcggatttggttcaccattatgttggatctcttgttgagttcttattccacacaatgaatatttttaatagtatcttaatttattgagttctgattagtgatgtatagggacgggcaactgatatttgtcctattgaattttcttacctatacttggtaatgagtattagtaacttcctttcttttccctcttctcttgtttattggcatattgagaccaaaccaagagcaattcaaactagagggttaaaatgtcatttatcccaaaaccaataattttaggagaattttatttgcactccatcaagttatgaatacatcacatttaaatatatataattttttttttctgaacaaaagtagaagattttattcaaacaaccataaagcaaattacaaaaatcgagaaaatcccacacacaactcaaaagttgttaaccgtaaaaattaagtctttctctctagccttatacttagaaagattataaaaggcaactctagcttttaatctaaggcaacatgctaatagcttttatcgagttacaaattccttcaaaaacacatttgttcctattacaaatgtgatacacaacaatcaccactattaccgaagtaacatcaccaagcaaacaattttgagttcctcccaacctgttaagccaattaacaagattcaagtgccaattaaattgccctattcaaacagtgacttatagaatcactttcttagagacaatacagtcaaagaatagatgagagtgagactctatttccttaacacaaaccgggcaaaaaatagactcaactgggaaaatcttagcaagcaaactcctgatcaagaggttttcattaatagcttaccacattatgaaatgatgctttgacactttgaatttatgccacatatccctatgataattaacttttggggccgaaaggaatgagagctagcatttcttaactttgaacactccagaggctccggcctcaatcaaatcctgcttgcaaattttgtctcgaagattaactatttttttttggaaataccagctaatatctaggtttggatgaaaggtctgaaaattctcatctttcgtatagaccgcattaacccatcgaatccaaagactatcttgtttagtagataaaacccaaatatacttggccattaaggccacattccacttcttcccttctctaaagccaattccctcataagcttttggtaagcacatcttatccccagagacaagatgaagcttgctacggttgccagaatttccccatttccttcgtaactttttgaggcagaataaaaatgcccatccaattattcagaatctccaataaaatagagtgaataagttggtttctgccagtaaagaaaggtgtctactactccaaccatgaaggttcttatgaatcttgtctataatatccccacaatttgaggttttccatataacggccgcaagttgacccctaatacttcgaaggaatggatccctcttccatgttcactatgttcaacaactacattttaatatcaatagaaatgtcaccaaagtagatggaggattcatatttgttagttgaaagactcgtggcttcatagaagtcattgaaggcattatgaataatgattaaggaagagctattacctttgcaaaagataaccaagtcattggcaaagcacaagttgataagcttgaggggcttacacattgggtggaatccaaaatctttagaattcgaagcatgtaatagaagtggggtgaggtattccatcacaaagagtagggggagatggggtccttgttgggttttgtgccttaaccaaaaatctatttcaatgtaatcttgaatattcatttattaataaagaaacaaatttatttcattacttgtttaatgtattatttggttcacatgtttacttcatgatcatttgtttgatttataaattcatctacatcattatcacattgataatcttgattactgtgttgtcaacacagaggaaagtaattaagattatgtgattaaataacttcctacaatttatcagtatacagaatttcactgatatgataatcaataatgtagtttacttacaccttggataagtgctatgtcatttccagggtattggtaaagtaagcttgatgtatggagtatacatcagatgaaccgatattgaacatggataagatatcataaatttatcgtaatatctaactaggtcaatatcacacagttgatcttagatcactgatctcaatcctgagatggttaggttctagttcaattgtattatttatgttcttcaatttgtttgttaagttgaccaattatattttcccgtgacatacagattaagaacatggtagttcaattgagtgggagtgctaatcatagatacagaatctatagcttatataaatgcataaaagtgaaatgataatttctttcaagcttggcttaatagagataaatggtagagtactcatttcagtaattatattaatttactaaaatatcatttnnaggtagctaagtgttttaaagataaaatacattgaagggtagaaccgtaaattcgtccctactcgatgtagatcatcnatagaggatcattgattatttaaattattacaatagataaataatagtgtatttatatagtggaacatatagagtgttctatgtaattaagagtgaaattctaaatctatagtggcgtaagaaaaaattaataagttggagaatttacttataaaggctcccccaaatctttttcattaattttctattaattttacagtcctttacataatttcaacctcaacctttactaaccccaccacacaaatatgttttagttttaatatatctcattttagtggatgataagaaaaaaatatatagttggactcttatttaaaaaaacaaatatatatatatataatatttttaaaaattagtaaaaaaatatataatttaaattgataaattttgttaggccttgagttaggtggactttaagcacaaagttagtgtacttttgtccaaatctaggcctgcctttcacttgaactatatcttttagtttagtttctttaatatcatttcacacacttctgcgtactaagtaaatgatctcttattagtgtgccttgttttgccctttttggtgaaaatctataaaactccatatgatttcttttccattttaaattgtatttttttctagtaacaactcttcaacggttctaataacccaagtatattttccacgaaatgaataggaatatcaagcaataattcttagaaacactttggtacatgttagttaggttctgttagagttgttaattagtttgttatttagtcagagtcggttgtaagttagttgctctgcaactaacatttcttgctggtttaattgtcttacagagctatataagctctttcttcagctgtaacattcaattgagaatacataataatacagctctgatttctttcctctgttattctctctattctcataataattacaatttttccccaacaattaattaattcaattcaacttacgataataacatggatattgacattttgatatatatctttcgtataagatccaaatattgacccatataataaaccctcttaattatctcttaaaactacattttattaggtatataacaatactattaagcaagaaaaaaaaaagtgtgcctacacagctttcttgtagtacaatcaaacttcagcagacagatgatgacaagtggggattttggtttgtatatacatcaataagtttttgtataagagatttgtatttggactctaaccaagttgtcaaagaatatcagtgtcaagatgaattgggtcgtccatttgtttagcattatattattatattattatattatatatagaaaaaaaaaagctaaaattgataacacattatattattatatatctatatttttttttaaaggtagaattttatgatattatatataagaataatattccaactaccccttcaattagctaatctagaaagctaggagctactctaaggaattatatgtggtgatatattaagaatgattaatgagaattatttattaaagttttcattttatattgagtgcgttttgtaatatttttttaattagaaaagtaaaaatatttttttaaaaaaaagcctgtttttcttctaattatttaattaa

SEQ ID NO: 23476 - DNA, 1690 bp, Cannabis sativa
atacaaatatgtcacattacaaaaactgattcaaatttaaatcacaatatagcattgtgcaaaatttacatcacaataaattttatatttttttatttacaattatactatttttaatatattattattaaattttatagttacctttctattattattattttatatttgtttaataaattattaagtgagcattaaatgatattaaattttgcatcaagatttataattatgtaatagaacacgatagtaaaagttaatgtaaatatatcataaaactattttttgtgtcaaatataactaaacttttacatctcttattggaaatggttgctaatgctattaagcatattattgatatgttttatcttaggtttattattatggtcattacttatctttttaacacctttagtgatctttcattttcttattgtgctagagttgttaataatgttgcacatttttttagcgaaacttgctctttctttggacgatcattatgtttagtggtttggttaccggattgtattagtgcctctttagaaattgatgattattgattaatgatatttttaggcactctttttgagaaaatagccttaaaaaacaccaccaatgagcatgaaactcaaaggggctgagagctatagagattctttaataaatggcatgagctaggacaaagttcctgatacaaataagatatctaggccaccagactgtgctagaattagttgttaaagcaaatttagcaagagaatcaactattgcattaatagttctggaacaaaacacacaacattgagatgtttacataaagttctaatgtcatctaaaattaaacccaaagatgaatctaaagaattattaagtttatgaaccaagcttttgcaataagattcgaactgaatattatagatgccaaaagtgagacattgagatacttcatttcgaatagcaagggcttcaactcactctgatgggagaacattgtcgatcttctaagtcgccgacgtgactaccttcccatttgaatcatgaaacaccattcctaaacctaaacgacaagaacctccaacagagtcaatggttacgtctgaattgactttgagcacatcgtgagcagggggagccaataaggaagagaactaactctgtgagtagctagtagctcatgattataaaaagaatctcgctagttatcatcgcaataggccttgaggaaattagtcgcccatggaccaactaactcaactaactcagacaagatgatggttttatcatgtacttgcttgttacttcgataccaaatgtgctaccaagtgatcaaaactaattcaagagataccaaaggggccaccaagtgatcaaaaccaattcaagtaatggttttggccactcttttccctcttggagtttttactcggtttactcaatagattttaacgaggcatgtttcttctaaaaaaaacacaaaggactattaagtaacaaaataagataggagaatttttatttttatagtttttaagatataaatttgtaaaaatatggttttttttttttaaaaaagattattttatgaaaaatatttagaaaaaaagttaaaagaaatgggaaaatagtataaggtaattggttatccctctagttaccataagagtacctgattttctataattttcaa

SEQ ID NO: 23477 - DNA, 3927 bp, Cannabis sativa
caatgtctattttggttggggttcgacttctggatcagcctctggctaccacaggtaaagatattgaatcgctattaatctcggtaaaataacaaagtacttaactaagcctaggccgcttcattcctttgtaggtttaacaattacatggacaagtgctctgatgaggatacttatctgacagtggacaagcatggcaaagtgagcatgcgtaagttgagctcgttgcatagcttagctgaggccgattggaaatcaattaatcccccaaagaaattagaccaccgagaattacgattctgggtatccaacgctacaggaaaatgcctaactgtttttggaggcaaaacaaagaaacgaactgtaggtgtagctgactgcaagtttgatggctcgaatcttggacagcttttcgcctttcgctttcattaccataatgccttttgttgttgcggagttcacaacatctaagttcacccccacaatatatatattacatttgttgtgacatgcattctaaactattatgccaagcaaactcctccacttccaaagttgagacatatatgagcttacaatataccttttcatgttctgatataaagaaaaattccactgaggtccagacaatataatgaacggaataaatagttgtttacctcattacacttgcatcaaatcaacatgaaaactctccagattttgatcatttaaaatgttaaatgtaattaaaaatgaaacatagacttgagcataagttaactggcatgctttaccttactgattcatatatgaatctccccatcatgtttttggtgatgctgttaaaattaagaacaaagtgctaaagaagctacataaaactttttggtttactctgtatagtaagtatccttgcaaactatgtaactggacaacaaaaatttcctacgagtttattcgtttattggaacagataaaaactacaatatacgaaagtgactttcctacaaaaatggattttctgtataaagggatatataggtgaagtaacaacatatcactgggagatcatacataacctagggatacttctaatgaaccaatggttaatgacaattatcagttaccatctgtcataagttgggcagtaattgaaactgaaggaattgcttcctcactagctaccacagtcttcaaacaaggaggctttgctgctccataataatagtatgccattatctttgaaagctcgtctgcagttcgcatttctggaaaaacagccaaagaatatttgagaatcatacaataaaaagaacagaatcaaaactgagatggtaatactagcatcaactaaaataacctctttcacgatacaagatctttccagccttggtaaaaatcatctcagggaagacagacacttgaagtgcagaaaccaaatcagtctcgataacagcatcaacagcgacacactattcaatatgacaataatagtcattagtatgactagtatagcagatgtgaataaataccctaatgataaatactaattttctcactcttggtgaaggtagtcgacagttccagatgatgtgcacagccttctctatttcatctcgaattttttcattttcctttggcctaggaagtgtcaagaatattcattattccgagacaaatatggtcaatacacatttgatgaaaacccaataaagatcaaatttgtatgaagatcgaaacaagatcatagatataagtgagaaataatagtttccaatgagtaaaaattgcttatatcaagtgtatgcgtgcagaagcagaattatgtgtcaattgtaagccaaaaatacttgtgcttggagatcaccctcttatcttatagaatagtctaatgcagaaatatatttgggattgacactaagtactttcattaagttagttcctctatagattgatgaaatttacataaaaatcagcagcacaacaggcagtgcagtaaatttgtatcaataaagatatagtatttaaaagaaaaaaaaaacagaaaattgagaaaggagcataccttctatagcgattatgtacaagaataatcaaagggctgatgtccttgaaaacagtctcctcccaatcagctgtggttatgtctttgatggggcgtatatagttatcatcttgccatacaatttcatttttgctatcatcatcatcgtcatcgtcatcatcaacttttttaggattattcttaatggttattttgtcaaagaactggcccaagttgaatccccaaccatcagcatcttctggccaatcaggatcatcctcctccacaacaagtgggtatttatcaacaagctcttgtaccttcttcctcctctcctcaggcataacctcttctttaacctcaaggttccgcaccatcacttccctaatcttcctcctccattcttctcgttcttcgagagtcattaagtaaggatcattcttatcaacaacaggttcatcctcatcatcagagtcactagaatcttcttcttcttctactccccttcgcgctcctctggaataagcaaatgtgtttcctgtcttggggatatgtgatctactaccattgaaactaaatgatagagttctacattcatttctttggatacagttgtatagtgaattcaggcaaacaattgaattagacactgcaaacttgttcttaaattgtgggaaagaatatggcaaccttgtggtacattgtagagccatttctgtaaataaaaacacagaaaaagaaatgacacatgagcaaatagaatcaatgcaacaaggagttggaattgccaacactaatacatgtaaaggtttgaactttagtttgaccactgtactcctgaaaaccctaactcacccacaccaataaaagaaatcaacagttgggttttagtgtcaagctcaggcattcaaaacccagatagcaagtctcaaataaacccattaaaacacatgacttatccaaaccatcaatataaactataaagagttaataaatcatatacctctcttgtcaagtagttcttaagatatatcagcttatcatattacacccaatgtcctttcttagagcaaaaccttcattctgctatttcagctttctgtcaatctttgtagttttatcttaaacgaaaagaaaataccccttttatatcttcttcttctctgttttatgtaagataaatttgggcaaagatttgagcagtgttagagtcagtagagagagagagacagtttgcatgtaaccaaagttgactacttttcaaggaaacatttgattaacacgaaattagagcatagatattagatgcggaatcaaaagtgtaaaaccaaacctgagcaagcagagaactcggctggtctcatcggcaaccaaattttgtgtgctactctctatttatctttttcttttttcatttaacaatttccgtattatctattgtactttcttgtttttattttttggtttttttttttttttagaaaaaaaaggcttattattatttgagaaaattaaattgtatacccactttattttatttgttttaatttttacctctattttcatatttttttttagatatactcacttttatagatattgtccccattagaccccttaagttatgtaaattatataaaatacttaagtagagagtaagggtatattagataattcacttaaaaaaaaatgagtatattttaataaaaaaaataatataaaggtatttttgattaatggataaaaaaaatgcatttttcaacttatcccttattgtttttgctttgatgaaaatcataattggaaacttatgatatgtttactaataagggcctgtttggtacgcaggattggattggattagacaggctaatttgtccaatccagtgtttgggcatgtt

SEQ ID NO: 23478 - DNA, 3388 bp, Cannabis sativa
agattataccttaatagacgttgagatacaatattttctccactaaaaactgtggtcggatgtataaccaccacaaccactcctcaacctgtggtttaccctaaaaaataaggaaacatgtgatattttcaagtatataattttagttataaaaaatagaagatttagaaacaaaaatgaggtaaaatagtgaaaaaatagtgaaatgggggtaattttctgtggtggtcggcggagagggtttggggtttctctggtttgggagtttctgggttggctgatcgaatgaggaagacgaagggctgggctagggttatgaacccttttggcgtcggttatttggaaataactgacgtcataagggagcacaccctatggcgtcgattatttccaaataaccgacgccataagtggcgtaaaatttccttctaaaaatttccaaccatatgccgtcgattatttattattatgctgaaaaaagtacctctaaaggcttgttttgtagtagtgcgaacaccaatttgatcatcttcttccagtagccttgaggccaagggcggcctcgcccctccttctccttctggttcgtcttccctttgtagacatttttatatctcgttgttcatcgcatatatgcaaacccacataggacagagcacaactctttgaaaaaatgatattaattacatcatatatctatagaggtaatcttaagtgggagcacttttgctccaaccgtaagatagttttttattcttcctactttgataaattatattctaatttttttttatataacattctatattgtagttgtaatagatatttattttcaaaaaattttgaatactttacggtatcgaaaataaagtttaaaatattgcatgcgtgtaaaataaaacaggtatgtccggttgaatatttggatcctatttttagcaccataatatattcataatttccccaaaataaacaaaatgcatagtatataactataatatgcaccatcatataaaaaatattagatttatcatttagaaatactataatctgaatttagcctaattcattatgataatgaaacaataaatatcaaaaacttagggaaagtgtacgagtctatggaatcaattttagagtggtatgatctttcaatttttgcatcaaaattttctctggaaccttagtctcttgatgatgagaattcaatagtgaaaatatatgatatgatgtaaaaatgaggaccaatacctatttattaataactgaaaagttttgagtgctccatgtcctaacccgagcaaccattttctcaacaagaatgatgccttattatgttgaaattcgtttagcacaaataggcacacctaaatacttataaggtagctcatattgcttgaaactcaaagcatctagcattcgttgaacatattcatcactcatattgctgcaataaaaagcaatttttgtagaattaggcattaaacctgatgtatgagaaaataatttaagaccctacaacatgagatatatactctggaagtccccattgcaaaatagaaggacatcatccgagttgagatgatttaactttaaatctccacacttctcatggaacttgaaatcttatttcttcccaatttttttgcatgattctggaaatatattcaattcttaagacaaagcgaagaggagagattggatcactttgccttaaacctctcttttccccaaagaaaccatgaaaatagcaattgaacatcagagaaaatcttggtatttaaacacagttcataatcaatctaatgaacttgttttgaaactgaattgcataaagcatctcttcaatgaagtcccacttgatggtgtcataagctttttgtagatcaagcttaatcatgcaattagctttgcttgacttcctcccataacaccaaataagatcctaacatatcatgatattatgactaatgaatcttcctttaataaatcctccttggttctgggctacaaagtttggaaggattactttaagccttgaacaaattagctttgtagcagctttataaaagatattgcaacatgcaatagtttgataatcactaactatatttgggcacttgcttttaggaacaagcgtcaaaatagttgagttgatttcttttaaaagctaaccagcatgaaggaatgaagttatagcttcaaaaatatcattacctataagatcccaattgtcttgaaaaaaaaaagctgctataaccgttaggtccaggagctttgagaccaggaatgtcaaatatttctttcttaacttcttcaagagaaaaatcagctaaaagaatgtaggcttgattgtattttgtttttgttggcgattgatccctcgaacattccagctcatgattttatctatttccaagaaagggtgctccccatcctatttttttccttctcaagatactgtttttgatagtttccaacttgctctccttctttatgagttgtgttcaaaggatcagccaaggcttgaaaagacttacttgtagtttcaaccatttccagggcctttccttttggtttccagcccttagcaactgattgaaaaccatcagagccaaccttaacttctttattagtctcagcaacatctttctttttcacatcttctttaatgatccacccttgttttctttcttctttttcccgcactcagctgtaaggtggcccattccaaataaatgatcacacacaataggtttccattcgtatgtgatcaacatcgaggtgttgaatccattctaattttcaaagtatatgatttttgggaagtattgtttcaaagatacctcaattagcactctgggaaaactaagtttatctctacgtttagttgcatcatcaagcattataggcttccctacttgtctaatgatcttgaacaacgatttctcaccccaatacttcaagtcaagatcatcaagataaacccaaattggaatcaccctgatacctcctttttaaagttaatcgcagggtcccaagctttcataacaaccgaccttttgttaaagaaaatatatctccttttaagcaccttatttctatcttcaatggagttgaatcaaatcaagaaaacaccataagataacattccaactctttcaatcttatcttttcacattttccatgaaaatccttctaagattgaaagaggaggatttgcccccaacacataacacaatagaaggcttccaaaagtttacttcatattgtatatcatttactgtaatcttaagcatactctttgaaccagtgctcgagaaggttttttcaggacatcgttgaacatttccagaccttaatatagggggattagaggaattacctt

SEQ ID NO: 23479 - DNA, 3575 bp, Cannabis sativa
gggtccccgcggggccccatccccgtgggggaaatgtgcatccctaatgatgggaatagaaactgaaaaagaaggtataaatgaaaaaatttaaaacagcaggtaaaaataagatgcagtaacttttgtatgggatctaatttgggccattggattatgagtccaaccgaaatttagcatcaaacatgggcttgatatcccaaccctaatccctctccgacataacaaatggggccttatatgatattaatcctcttatatatatatcctgtggttgtgtatccatcttatattttccaacctagctaccctatctgcttctcttacgccgccactgaactattgtttagaaggaactcaactgagcaattcatgctcttcctcacacataccgtgattgagaatgttgagttatgcatcgaattacatgtttgttattgttttgattgatgcatgatattttgatgtatcttctttgtttgtactcgttcttgtgatgtattttcaacatcccgttcccaaccctatttcttttgttgcttttgtttggggccaatgattaaaaaatttagttagacaagcatatgtccgaaattactatgtagattaactaatcttctctatgaggccctataatctatatgcatttatatttcattcattgataattttggcgttcggcttgtgtgaatttgagaaaagttcgcaattatctaattgatgattcattgtgaatacattacaccactacttccttccctcaatagctatgttctaatttttgttttgttttaattatggtcgtatgatgatttttaatgcatagttcagatgaatctctgtgattatttcatttttagtctttcgctcctatctgacgacctataactttttttttttttttttgttttgcttatttatgaatatatcatatatgtatatattgagtcagtagtggagtaggaatgcaattccttagtcgacatttacatgtgcacaattttttagtaggggacagtgaagatttctcttatggtctcgttcgtcgtaatggactgttttagttcttgccgataatccatattctgagtcatacaccgcatatgcactcgcttgttaccacgtctttccttggtccgtcctttgacgttaaaatctttaaatttgtatgtagcttatgatttgggataaaatattcattttagacatcgtgcgtcctcttcatctctatgactgattttgtgcacttattccatttaaatactgatttgtttagctttatagggacactgaggatctttatctatggtctcgttcgacgtaatggtctaatgtagtccttgacgattatccatattctgagtcctcataaactgcacaatatttgttttgtttttatatctgtttttctttaggaaagatatatttaatcgttcagataaaaaaattatgatgtatctggttatttttattaaatgatttttgcacatttgttgcattagcaacctaagtctaacaccctgtatcgttcttgttagtgttaagtttattttggtcactgaagagccttcataatcccagttgagctgaaattatgtgcttatctgattcatgggaggccaatattgattgatggaagtttcgctgataaatgcctattttttactcattattttaggtgtttactagtaactttccgcatatccatatactgctaataacatctacttttgcagttttgtaattgatatattttgtttatttataatcatcttaatctttatacattttcaatacttctgcatagagtatagactatattgtttgctgtctctgcctttctcctctcttacattccgaagtaatttatattttacttgttctgtttattttagtccctgtgatgagttaattattaagttaaaagtagtatgaaatgactttgatgtaaatgaattttctgagggatttgttttcagcctctttcaatttaatctgtaatattttcttcaagatttgatataaaatccttccgtatgtgagggattgttttatcatcacatctcttatctttaatgcttatttcctttcccaatgattttattcttggagaaatttctgtttgcatttgttgattttaaccactctgaggtattcacaagtgttttctttaaccagttattggtttccaattcctttgtatggtgttgtcgattgtagtcatctcgatatgaagattagttttggaatggcgtcatatttttatttgcaatattatgtttttcaatcatattttaatgaagaactgtccattgtttgtttttatctctatgatgattggtttataaataaaagtagtggactgatttccattgatgattacaaccgttctgagagatttttaatttttgccaattgttgtaaataatattttttttcttctgatcattctgtattgcaaaagagaaaaaatatatagcaaattttgcctaaccaatggatttctaagcttatctttcaaccctcgtaatgcaacatatctcgtggtgaatcctatcactacatgccgcattttctatctatttcgttgtttatgagctttttctttccttactaatttcgaactgcagtgtttttgatcaagcatctaggatttttagagcactatctgaatttgtgtcctttgttaaagtagaaatcaaaggtgatatggtttcgaatgaacttggagaatggagatcattgctaccataataaatgaacgttcgtttgatacccaatgctgatcagtttgtaaacttaacattgtgattgttttaatgacaaatattgactcagtagtagtaaaagtcattgtacttgtatatatataaaaacaaattgaacttgttggatctattggtaaagggctgttatctagtggtggtagtgttataaataataatattctttgtgcaatttaatgtttcacttatatttctattgatgtctaatatttttttttcgatgtatgaaattttatcgtggttaaaaatattgttcttcaggtaaagtgaaatagaaggctaattatgctaaacagtccaaagggaagaataacatttttaccaacaaaaagattttgcctaacatggtcaagcacaacgacattatcccacctaatgaatatttcgagaaatattggcaaaactatgttaagacgcagttcgcaatccatatcatctcctcgaggatcatgtcactacaactaggtgcataaatcgcttggcgcattatatgaaaaatgcaatttaaaaatttaaaatctttgccgtttaataattgtggttcaaattgtacaagggggtgtttagaatgagttaatactaacaaggaaatggtgagttaaaacatttgtttgttttgagtcttaatgttattttcttagtattataactatccttgaggagggtaatctttaaaaaattgtaggattgaatcattatcttttattatattaatttgaatacaatttttgaattaataaattaatttaaataccaataatattattatttattataaataaaatatta

SEQ ID NO: 23480 - DNA, 2126 bp, Cannabis sativa
agccgaggcactacaaggaaaagaggaaaagttgattaaagttcctgcaacctccaaattaataatccatctattaattttttcaaaaacaatgttagtgacataagtaggaagagagacataattagtttccacttactgcaccaaggttcagggtaaaccatagtgacgtcaagattattaattctcaaagcagcaccaagctcaagaccaatgtatccacctccaacaataacagcggtaccattcttttttgctttaattgcttctacaagcgtatcagcatcatcgatttctctcaagtagaaaatgtttttggcatcagctccttgaactttaaaatctgtcaatttaataacctacagaaataataaaagatcttaaatatcattgaaaacaaattttgaggatgatcaaaatagaatttggataatacttacagtagaaccagttgcaataacaagaatctgatacttgaacgtttccccagctgcgcttacaagagttttcccagcaagatctgctttgactatttcggtgctaaggatcaattcgatacctgtaaatatagttggattttcatgagtaaagaatgctttcaacattatcagaacaaaaaagtgattgtacaattattaagaaggataaatgacctttctccttgtaccattcaggaagcaatctttctcctccacttccaacacacacatggaaacccggtagtcttgcaggagctgcaaaaattgaatcaaagctttagacacaatatcagagaaaaaagacaataaacaaaattattggtggaatacacaaattaattggacgatgcaaataacaaaacttacagtcagggaacaaataagccttgctaagagcaggacgctcataaggtgcaacctgaaaaggtgaaaaggagttaaatttcacaatgataaaagaataaggaaaaggaaaactcttgtttcttaaaatcaacaaaataaatgtcttttaacaaaaagaaaggacagaataatttcactagttaaacatgtaagaacatatcacttaaactaaacatcaacatcatgtttagatatttatgttggaagaaccagttcctaaagtgcctctttgtccgcctactgcactcgaatctcattcggagtgatattggagagcatgtagatttccttatttttaacttgagtcccttcactagcgctacaacatttaaggaatataaaacaagagcttcgcatagttcaaattgcccaaagtgatgccacatgattcgacgttattaatacatatacttaagaagattttacagaatgcgtcctgatttgatgtttgccaggatattatcagactttaagtagttgtccatagattccaataattccaaatcaaatttctgagcacctacttaaaagtcgtatgaaaggccatctttttaaccaccaaatccactagtgttccaatgatacagacgggtccaccattttcgaatttgttctaccatgtaccaacaatttactctcaatgggtaaattttgaaaaaaaaaaagaaaagggattgatgctcatataaggaaatgcctaaatttatagatgacacagaaaacaaaaacataccgcttctttggagataatagctagctcgcctggcttaaccccttgtttggcgaactctctagctgcatatccctatacaaacaagtaaaataaataaacagaataattgtaattatgttgaattcataaaactattttagtaattgtataaattaatttagatatggttaataatttcctgttgttcctggtttatatatctgcgaataatttcaaacgctacaccgatttgataacttttgtaagataattcactttatttaacctattaaaataatccatttccgtttattttcgaatctacaatctacattattcaccttcaggcttcaaactcaaaaacacaatgatcaaaatcaactagtaaaaaacaaaaagagaataaaaaaacacaatatataaactctctaagcagttggaataatctaaaacaaacaaacatgccaaaatagaaatcgcgaacaaaaattccgatagccgatcgggcttagaatagaaagaaactcaca

SEQ ID NO: 23481 - DNA, 1768 bp, Cannabis sativa
ttttctatgatctaactttgtaaagaactcatatttagaaaatattgtagttttttatatttaaactataaatattttatttgtccaataattttttaatattttactaatttaacattcattaaaaacgtaagtttttttaataatgtatatagtttaaaattatttaagatcgtgcaacgcgcttttttgtttcctaattataatataattgggtataaaacagagtattgtctttatgttttaaattttctttttaacttaatttataatgcaacatacttttcaacttatgtcggctcaatagagagaatagtgcaataattcattgatgtagctacgagccacatgtatagtattaaagtttattttactagcctaaattagttgaaattaaatataatgactttaaacatttaaaaatgaactctaaaattagatacaaaatccaaattaattttattattaaagcactatttgtgtaattattttccacctagacacttaaattagagtataaattagctctagattggattaattttacatcaggaaaatattagtaaacataaacgaaatgaaaccattagaaagtagaattattttttatagtttgaaggaagttattttataaaaaataattcagaagacaaaattcgatgagcaccatatttgataaaaatcttatttatatattcttaattaattactctaaaataaaggtgttcacggattggtttagtctgaattttcatagtttttgaactaaatcagtataacggttttttgaatattgaaaaccaaactagactaataaatttcttaaatcaaaccaaaccattaagaacggtcgaaaccacggtttaagtggaatttataattattcatattttttaagtaattgtactatttttactaagaatttaatttaatatttcaaaatatgtatttaacatgataagtaataaatctataacatataaataacaatataaaaatattctcaaaagtcaaacataacataaaaattcaaaattcatgcaattaaaaacttgacacacaaaaaagttcaaaattatacatatagtcatatataaaagaaatatataaatcaattatttattgtaaatagtcggatccggtttaatcgttaactatttattacaaactataactgaaccattacgtcgtaaacggtccggattaactaaactaccaaaaacagttacttcggtttacggttgaccttggttcaggttgtcgtggtccgaatttaaaccgtgattttatgatttatattcctaaaatatacctccacaattaattttgagataagaacacatttcttcaaagaatggtaggtctcgaaattaattattgagaaaggagtaaagctatgtttacaacaaaaatggaaacatcacttattattattaccaacaagtcaaatgctagtgcgacacttatataataacgtgccactcttaattggattatattcttttttctcaagtaaaagcaagaagttatatggaagaaaataaaacaaaaataagaaacaatgaaatatcaacaaataaccacatccacacacacacattaaatgatctatgatactattgttaacggtgttctcgtgctcttaataaaggtgaaactttttaacacgactaaattgacactactcctagaggcacaagcactaaggccgtctctagcttttcatgggtcttgagataatttttcttttatttctttttttttttaa

SEQ ID NO: 23482 - DNA, 3227 bp, Cannabis sativa
  modified_base (1417)..(1419): a, c, t, g, unknown or other
cgatgttccgaaaccatctcataggaatatgagaccccatcaaaacaatagataactcgaccctcgagttatcgtcaaccaccgcgaggcccataaaggattggaagaagttatatgtcttatctatttgaacgattttagccacgaaaagagactagctctcaaaggatagactcaaatactgttttaagccaatcttcaagatcctatacgagggaggttcttcgtcaaggaaaaaataacatccatcataataaccgtgatgaaaaaaactagcatgagtaacttacaaagttattaatcaatacgtgcctcgcccatgaggttagttagttactatactagacgagaaatgcaatgtgaacaccgaagtgaacataacctatgagaatatctaaaccgaaggcaaccaaatttacatgattacttaaatcacaatgctcctgatttacgtgagcagttaaatcgtattgccgctgacgtacatgagcgatttaataatcgctctctagatggtcttatacaattgtgggtcatgcagttggatgaatagtttcgtaaatattgagacagagagtatggaaaactacttggatatgactcgtatgaggattttgatgttggaacttattttaccagcatcataatttactaacatgtatgtttgattataaatctataatctaacatccaaaatatgaaattcccaaaatgataaattaaacatgtaaaagtgtagtattacattggttgcaatgaaatataatatctcatttcgtttagtactctaatccttgttcttttctattgtagattagtaacaagtactgaacttgaatctccttccttaacctaaaaagcgaaagttctttacaatctttcacaaaactctaagtaccaccttgaatagtgtgggttgatgctcaactcaccattggaacacattgcgggagtgaaataggctatgtaatttttgaattagagaaaccagaagaaaagagcttttctgacatagaattagggttttctaacataggaagctttctctcatcaccttatctatgtagccttcacttagggttaggtttacaagagatgggccaaaataaagataattgggatcaaaatcaaccctagggaaaaattcaactctaggaaacctatggatttgatttttgccactttattttatttaaataaaacaatgtgtctttttcctattttactaattgttatacccaaaatttggctatgtaccagaagctgacacgtgtcctacagaaggaatgtgaatcaactcagagagtataataatgatgtatcattaaatgcaatttaaataacttatttcaattaaatgtaagtttgatagaaaatattcaaactcgttatctgcttagtcttatgcgagacaagnnnaataactattaaactggtattgatgagacacatgtatacctcaggacaaacagagtagtaaaatgtgcaagacgagacagtcaaagaccttaaccctcttgaaaagagaagaacttatgacactcaaccgcctcgtgttatttatagcataatgatcatctcgcattacttataccaatgaagggatataacgagatgaattatttccaacatttagcgtttaatcctattaagatggagaggaaggaaaactcatgtctgatgagacacaaccttccaagtcaggataaccatctaatggataaaaataaagatcagttgggtagttattagatattatcctatgtatgattaaatgaaacgtggggattgtccacatttcatcaatagttgtaaatgaatcaatcccaaaagaataactgtcaacctatattcctataattaggggtagaattcattggaaaagggacgacaaaattgagagagaaaatcctattattcaaatattgttattgtactctgtatcccagaagatatccctaataataaggactcgtggagtatgtagattttgactacaaaactacgtaaaatatttggtgtcattttatcatttattatatatttatttctatagtgcatttattgcaaaaaggctattaatttggttaacaaaaatctgcgttaacagtttggtgctttcattgagagccttggcgataaaaactcagaagaaatccctccttataaacacaatctacccatattcaatggctaatgatgatcaacacaacaatagtcatcctgaggaaacaacccctctctccagcaaagaacccatgggatctcaaagacccaacacatctgaaacaccacatgcaaggatgaacgatggtaatgatgattaaatctcagaaaggaggagtgagaatgcctataactctgccagatatgtgcctaggagtgaggatgtttatcacccaaccagatatgtgccattagtggagttggagaagaggcaacttcgacaatgtttggctgaatcaaaccaacgaaatgctgagttagagcaagaggctacgacggccaggactgcacaagggacagttcctcagtaccaacatgatcttacagtaatgagatcacgaggaagacctcgaggctccaataccaggaggtaggaaacaaaccaagggaatccccaaaatacctaggaggagcaacctgggaatacaagggatatcctaatgaataatcaaccagatcctaatagtgcaaggaatcaagaacattgacgagatgttccacaaacttcccatggatttgttaaccaagggaatgaacgaattgacatgccagaatcatctcgcatgaatgattaagcaaggcctccttgatcagggaatcgaggattccctcgtgataatgagagaaatcctagaaaccaaccaaggtcgagtggtcttcctccaagacatcgtcaacgtccttctcgcccaaatagagaaaatgcacatatgtacttatgtagaggacgtgtatctaatctcttccaaagaagaacgccgatgcgagacgaagcaagctcaagcacggtgaaattttgtattttaatattttcagatttattatttaattaaatgtttaattaaatgcggaataatgaaactggtactgataacagtttttccgtagttacagaaaacaactctgtaactccagaagaaaccataaaacaaatggaacaaaaaagtaaaaccacagaagatttttgtacgtggtttcaacaatcctttcagattgttact

SEQ ID NO: 23483 - DNA, 3231 bp, Cannabis sativa
taatttataatcgttttaaaagttatatttagggtgttaatcaacatacttgtgagtagatccaagatcctggtaaaattatttccaacactaatcgcattctctgagatagccatgtagataagtaaagtctctcaagttattggtttagccaaaactggaggggttgatagatgtttctttatgtttgcaaaggcttccttgcattcatctgtccatttgaattttatgttgtcttgcaacacattgaagaacggtaggaacttatcagttgatttcgagatgaatttgttaagagttgccattctccccattaaggcatgtacttcctttggctttgttggtgatggcatttctatcaaagccttaattttttctggatttgcctcaatgcccctctcgttgactattaatcgcagaaattttcctgaggagactccaaaggaacacttctttggattgagttttatattgtaatttctcaatattttaaagcattctgcgaggtcttttgtgtggtccctactttttatccactttaccaacatatcatcgacgtagacctccatgttcctccctatttgctttttaaacatctcattcactagtccctgatatgctgccccattgttcttcaaaccaaaaggcatgactttataacaataaagtcccttgttggttacgaagcttgtatggtcttgatcagggacatgcatcttaatctggttatatccagaatatgcatccatgaacgtcataagctcgtgtccagcagttacatccactaattggtcgatccttggtattggaaagcaatcctttggacacgccttatttaaatctgaaaagtcgatacaaattctccaagttccatttggttttgggacaacgacaggattggataaccacgaccggtagactgcctcacgtatcaagttgttagtcaacaacttatccacttcttctttaagtgccctttgtctttcagaatccagggccgtccttttgtctctttgctgggtaatttgggtcgatattcagatggtaacaaataatgttagggtcaatccctatcatgtctgaatggctctaggcgaactgatcctggtttgccttcagaaaacttgttagttgctattttagtttctcatctagaattttcccaatgaatacacacttcgtgggattttctggatctaaaataacttcctccaattgcttgattggtttcaattggttcttttcatcttgaactcgaggatccagatcctcgacttacttcacgccttactccgttgtgactgccattagttgatgacttgcttttctattttgtagctctatgtggtagcattcacgagatagcagttggtcacctcacactacacctacaccaattggtgtttgaaacttcaaagataggtgtttaattgaactaactgcccttagtccaattagcatgggtcgacccagcagtatgttgtaggctgatggcaagtcaacaaccaggaaatcttgcattatggtattggataaaagcgcctcgcctacagttaatgggagttcaattattccttgactggcgacactactgcttgtaaatccacatagatttaccatgcaaggttttaacttggcactttccaatcccattttcttcgatgtatccttataaaggatattcactgaacttccattatccaccaataccctctttattcttttattggcaagctggattgtaatcacgagcgggttgacatgagggtactacacatgttttgtgtcttcctcaaaaaacacaattggaggttcctcagtcttagctttctttaacgattctggagcaaagactgactgctcattcttaattttcttaacatatctcttttgggctattactttctctagcgagatgtggccctcccaagataactagaatgtcctctccttcaagaggaggaggttgtaatctttagttgcctgggttattgggcgaattcggctggttgtgtccattgccttgtcgcttcacataatactgaaagtaatagcgcgagataaggctctctatctcgtctttcaattgacgacattcattcgttgtattctcgatgtccttgtgaaatctacagaattttgtagcatcttgtttgtgccttgcatgactcaagctcttttctgcagacctgacataacctttgctataaattgacttagccaattcatgtttcaacctacaacagaacatggggagcttgtaaacgtgttctcagatatttggttggcactcaacaccttggcctcacattcaaactagcacatgttctagatctccaaggcttcaccgatgctgattggggtggttgttccattgacaggaaatccaccactggctacaacatatttctaggtggtaatctcataagctagtgctccaaaaagcaacaagttgttgctggttccagcacagaatccgagtacagggccctagccttagtaacttcagaaatcatgtggttgcaatcactccttgatgaattatctctccacatttttcaaacccctattctttggtgtgacaatatgggagctggctctcttacatctaattcagtttttcatgcaagaaccaaacatattaaagtggatcttcacttcatccaagatcgagtcttagccaaaaagctagatgtacaccatgttgactcaagcaatcagttggctgacatttttacaaaacctcagaagctgaagatgagtccattcaaactgaagcaattacttaatgtttttgtatcacgtgttagttaaatcagttagccttttactattaaagattagttgtaaattttgttacaattagttggtttaactaactactttgtaattgctcacatacttgatatataaatacattcactgcctcaatcgtttcatattgagcagtaacatttctctctcaaattctaccgagttcatttcccctgtttttctttcttttcttgttcttcattcttcttcactacatataaaagagttcgtaacttgaattcttccgtaactaacatgatacaatgatggaataaaagttccaagtgtacttccaaaattagtctattcaattacttaatttgaattttgaacttaaactcaagataaataaagcgaagtgagttaggttaagtaaatgagttctggttaagttcaagcctataaatagagcctaag

SEQ ID NO: 23484 - DNA, 2318 bp, Cannabis sativa
attatgcaagtaaagagaaaaaagttctaaactatttttgacagttgcctttgctagttatttggagaaaaatagacaagaactaaaatgtcttgattgttggagtaatgttggtatgaggtaatgttttcaataggaatgatatttttttacatttccatgtttggtatgggaattttttttggtttaaggataggaatattattactgtggtaatctaactagatattcttatgcataactaaacacagtcataagtttccatacaatcatattctctattttattatttcagttaatcaaattattttgagtacctcataccaaacactcccttagtatattaaatctgttgtattgtgattgaagggaatgtttaaaactcattcccatggtaataacttttccacacaaaaaaaatgaaacaagggaaaatggaagattaccattcctaaaatgatattatataaccaaaatgtaatttgtgtaagttgttgtttgtacatggttacatacaggaagtgaaaagtggatctttgggagattttgtagtggactgggactcattgcagtctcaggacgtggttcttcggcgaaaatgtgagacaggtgaggaggttgctatctcagcattgctaggtccattgccctttactagggagacagacacagatgatagtgtgttcccacgaaacgttttaatgaagatatgtgtgaagaagcccggattgagatctgtgttgcagttcgattgtgaagtttataacaaaggcgataatgggtctgagttcgacatccaaaatgcctattatcttcaatcttcatcagctatcagcagttcagactacagaggccccgtattctggtaaaaatttcattcaaagaatcttatatttgtcgaataagtagcataaaagttgcatattataacaagtctttgtcccgaaatctttatcatgccatgctagatacataattagggagaaaatcacaaaagcaagaaaaatgagtccatccgtgtgtgtctcgcactcaatctgttctctaaagatctttcatgaggaccttgttttaaactctcttcttgaagagatataagtttaatcatggccaatgaaaggagacgtggggtttccctctaaagtacccccggtcttcttgtgtgtcgccctcaaatgacggttttctctactacattattgcctctttgacatgggagaaatgtatcttaaacagtgtctaatcaactaaaacgaacactattttgtttacccttttcagtaacctttcagctacataacttatttacttatggcagtgatcttgaccatcggctgatcggggcgttcaaggagtacttaatatcaaagggtattggagaaagcttgacaaatttccttatccttcaccttcacaaaaaggagcacggccaatacgtgaactggttaaagaaactcgagtccatggtaactaaagacgagtgatgaacagacaatcccgtctccattttaaaccttcatgaatctattctctttaactcagacaccaccaatttttgtatggaggatgttgtaggtaaaaatatgttgattattgatcagtatacaaagttttttactcttcaaatggttacagagtctcttgttcttagttctaacaatgaagcttaagctagcttcctttcatatatgtttgtttgtttgtagcttggacaacatttaccaaaaatattgacctctttgatgggtttgttgatttaataaattgaagttttgatcatacataatacatattgttttgcttgaaaatttcaaagataattaatcaactaaaatagtggtgatcacatgagcattcaaacaacagaaaaatcaaaaagttaaaacaaaaaattagaaaaaaggaaatggatggaccaattaggcaccctcctctttaagcaagtagtaaaatgaggtccccataattgaaattgagttcattcatggccttgacaccttcaagcagagcctttaactcgccttccaacgcaaggagagcatcaatctttatggcgtatacaactagggccgcctttagggtggggcagccggggtcgttgccgaaggtctctcagctcgagagacctcctactcccaatctctttttcttttattttttgtaatgtttgtttatatggtctcaattttgtattgtttttgctagaaaaatggtttaaaatttatttaaattttattttatttctcaaataaaagcttcatttattaaaatttgcttagatctcaaaaaactagggccctacatataaccctactata

SEQ ID NO: 23485 - DNA, 5304 bp, Cannabis sativa
aaacaaccgagaaattctcattcactttctctttctctcttcatcatcttctttcttctcatctactctatattatttaatattattttataataaaactaaaattgtataaggaaaagggaaactaaatcaaaaaaatgtgatttttgagaaacaaggctgctaggcagccatgtggtgcaagcacgaggtagagagagcctcggcgactcgctggtgcatctagccgagaaaccctgaccatgcacgagtagtgtgcatgctagctgccaaaaaggaggtttttgtgggccctgtgtccatgcgtgcgggggtgaggagcatgcatgcacatgcagccatgcctccaatccaaaaaattcaattttcgagtcaattttgaccaaatttcaattctgacttacacatttttcaacaatttatcattctaaaaaaaatttaatcacgaaataaaattattattcataaaacatcaaaaaatacacaccattaatgaattctggaagaaatcaaaaacacaaaacaaaaaaaaataataacatattattttaatatcatcatgtttcatgaaagtaaataattatcatggctttgaggccagttattgaaatttattttactaaaatcttaatatactaagcatgtatattaatataaatattataatcaaacatctttattattaaaactataaaataataattaagcacataaaagataaagatctcttacataaattacagtgaaataatatgaaccatttcgttcagtactataactgttgttcctttctattatagagtaaaattataaaaataataattaagtacataaaagataaagatctcttacataaattaaagtggaataatatgaatcattttgttcagcattataaccgttgttcctttcagttgtaaagtaagcctagattacttccttcaaatcacgaatatttattttttacagtcttctacaaagatctgaatattgatgtgaactgcgtgggcaaatactctatactataagacacaaaattagagagtgaaagagaaagaaagaaactagaaattttcttgagagaaaagaaaagctttttctgatttagttttttttctgtttgtcaaaatagaagagtgtaatgtctgtcttaaatcaaaacattaggcctctttttatagtttttcttttaggtttagggtaagtatataattggctatttagaaaaggataatgaccctaaaaaccttaccaatatggattcaaggggtttgatttttgctatttttatttcatacaatgaaactttctatatttgtcttaaaatacaattttttatcatgattatttagatactaattttatctatttaataattatcaaataaaattaccatttaaatatatttattaattacacccataaaatatcttaattaaataataataaatatttctcttttattttcttctcacatttgccattccttagtatattcataaataaaacataatcttctatagaattctaattaattaattaagtcaattaattgagtctagaaggtaatattatcccaaataatgtggagatcatgggtctatctaatcaagctcctaataagtagatttaaaatttaccaagtaaattttctcacttattacttcctcctaactccattatagatttggaattgcactcttgattacatagaaaactctatataccaaatatagatatgctatgattatccattatttcaatcttaatagtcattgatcttttatcgacgatttacattgagtatggacaaaatttaccgtttagcctttcaatgtgttttatctttaaaacacttagcaacttataaatgatatttcaataagcaacaactgaaataagagctcttccattaatgtcattaaatcaagctctaaggaaattatcgttttactcctaaataattatagaacctatagattctatatctgtgactaacgctcctattcaattgtactatcgaattcccaagatgtatgtttggactattcttatgagtaaattggtaatgaacaagttaaagagcctgtatattacaattaagctagaacctaatcatcttaggattgagatcaattgactaaagatcatgttctctctctttaattaacgatcaattggccatgtctcttgtaagttgatattctgttaagtcctcctagtttttgtccccttcatcttggacttcatgttccacctgatttggttccacttggtctggtgctgcttcaggttccatctgaactggttccacctgatctggatcaggttcgatttcagttggctcattctaagttatcccaatagatgtacctgcaaggttagtctctatggaacctgcattaagctcattagtatttttacaaggaaaattattttcttaaaaaatcacatctctactaataagagttttaaaacctcctttcccttttacccatagcctgtagactttaacaccctctggatatcccagaaaaacacattttagagttctaggctctaatttccctatgctttgatgtgcataagctgcacatccaaagactttcaaattacataggtcaggtggtttaccagtccaccttttctcaggaatttcaccttctatggcactagatgggcttatgttaattaggtatgcagtagttaccactgtttcaccccaaaatccatttgagagccctacattgaaaagcatgcaactggctttgttaagtattgtcatgttcatcctttcagcaacaccattttgctcagggatttttctcattgttctgtgcctctgaatcccattatcttagcaataacttataaactcatcattgcaaaattctaatccattatctgctcttaaggtttttagtttcctgttagttagattttcaacaagttatttccagtgtacaaacttttgaaaagcttcattcttgtgttttaacaaataaacccataccttcctagaataatcagcaataatagataagaaataggcactgcccccaaaagttagggttttctcaggaccccacaaatctgaatgaacataatctaggatgccttgtgatttgtgtgtgccagttaaaatttaagcctatggtgtattcctatagtacacaaaattcacaaaaatctactttagttaccttatccttaccaagtagtttctgttccctcataagttgtaagccactttcactaatatgtcccaatctcctatgccatagaatagctttagtgtcttctgtgacatgttctttggtattgtggcaccaagctactgggctcccttgcaagtagtataggccaccatttttttgccattttgtaattgtcatagaaccctttgtcaatttgattgtacgtacctcaattttacttacaattcccagatcatcaagtacactgataaatattaagtttctagataaatcaggtacatatctaacattaaggttccaataacgccatcaaacattttaaaattaattgaacctgaaccttcaatgttgcatgtctggtcattccccaaaattacttttcctcctatagattcctagtaaaaaaacagactagacttattattagtcatatgaaatgtacagcctgaatcaatgatccaatcatctttaaaagatgatgcagcaacataaacatccacactatcataatcatcacttaggtttgcattctgatagtcattcttggttttgttcagtttgtttgattcttcttgatgatctgtatttgattttccattgcttctcttatagaagtagcatttcctcttgaaatgtctaggttttccacagtgataacacccattaggatctttagtgcctttggaacttgatctccctttgttgtgatgattgtttcccttctaagatcctttactagtgcgtctacctctattttgccaaggtttcttctgtgtagacgttccattgcttaggtttaaatcttcattagagtgtccaggcattttcactttcacctccaaagtgttgagattacttcttcaagagtaatctctgttcttccatacttaattactgttttgacttccgtgtaagattatggcaatgaattgagaatcataattgcttgactctcatcacttaaggccttattctcccttaagttgcctaactcaatatgtaacctcaagaactcatcaagattctgttccaaagtcttagactgactcattttaaatctaaaaattctttcttttagatagatcttgttgatcaaagatttcttctgaaattgttcttcaaactttgtccaattttttgctggtgtatcttctttatcaactagtctgattacgaaattaggtaggttgaaaattattaaaccagttgctgtttcaagcaattcttcttacttagcctttgttgtgtcagctggtcattccactggatcacttaggactttcagtagtttattctaggcaagtaaggctctgattttcttcctccaaattcgatagtcacctaaaccatcaaatctgtcaatgtccactttgatagaactcataattgcgtaaaagatttgagtcaagaaattgaaaaggtattaggtttagaaatataccaatcttgtgatttgtgtgaagtgcagcatagtccttgatgttctgagtctttcttgttccttacttcatttttccctttctttctgttagagctcctttgccttgattgacatctgataccgctataggaattttaccaatataacctacacacaaaagaaattaaataaagtattacttaaggtcaaaactgacctttcaccctgagtcaaacgaccgttgaatcttccaaatgcattgtcatttggtgaatacccttaaccctcgaaaccctcttgaattaactcactcactctttcagacacgaattaaatgaaaccctagcaaagctttgagtttcttctcaagaaacttgaagactgctaacaaccccaaattgagccttgtgcccttcccagatcaaaaccaaaacccttagatcaaaaaacacaaatatatgaaacagtaagagcaagaaaagtaagagagattgcactaggattttatagaggtttcccaaatgttgttgggtacatcctctttcgagctcgcctcaatagctcgattccactataagatcttcaagataaatgagttacaaggttggattccaaatcacatgtaagattagtaatcctttaagtatttacagtgtatttattctc

SEQ ID NO: 23486 - DNA, 2214 bp, Cannabis sativa
gttgcagtacttgtgctgggtttgtgtcccaagccagatttgagtattttcttctcgcttcgtgcttcttccttctacacgaaaatttgtgctctaaattcattaatgtttctaatagggtgaacctgcagatcatcacataattctcctcccgcggttaataaacagttgttattctagcttgaaaagctatcaactgaatgctatcatttagatttcttactttggttactattgcactaaagagactcatgtaagcctttagagattctcctggttgttgcttgatattagtcagcggcctcaggcctcctatccctcgcgacctgaaactgtttcttgaaattcttggatagttattccctggaggttatggaataattgatgaattcatcgaaccaactgcttgctgctcccattagagaagttggaaataaaatgcaacacaagttgtttgaaacattacttgctcgcattattgtgttaaaatggttcagatatgccacaggatcggttgtgtcgtcatactatgcaacgtgcgggttgttgaatccctaagataattgaaaattcaatatatcaggatgaaaaggcctctctctctctctccctcttcatttaaatcatatcttgataatttcccatattccctgtattggtattgcctgaacttatcctctaactgtattacccttaactaaatcagattcatgggctgttgctcgccttattgttggtgacctacattctggtttaatcaatcacgaagatctagaacattttgattcaagtgatcatgcaggtctggttgtctacggtttagatgctcccgtagatcagggtcgcgtcgcctcttgtttctttgttcgtaatttcttactaaccttgttatagaataactcttagattgataactttgactcttgatcatctcgataatagtagggtgaaccatccccatctcatgcttacctgtcacgtgtataggttttagttgatctgctctgcccatgggtccttgatcttgacccactaggatctgtactcaaccctattcttgaggttcttcttgcattggcctccatcttcggaacaaatttgacacacgtaccttacttaaataggtgtactcactgtctctgtcattgtggtttggcctttgcaggagtctcggtggtcggcataatccaggccgattgcctactcctctcgcatcgtgttaaaagaatctttcattcccatgttgtgcttacttggcattcacattcatgcaagatgattctatattttttaggttgttcattctcacagtttgtatatccataggaagaacctagattgttgggtcgagtttcttcatttctagtgtttcttggatttttggggatctctttatccattaagatgtcccttgtgttctcaggttgatcctcctgagtattcgtgggatttctagggttattctccctaggggcatcctcatgtcttctggtcctagagcttttaggtcttccctgaggtcatctagtcgatgtttcaggttggtttggaggggcatcatctcgcacagcccttgcggttgctgcctcgcactctaattctacaactctttgatttgactaagccagttactgtcaaaatttcttattttccagttctactaatgaaacatatcataggcatccttgcttcgtctctcttggatttcatccccaatttgttcaaattctccaccatttcttctagaatggggagtttcagtggcatttgtccagtgagaagtctgatgctcttttctagggcgttgagttgtctctcctggctgattttcttcattttgaggagtatcgtctgccatgaatgaacaatttgaatttatcttcaacgagggtgttcttctgagtttttattacaaggatctcaatgaaagcaccaaactattaaatagtaatttttgttaactaataaacaagctttttcgtgtaattaatatacttaggaatcaatttgactataattaaaaataataagggtaaatagcggcataagtacccaaagttttaagtttgttataagcgacataaatctaatgtttatttttagcggtgcaagtacccaatgtttataaaactctaattttcctccaattttgttagtatagactccattttaaatttattaaaggaacattttagaagtaattgatactatata

SEQ ID NO: 23487 - DNA, 4515 bp, Cannabis sativa
tatttttgtaaattttcctatatatttctcatgacaaggaactgctgaaccccaatcacaaaagctaaatcagctcaaaccccatcattaatacccgatgaaaaataaacgaaagacttggcaagattcatcaactgaccagaagctctctcataccaacccaaatcagatatatttttgacatcttttaataaatgcttaccatataagtgaaaataaataccaagtaatatgctatcttctctcttttatttttttattattaacattttgtcataaaaagaaaaattaatcatttattatgtatattaaataataacacaatattattttattagggatgatttttttatttggtttggttattaaagaatgtaaagagatgctgaatactatgagaaatgtttctattctttttgttaaagaatgtaaagagtgcttctagtttataccctaattgcgttttcaatttggggatgtctcaactgaattgctaccatttagaagtatttactattagaacaatttaaaataaaaggtataaaaaaaatattccgatttttggctattgttttgatgacttttttctataaaaagaaatacaaagtcaaattaatcttgattttatttaacttatttcagcataagaagtgaatcatgtggttagaaattcaaataccttctttttttttgctttgattttactcattagatgcaacattccaactactacaatatttatcatccattcacctaaatatttgttggtgactaaataaattaatttatttattcatcaatagagctgtttatcaaatctaatttgtactatttttttaatactatatttgatccacactaagtacaaattttatattttggatccaatccaattctcgcaataatccaaatctaattcaatccagtctgtaaaagtgtagattagatcggttactataaatttattactttttaatattgaattatttaaaaatattatcacataacttacaacaaaatgaatcaaattattgttgttttatgtctccaacaacaaattaaaataatcaaaataaaaaataacaaattaaaataaagaaggaaaaaaaatttgtatgtttaaataaatatttaattttgttttgaattacattttttgtaaataagaatagaatatatatttgatcatctattaaattttaaaatataactatatcagatgtattaaacttttaaagtacaattatttacattaaaatattaattgtatatataaatttttttaaatatatattataaagagcaatttgcagcttaaatacttaagtttaattttaagttgcaaataaatatctaagtttaattttttgtggtaatgatacctaagttataattttggaacttttgtagggacctgggtgttaagtgttaagtaaattgtcacgtgacaattcttgattggtcaaagtcataaaatttttattttttagaaaaaattaatttaaatataccaataagataataacatgttgataatgacttaatatttaacggtcaggtacctatagagttctaaaaatataacttaggtattattaccgcaaaaaattaaacttaggtatttatttgcaattgagagttaaacttattaggtatttatgctgtaaattattctattataaatatgtgtggattggtaggataggaaacttttgcatgtcaatcaacatccaagtataaatgcagatgttcgtacattgtacattggattggatcgtgtagattgaattgaattgagtattttattataatttttaatatagacttataattaaaataaactagattataatattctcattattatagtagaatcttaaaaactcacaccattttaaatttatatttaccaaacactcaactcaatttttttctacaattctgctacagttgttgttctcacagcacatctacaactgcttttctccgcagcacagctatgccaaactggcccttaataaaaatattaacaactacttaatatataaatttaaataattaaataatcataaattaaactttatttttaatgattataacaattgcgtgagcgctcaactaacttcatacagtacttatcatcttaattacaacaaaacaggaagacaaatacaagttttattatggaaataatcagtcatataaatcatgattttcctttccatttaaagtaaaaattttacatccatataatttattaaaattaatcctgttattatacatttcatagaaaaatattctatcactaatatttttatattaaactgtcagttatcagttttcaaaaacatataatgttatgacgaactattttacagttatcatcttacatttacgtttgtggagaaaacattctaccgataccatcaaaataaaatgtaaaatctttcataaatagtatgttaaattgtgtctttctatcaaagaaaaaataaggtctaaacaatatatgaaaataattacatcatcaatcacaatcctgatttattaaatttagaaactgtgatctttttttgattttattataaaagtacatacaatttctttattaattctaccatttaatacttatcacaaaatcattatctttttgtgtattttaaaattatgtttttgatattaatattattaatttatttataatacacacattaaaatattatattttagattataccactcaataaatacaaaatacataaatatatataatttacaaaaatttgacaataccacacgaaacatgggttagttctctagttttatatataaaataaatctaaataatattataataactattgatttagtttttatgaatttattcataaatgaattaaagtataaaaaaacatagtcatagtgtgatgattattaataaaaatatgaaattaatataaaaaataagattaatattaatgaaaaagttaatttttctaaaaaataaaatttctgtaaattttgataaaattaataattttgtcaaaatggtataatttaatttttgcataaggcttcgttcaagcttctctttaaggctttgacaatatatatatactagattcatatttatgtagtgcaacttttaatattatttaggaggattgttattgaatattagtgatgcttaatattatttgtgagtggtgtcttctgattgttagcaatatttcataattattaaattaaattatatgaaatacaatacttaattccttcaataaagatattacagttaagagagaaaatgggcgataatttattgctatgagtacaaagataggtgtctcaatcgatccctaatcaattaacatttttatataaattattatataatgaaataattgaggtgatccaataattaaatctaataataatatttttttatatatatggctagtaagctactagcttaatttctcctataaatacacttgtctaaatacatatatcatcaagaaaaaaaaaaaaaatagaaacacagacatatatagctataaaatgaagatgttgaagagtataataattatactatttgtggttaataatatggggtggtgctatgggagtagagtagcacatagtgttactattattccaagtaatcgttgttatatagaaggtgaatattgtagtgccttaccttggcaacagaaatattgttgtgaagggcttatttgccaaggagttctgagtactgaaaacagatgtgttaaggattcaagctgtcacccaaatgttggtgacccttgtgctcttttgtcaccttgttgttacccaaattattgcagtggtactacttcccctggttcaaaatgtttggccccttctactactactacttctaataaaccattatcatcagtactaggttatgttgatgagtaattatatatgtatatgtataatatgtttgtgtgtggggtttgcttttgatttggaataagaaagtaccttgtacctctctagtactacttgttatactaggatatatgtcaaaccatgttattataatgtgggaatgtaagatgtatatccaaattggtactttcatatgaataaatctatgcttgttctatatatatctatatatctcatttctcattctgaattatataaatatatatatatatatatatatttagggtaaataggactgaacatgtcaactgatttacataactcgaaaattgaaaaacaatgcttatgagagatcatttaattacacatgattatggataacctaaagtttgtaaaaactctctaagattctaagccttagccgccacatctctctctctctctcttttgaaaatatataatcatacacataaatatataccattttttaaaagaacacacaaacacatatacataatcacatacaaaaactctaatacaattaaaaaaaaaactagaacaaacatataaaaagaatcacattattcataattt

SEQ ID NO: 23488 - DNA, 7244 bp, Cannabis sativa
tttactttaaccaaatgctctggattggtcggccggttttcgaattgaaccaatccaaactgaaaactgaatttcagatttttatttgtaaaaaaactgaccaaaccgaccgatgcgaagccctaacacacaccataaaatttacatacaaacacatatacatatacatatcttatgctaatcttacctcatttcctaattcaagtgtgccagtcaaccagaatgaaaattcatgtgttgaacggagacactatgttacaatcatgtaaattgagtaaataacttgctacaaccttctcgggaatctaaactgaaaactaaaagtttttatatcgataaacaacatgaaaataccctaaatattgaggaaacacagaaaaatgagactttgaaaaactacccagaagaacggcagactatttttctgggtaatctgccagtaataacggtagattatttccacagaaatcgtcttcccttttctgctgcaaaaatagtctcttaatcaactcaaaataacctaaacttcttactaagctccaaaacacctaaagaaggttcaataaacatatcccaagcaataaaaccagatatagcacaaaatttcacaatccaccattgttgagccaatgttgagctcttgaacacaaacttgctcaacaataaaactaaacagaaattccaacccaaataaacattattcaactaagaaataactcagaaaataaccccttaaacctaaggttctggcagaaccaaaatactaacattgcatgcttaaacttagccaaaacttccaataattgcagaaaaggagttctagaatcttactttagatttgttatcctaaattttgtctacatgacgtggcataccaaaaatagagtacaagtggagtacaaccccgccaatagtagaatagagcgtccgtctaagatatagtaaaaccgtcaggcagcgaccgaagggagtaaagcaagcccacgaggagttgtaccaacatccttagccggccaaagggagcctataggccggctagggtaagcctataggccggccaggatctgtgcataagctgaccgactaagaagtgactttcggacccaaggaaactccattcgaccaagggaacctgacatctttaaggaaacgatgtacaaagctgtcctaaacttgcaaaaggctggcctccacactcaaaggttgtcctcctcttggtggagctatagtgacttgccgaaccctctaggccttgtcctgctaggtcctagcaggaccatgaccgtccaaacttccttgaaggcctatggacgaccaagattgacttggcaagactctatgtacaactctacacgtggaccaaggcatgtgctacaaatttgacccctaaagcctaacaaataggctgagaagtatctagaatctaaggacattttggtcttatgtaaatatctatctaactatcctatttttaagagatttaagttgtaaacctagggtttaaggcttcctatataaaggccttaaccctagccttgaaacctaagttctctaagttgcctctaggtcacctagcctccaaatagttctctaagtttgaaagccatattctctcttctctctctctttctctcttgtacatgaccattagggctctctctctcttctctaaatctctctcacacacctataggctggctagcaccttagctggccagcacccaaggttgtccaacacccacggttatccaataccctaggctgtccaacacgtgagatctgccttttgattcatactttgtaattctaagggtgttatagtagatcccacctatagtgatctagatagtatttccctcagtataaatacaaccaaaaggagagtaggtcatcacctactatcacaatggggtcgaacctctataacaaatctctgtgtttattgcttttttcattctgtttatgtaacatgtggcaagcatcagatctatatgacccaactgttagtgatcattttttgaggccaacagtttggtgctttaattgagagtgtggatatcgtatctgatcaaatgccatggttaacacaagaagaattcctgtcacgccatctgcatctttggtctccctcaagacccacaaattgtaggtctagacactcagttttcagtcacaattggaatcccaacaaacactacagatgtggtgaatcttgtcacaaaaattagcaccacgagtctggcctcctctagacagagctgtagtgacctaccaggtcctgcagcccatgtcctgccagattctacagcccttgacctaccaggtcttgcaggccttgacctgccagaccctgcacaccttggatagccaggcctcccctgttgggtctattgccagccaagattgcctggcaggactctatagtggtcagactgatacaggcatcccagtggatccaagtcgcaggcccatgcctccaaaggaggaccctccataggcacctccaactgaaggaagagtccttgggggcaccctccaagaacaacaatcgggtttcatccccggtactatacaggagagacgagaccaagaattgacgagcctactataggtgagccccgcgtgaacgtgagaagaccttgagttggccagactcagggaagtcgtaggccgtgcatgcctaattgaagaaccacgtgatgtttactgtaatgtatttgttcagcaaagatgcgaatcccttgaagaaccatgcactagtgattgcaatgtactcgctcagtagagacgcaaattcctaagatggatggtgaccaagagtacatccttcgatcttgccaagcaaacttagattgtcgcaacagagaggtcatcgatctaataaggcagttcaaccagagaaccgataaaagaggccatgatcttatcagagatccacttcaaggaagacttgttgatacatcagggagggtatatcgatatgctgatcaacccagttgcccacaaactaggatagatcttcccttgccagatggaggacagacctttccttaaaggtaaaacggcaaaaactggtagatcccggcaaccagcggcatggggggccaaccaaggatctcaagatcaacaacagccccctttgtccatcctgtggccgaccaaccaccagcaggagtacccatggccggccaaactccttcaacaatacccatggccagctagactcttctagcagtccccatggccagctagagaagagcactccctccccaaggggagtgagtcacccgaagattaattttcaaccgacgaggaccgagagtgggtggaaacacccaaaacaacaatttaagaagtgaagttaatcaattcagatagttggatccaccaaactctagtaattggtgcgatctactccatgtcgatgcacaaattccactagccaggcagagaagtatgggcagccaagccctgcctagcttaaggctagctgaccatgtacgagcaccaaactcagggctggccgaccttggaagtaacctctcccaaggtatggctggccaggctctatctaatccgaggattcaactcaatcaaagaaggccaatcagccaggcctctgcaacaatagatccttttgtgcaagcacaattggatcaaatacgagacatgcttaaggtcctagctggtcaaaaaccttcagaacttgagctaaacaaggcgaggagatcaccattctcggcatacatcaatgccttgcccttgcccaaattcaagacgtaggcttggaagatgtacacgggaagagaagagcctctagtacacgtgaagtactttaagatccaaatagatctcatataagtacatggagatgtgtgatgcaaaatctttctggcaactctagctaaaatagcccaataatgatatttcatgctggccccaagaagatttaattcttgggaagagctctctcgagagttctatataaattttttatttttttaaaaactaatattcaattcatgttaattcatattttttaaattcatatttttttattgactgttattatttttatataaagttacataattaccagatttcatttaaaaaattgtactagattttttcttttaaataaaacttaaaaaagtaattttttatgaatattaatgctatatactatattgaataactaatcaaattcttatatactatcatctgaatctttaaatattagagaaataaaatactcacaatatttttataccaaatgaacaaacacaaatataacacccaaaacaaataacattccaatgtatgttgatttgaagcaaaatgttaaaataattgtttaaaaaaaatacaatgtaaacccagaattatgtgtgagcatttgaataaaaaaatcagaaaaaataacttagtcccattgattcacatttcggtctccatcccttactaactgcaaccatggaaattcagggcacttcctgctccattgaagttgtcggccatcgaagacccacctattgcctttgttgatctcttcgtcgtagtcgaccgagaaagccttgaaaagtgtcgacgagccaaagagacgaggatcgattggagacgacgattggttgccgagatccttgcactagagagacgaggcggagacgacaacaacgaggcggagagtggatgttgttcgccggaggatggctggtcaccagcagctacggaaaagaaaaaagagatcaatcgcccagcgcttcccgagggagaagaagaaacggcaatagcctaaaactttgttttagcaaactgatagggtttcgtgtaaacctttattcaccttttattttttatttttttaattattaattacattattattacagcttttaagaaaaaaaaatgcattaatattacaactgtatttttcttgttttttattttttaatttatgattatgatatagtgacgcgctaggtgtgtgggaaaatacttatccaatcgcacttagcgtgtcactatatgccagtattttttaaataataaaaattaaaaatttttgaattttactctttagtaactctctatatttttagtgacgcgcattataggagattaacaccgaataattagagtctaattatgcatgtcagtaaaaattactcctaactcttagtgtcactaaaaggctaaattgtagtagtgtttcgtaaacacatttcagactgtattcttgagagcacgacttcaacactttgtattggaagttgtttttgattgcgtagttgctgaggacattcttcagtgtttccttggtcttgtatgtttgacctttttcaacttttgtgtgatgtttgtctgttattagcttcgcgttgttgatgttgatttctggatcaagtttttttactgttgttttcaagtttttctaatttcttcagcaaccaaattcgcatagtcaactatgtcaaatttttcgattgaaattctcttgtttctgactctcctccttcttctgattggtgttcaagtgtgtatgattctgttgttgttgtgtttttttcaagcattgctgtgttgttttcaagcattgccacattttcttgatatggtgttgttgtggttgtgatttttgggattgcagcaggtgttgtgttgttgttctgttggttgacgcatatttgatatggtggtgaaatctgtttctttgattttcaattgtaagaaaaggagaggctggcatcgttgattatttttatcagtggtattccttctttcgcttggcaatgtatttccagtgttgttcttgtattttcgcaccccaatgaagtaagtagtatctgtaatagctcttcatacttgcaatcttttagtatgaattctccactagcctcatatttgacataattacgttcttcttcccattgtccattgctctttatcagaactggtatagattccataacgtgtcatttttcataatatttcatttatgtgatcttttttccaattaaaacaacagtaaaataacactataaaataatgcataaaaatcgttttctggtgttcttttttattatctggttaatccccctaattagcaatgaattcatgtttataagccaaaaacaactttagaacaaccttgatttttgtaatgtacattattaatcgtttctcagaaatgatctatatgaatgttttttttttcttttttaaatggcatgtataattaaacaatttcagattatactatttttaattttttaaatttccagatctaaatttgggtgttttttttttattatttcaaaattaaaatactgtgggtttaggtatgtttacctcttttgtttcctttgaatctactttaaatgttgttgttgggtcttaattagtcgtggaactaatttttcctcttcgtcgaattttatgagtgtttttttggtgtttctattattccggtgttactctgtccgcctccaacgagaaatgagacactgtttgtcccttgttactgttcacagtataaaagaaaaaataatgggcctggacattataaaggaaaaaaaatgggcctggacaggaaaaaagctgtgtggcaatatttttgtaaagatagataaaattgtcagtatttttataaattttccaaaatttagcacttttttcccttttcaaagtgaaatcaccttttttttatgaaaaatggataaacacatcgattattgattttcagttttctgaaattaaaaaagaaaaatgttatcacatcacacacttacctacgtgagattatggtgaaggactatactaacttattcagtcatccaatctaacatgtctaaacttccattaaaaagaaatctaacatatctacattagattgaaaaaagggtcgaattctatatttttatcaagttggatatttataaaacttacataatgatgggccactaacaaaaaatacactgacaataatagcctaacaaagattggactattttcagcctactagagaagcccattgtagttccgccacagcaaataagacgatgtgaagtgaactatatgtaggtggatatatatatggaaaacttacaaaaatattataaaatggttaaaaatttacaaacatgacatgaatttttttatatatatatactaggtgaatgtacgtgccgagccacgtattgctagttttatttaagattttagtctttttaaaattttgaatgtat

SEQ ID NO: 23489 - DNA, 4593 bp, Cannabis sativa
aaatatagtttgatatattccagtaataatttaatcttttatcttatcttgtcagttagcaataacatgaactcattgctcactttaatttgacagacttgagaatctgagattgaaatgatttatgcttagattgtttagaatccaatttatttatttttagacaccgtagttagtatgagagggtataattgtcattgtattgagatagttatttagtggagaatagggtagtataaataggtaagtaaaaaaagaatagataagtagaatagaatgggtatgcaaagtattgagtgaaatctctgcatcaatggagagcttttgctctccaccattgtacgagactttgtctcatgtgttactatgtttcctacacttcagtaatagcttcccacaatatctactactccattgatactttctattgattgctactgttcctagctactggtttgagtatttagcagcaggttatcaatacaatgacaattgtaccctctcctactaaccactgtgtctatcaaaatagcaagattattagattgggacaaaatattgatattcactttgtgttgaaacaacatcctatactacttcaggccgagggcatcctgtaatcatcacatcatcatcatcatcatcatcatggattcaggtaagtaaattttgtaccaaatcatgcttttcatttttagaaatgcaagaaagagataagcaccccacaacatgaaacaaacattatttggaggcttctaaggaaagagactagaaatttttaaagggaggagattttgagcattctataatgtaagagtttctagttcagtgatctgatttgatggacttagtcataatttatcagctaaagattcaattcagtgtaggagttgaaaagtggaattgtgaagtgagattttatatttgagtaagcattattaattatgacctatttcaatttgtgttggtggagaaagttttgattttgattttcttttttctttattgtgtcggtgtggaagtactttttgaggttaaatctaagaaaatagctttcaaatatatctcaatttacccctcacatgatgatgtttctatatacaatatagatctcatctagaatgctatgagagcaacttattatatggtttttttaagtgattataataatgccagccttgtctttgtctgtggaaacaatagaatcttaaatgtgggattctctggggtcttgaaactatattaacaatacaatacatgtccttttctcttgtaatcttataaagaaaaagatgatttttaactttatctttaaccaacaacccatcaaaaaatttgtggaatatcaattattttcttccattccaagacattgctagaaaagaatgataaaattacataaaagaaaaactcaaatctaaatttgttaaataaaacctacacaagatgatcaaaataatcggactaagacgggtcaggcttgtgcataggactcactcagtgtcaaaaacattaaaaatactacataatcttaaaacaaggctaactttttcataacaaagcttaattcaaactcaaaaacatgacaacctaaaaacgataaaaatggttgtttgcaacgtggaagagagctcaaggaatggaaggggtagatagtcggggagacagaaccattggtgtcggtgattgttcaagaagagcctctcactctctcccatttggccaatggtataaagtgaaagaccaaactctcacaatactcacaacaatggctgcaacctcaccatcttatgtcaccccttctatccctctcccccatttccaccacgccatgtgcatcctcaccattttaataccccacttggtcacaagcccacgttactaggcccggtaataactccttaacctcaatctaatataaacacctatatgttcattctattttcccatgtgggatttttttttatatttcacttttcttttaagttgaagaatgagttgttacaaatcaatattacttagtatttatattagagaactaaagatgtagtttgattggaggtaatgaaatagaatgtaataaaatgaaataatttttttttgtttggtgttgcattttaaagtaaattcatcctacactttcccacacatagacagtattccacattaatctgttgtcacttcatttcttttatccagttgagaacttctttgattcttaaagtctgtgtaagaatcagtttgaccacaccatgaactagccttgtctgaccctcaattagcaagctgtttgaatcttgagccactaaaccaagaccatggcttcgtcctccatcaaacagagcaacgttcacattaaccttgatactattaacctttggtggaatccaatactcactccaatggtccaaaattaaagaaaaataaccaatgactaaaccaaataaatttctactctaattaactcaaccagaaaagtaaatcattagaaaaatacttttataaacaattttttatgtcaatatatagtattgaaaaaaaaaagcatttttagagcatctcatgaagtgaggtgtaatacctaaaaatgtaaaaataaaataactaaacttatttggtacaccttttacctttttatattgtattagaatattttaatattatttagtataaaatatatatttgatattgacttatattatattatagttcgtataaaattatattatctttaccgattctgacccaaatcaatctgagtctataggatctaagtccgaatctaaattcaagacttgagttgggattcggggtccgaagccgggtgctcggcacaatagatatcctttaatatttttctatatttgatatgaaaaatgttagaaaaaaccagtaatttctaacattaggacccggcgataactcattaatctcacactttatttatacactcattaatttatttatacactcattaatgtatattactcccacgatgtgggataaaatataggtgcaaaatcattatttacaccaaagtgtagtacctggtagtttttgccattaaactttctcaaaaaatgattgtttgcaacatggactatattgagttcaggtgcaattagcaggtgataacttttacgatgtgggataacttttttctttacttttcacttagatatatacagagagagttgagaatgagttgtttgagttgtataaaaaaaataagactttctctattgttttattacttggtaatactagtgaagaaaattcttaacaaaatcttcctaattaatctaaaaagctatctaaccttttgacaatacaaaaaacagaaagatctccaacaacaaaagcttccaagttaatctaaattttgttcaaatacaaaataatggttgtatgtgcaacctatatgagactatgagagtagtaggagcaggaccaagcttctattcttaatctaaaatataaacaacaccaaccttctaacaaaaaggtgttgatacatagagagaaaacccacacaaagcaaagagccaaattagaaaatatataaagacatttagctagctacaaggtggtaccatgtttttgagccttttattacaatgtcaaaccataaaagccaaaataaacaacaatcaaaatagaagcatatgaagcaagcattttggtccggtacgaaaaagtatagggtcgtgtgggacagggcgattttgggctaagatgagtcaggcctgcgcttaggactcacttcgccaaaggccacataatcatagaacaaataccccacataatcatagttaactctttcctaataagcttaattcaaacacgacacaaaaagatgtaggcttaagtaatcaaacgcgacacaacacaaccaaaaactgacaaaaatggttgtttgcaacgcggaagagagctcagggaatggaaggagtaaatagtaacaaaaaaccgacaaaaatggttgtttgcaacgtggaagagagctcagggaatagaggaggtgaaatagccgacaaagcagaaccattgttgctggtgattgtttaagaagagcctctcactctctcccatttggccaatggtataaagtgaaagaccaacccctcacaacaatggctgcagcctcatcaccatattatgtcaccccttctctccctctctccccatttcctcgccatatgcattctcaccattttaatgccccacttggtcacaagcccacgttactaggcccggcaataactcactaacctcaacctattataaacacctatatgttcactctatttcatcaccatgtgggatattttctatctttactttacacttgagagaaagagaatgagttgtagttgacttggttaaaaaaaaaggagcttttcttatcaaaacaaggaaagattatctctgttgttacaaatcactattacttgtactatgcaactaaacattatatatttttagttaagttttcggtagacctattatttttggtagcggtgtccattggattacatccaatgtttttaggcccatccaaatttgatccaattatatattggatgttagatt

SEQ ID NO: 23490 - DNA, 2150 bp, Cannabis sativa
ttaaagtaacaatccaataggattaatttgctacattttcaaaaaataaaatggatgttttaacttcttctctttcttcttctaaatagtgtggaactgtacattttaaaaggaaacttataaaataaaaattatatttatacagaaaaattatacaacgttaaaatatgaattattttttttctaaaacatgatgtttgttggatattattttagactttgtattacgtaaaaattattgtttgaaatctttattttgttaaatgataaatcaaattctatattttttagaacatagtacaaaataatacttgagtttaatttttttgccaaaatagaacatatattaataatttaatttgaaagtgttaatcaggaaattattttcgtcgaaaattgagttcagagtattattttatttaattttaaaaaatataatttatcatttaataaaatagacgatacaattgacaacttttgcgaaacacaatgtgtaaaataatatctaacctaaaatatatacgattttgttattttacaatataggtgtttataaaatactcaatccaattcaatttacaaagtgcgaaaatctgtagttgcgcggattggattagtttggaaaatctaaaatttgcacttgtcaaaaatattaaatgttgattgacatgtaaaagtaatcgattcaattaaatttacatatatgtatgtagatttaaatatatatatatagatttgatatttatttgtaaaaaataataatttagaatctaatatatatgatataattatattttaaaatttagtagataatattatattcttggaaaatataattaaaaaaattatgtatttctttatacaatttttttttttttttttgaattcgttattttttgttttaatttgcagttaaaaatataaaattataataatttattttattttattattagttattagttgtaaattagtttgaatttgagttattatataaattaaatttgatctaaaatatgcacatttaatgcagattagttattttataaacaaaataatgctaatttaattgaataaacaccctctcgacaattataatgtgggaaaggatgggtcgaggatcataacagttgagatgtcatgttttatattatatttatgaatttaatgtttggtcccattttcagaagcaaatgggtcaacccttattaattattaattagacaattatgtaaccaaaatataattaagaacattaatattaataatatgatgaagttctacaattattgttctagtacgcaaatggttatgaacttataatcatatctttacatttgctctatgatcctctttaatttttttttttttttgtggtaaataaatttattttttttacttgagaattgatgcatagtcaaagtatgcgaccatataactaagatagacctcacaaagtcactaaggttaatttagtggtaaaagagaaataaaaaaaaaaaagagcataagttcaaacccaaaatttttaattaattaattaattataatactattagactacactaaataaaaaagataacctcaccatttcaagtgagtggcagtggcacactcttttagggagttttatagtcattgaagcacaaatagtagtggcgctgatgattggatacttttgcttgggcttcctattctctctattgagtctaattgtttgacataaatctctatatattctaagtgtctttctctagtctttgtaatgaattaggctctttagtagaggatattgctagtttattctttaatttccttgatgcttccttaattagtttatattcgttgttcagctaataagattcttcataaattagttgtatatatatttgtttaagtggatggtgaactagtgtactcttatcacgtatttaaatccaatttttattaatgacgggtttaattttagaaagaaaagaaagtgtgtggtagactcttttagcaaataatgttttgctctagttaattttgtttgtagaaaaagagctctctcaattttggaaagctgacaaaataacaaataatgttcggaatgcaactaaagtcccacattggttaagaatataacaagtgctcaagtgaagttcaat

SEQ ID NO: 23491 - DNA, 1947 bp, Cannabis sativa
atcaaataaaacaatacaaacaattatttgacatgactaaagtgaagtagctaaacttatgaaaggaaagaacaaaccaagtaaccaaacctgaaaacactcagcaccaatatagcgttggagcatttgaataacagaagcacctttattataactgattgcatcaaatatttcctgaatttgagacacgtgcggaacttccacctgaataatgaaaagggtgcacacttcaatatgattatgatatgtagttgaagcaggcatatgtgtaagagtatctattcacagtgcagacaaaattacctcaatggggtgagattcttcaagcccatcaagtctaagaccctcaatagattcattgagaaattgagtccatacattccattccgggaacaagctatcatttgctacatagcttacctaaatgaccccataagagttatttgtcacattgaaatcagttgtcaatttgatagtgggaaaattcaacaatatttaatttcaaaaagatatgtaaagaccgaagaacagctaagggcatcttctatcgagcatctagacttttaaatgaaagtgttagctgtatattagatgtatttcgttgtctaattttctttccatgaaaattagcaaattcttttcacctcacataatagtctaaagttcataaatataagtgagaacgtacccatgttgcaaacccttcattcagccacaaatgagtccaccattccatcgttacaagattgccaaaccactgatgcgcgagctcatgagctaccacagttgcaacctttcaaaacagccaaatattcaatttttagagtactaatagcaaaagcattgatgttcagaaaattcacattattaccctttgcttgtttgcagctgctgaatgttgatcatcataaagcaaagctgtttcacgatatgtaaccaaaccataattctccattgccccaaaagcaaagtcaggtatggcaaccatatccaatttaggcaaaggatatggtctaccaaaatatctgtaaatatgttaatatgttaaccaaagaggaaaacaatcaaaatcaaaagcacctataaacggaaatatatatactcagttttgagaaagagaatctactctttgaatagctcaagtgtcttgacagcaacatgtaatgcaaattttccttggtttgtctttcctacttgacagtatactcgaactttgacccctgtgattgagatgtaatataacactatcaatgactgttcaaaggtttgttcacaaaacaatagctataatagaaattggaataaatcaacacgagaaaaaaaaataggaaaattgaaattatgattttggtgagatagattttcaaagaataaaattgtcttttatttaaatataataaaaagaatccattcttgagtggatgagggaagtagtattctcattctcattctttttcctcttacacactaactttaccctatttttcttcgtaacagttatttacttcatttttttgctgaaattatttacttggctaaatgagaatagatgttgagtattataactttaccatcataggtatgatcttccacataatcaagcaagccaataacaaaggccaccaaatatgtagacataattggtgattcttgatatgataatgtcttgatttgtcctttaacattttcttcaatgattggcatgtttgaaagggctactaggtcggatggaacatccaatgtgatcttaaacgtagcctgtaactccccaagaaaatataacacaacaaaatataacaataatcattatatatatacatatttgttgatttagatagagataaatagagaccttgcaagctggttcatcccaacaaggaaagcactgtcttgcatcagctggttcaaattgtgtgactgccatattcttcttctcaccattatgct

SEQ ID NO: 23492 - DNA, 2335 bp, Cannabis sativa
gtgtaattttttgggtcaaaataatgttattttgaagcataaaagatcaaatttccctttgtattttttatgtcagactaatttgccagcttcacaaacatttattttaggaaaatttatataaaacacttccaattataattctattcacattgttactgatttttttttcttttcatttttatagacagttgtttttgtatagtgaaaacaacattatatttactacgtttccacaacatcaaaacaatgttttttaagaacaaacaaaaaaacaacgattctgtaaatttgtaaaatgtatttttggtatttttacgtatagatgaaacaattatcccgggatcccttcaatattggttgggctttagattcagtttaggcccagccccctaatgctttatcaatatttgggctttgtcgatttataaggcccaaatccactaggtagctttcaaatgttctaacacgacatcgttttactacttccgagtttccctccctaacttccctttctctttctttgttttttttttttattgcagagaaacaaaaaaaggaaacaaatggcgaaaaatcttagccgaatcttttcatcaatctcgaatctatcgactccaaaattgatttcctctttcgccagattcgatccttcgaacccggcgagtagactcatctgctcctaagctcaaaaaagcgtcaataatgaaaagaaagacctggaaaacaacgggaagaacgaagtcgatgaagatagtgatgaagaggatgatggagatgaagttgacctgaacacggagactggtgagatcggtggccccagaggacccgaaccaacccgatatggagactgggagaaaaatggtcggtgctatgatttttgaactttaattttttcttttatttcaaaaattcctctacattaaaatgtgtgctcctatgaaaattcatgcaattgattctcagttgccattttctttggctctatcgaagtggttttttatttttatttttatttttcttgaaaaatgggttaagatagacggtaatttcttctgtttttacttgtttatttatttattattattattttaatggtattgatatttattgatagttttttactataaggattccttattttttttttacgtaatattacattgtatagtgatactaagccataggattttggtaatggatatttgctgtaattttataaaaagaaaatattatatgattatattaaagtttaatatgatataaaaatatgacatataacttaatccaataccacttaaatactaattaataacacaattatttttaaatacccgaattaaaaacatttctaaaattagcacctgtatggtgttttgtattggttaatgaaaattttcttttctttgataaaaaaaaaaataataaaattatccagggaaataaaattcaatttaggaaaaaaaaattattttggaaatttttatttaaacttctctgtaccattgttttcacttttgttaagtgtataaataaatgactttcaattcacttcatttcaaatcccttaccaccaaatatttttctgtaatttcctctgtttttcttgaaagcattatcatggaggaattgggttcagccttgtccttttatcaagaggtgagtcattttcatttcttctttttctatatttgatcattaaagctgtcacttttcttatttatatcttttgttttctcttctgggtattgttttttttttttttctgtacgaaatattttgagttctttccactgttattagaattcttaacttttgcaattatatatgtattttgcaattatttgaggtatatgatagtcttgtcaaatattattattaattaatattgtttggtgtagtagtaaattatcaaaacttcatacaattttaatattgttctaacttgaaactactaactaatgtaaaatggaattaaattaaaagttattttatcataattatgtaatattttatattttatcatagcgaattctataatttttatgaaaattttgaagtccactgaatattaaaatgagcgtgattattagagtatctccaattagagtattaaataggaggtgtattgttattttttagtacttttcaataaaaaaaattcttcaatagtgtgtatgtaactatgtattatgtctaatttggccgacaataaatattattttttaattatacttttatcattattcattaataatatattttatttataatattgctattagtaattttttaaatatttaatttattatttgttattaatgatattttattt

SEQ ID NO: 23493 - DNA, 6448 bp, Cannabis sativa
atctcttttttattcaaaaaaaaataattaaattcgaattcagaattcataaaattttaatctgtttgattgtattgataaaattttatcaaaaaaattcaaatttaaggtactatatatgtatgaatttaaaatacaagatactaaataagtattattcaaaatacagggtatctaacttttatcacaggatagtaaggctctttattaaaagaatatttgaaagtaatcgatacaatatattttttatttaaatctaataaaaattttatatgtgacatgtttaagataataaaaaaatttgtatttacaaaattaaaaataaaattataattttataaatattaatacttatggcattaaaaataaatattaattttttttagccatttattatcattattttttgataactaccaaaataataataataataatagaatcccaaactaaaaacctttcttcaacctctattaactacattacagagtagatagagtacagagtgagtgtagctcttcttctccaaccgccgagaccgtgaaaagtcccagaggattacaccttgcatctgtaagaacccttaatgacaaccccttgtgcttgcattctactctcaagaatgaatttttatcacactcaaatctctttctctctaaaaatccacccaaaatccaccctttttcccattattatttcattcaatttcctttctgttggttttgtttgcagcttttcatttttcattttactattttttaataaattatcttcttcttcttctgtttggttgagaaaattcatcagagctatcaattttgttttgtttttttacatgggtatgtcaaattctctattgctttccagtattttgtttaataaactttggtgagtttgatgagagctttacagcttgtttaatggcaccaaagactcttcttttttgctcccaaattcccaattttgcaatgttttatcttttgtttggaaaatgaaatcttcaggttaattgtttgtgatattctcttgggtttgaaattcaatgctgctattataatgtgccctcccaaaaatgtaattttttctttgtttttgttcttgaacacaatttctaatgacctaaattttaatttgattgctaattcttttgatgggtttttttgttaataggttttgttgttcttggagtatgtattgtgttagtagtagtttcagttgtggttgtgcttttagtgagtcatctaaaggaagagactttagaaatttacagttttgtacatatgggtacttgggaaataggttgaagatgaggagcaaacaaatgagtttattatgtgggtttgttatgaaaatcccaattgaagagaagaagaaagttgggaaatcttcaaaagaggttataagggttcttaagtctacaacagacccaaattcagctttttcatatttcatggatgttgcggggttaccttatgttgttcacaccactgaaacatgtaattacatgcttgaagttttgatgattcataagagggtgaaggatatgactgttgttttcgattttatgcagaagaacaaggtttatcgaactttgaacacttatcttgttgttttcaaaggtctttacttaaagggtggaattcaacaagcaccaattgcgcttgagaagatgagaaaggcggggttcgttttgaatgcttattcgtatgatgggttgatctatttgcttcttcaatcggggttttgtaaagaggctttggagatttataacaaaatggtgatgaaagggatgaagccggggttgaagatttattcagcgcttatggtagcgttcggaaagagaagggatactcaaactgtaatgtgtttgttagaagagatggaacatttgggattgaggcctaatatgtatacatttaacatatgcattagagctcttggaagagctgggaaaattgatgaggcttttggtgtattgaagaaaatggatgaagagggatgcgagcctaatgttattacttataccgttctcattgatgctctgtgtaatgcaggaaaactcgatgaagcaaaggcgttgtttgtaaagatgaaagctagcagtcataaacccgatcttataacttacactactttgttggacaagttaagtgactgtggagaattggaaactctgatagaaatttgggatgaaatggaagctgatggttttgctcccgacgcagttactttcaacgttcttattgatgctttatgcaaagcgggaaatgttgacaaagcatttgatacttttggtgtgatgaaggagagagggatctcacctagtcctcatagttacaatgccttgatcgggggactgttaagggcgagtagactggatgaggctctaaaacttttcggtagtatggaatctatgggtgtcatgactactgcttatacatacaccattttcattgactattatggtaagtctggtgattctgttaaagctattgagacatttgagcagatgaaaagtaaaggcattgttccgaatattgtggcttgtaatgcttctttatatagtcttgctgaaacaaagagagttgaagaagcaaaagaattttttgatgggatcaaacttagtgggctttctcctgattcagttacttacaacataatgatgcaatgctatggtaaggtagggagagttgatgaagccattgagttacattccgagatggtgaaacaacggtgtgagcctaatttattcgtagctaattctttaatcgatatgcttatcaagaacgaccgagtagaggaagcatggcaaatgttttacggattgagagatatgaaactcgttccttcggttgatatcttcaacacattacttgttggtttaatgaaagaaggccaagtccacaaattgattgaaatatttgtgaatatggtagagcacggttgtcccccgaacacaaatcgcctttgtaacaatgttgaggtgccagtttccttggcttgtaaaatcaataaactcttcgaattacatgaagagatgtgtagtaggggaagcaagcctaacactgtcacgtataatatactcatttcaagtttagtgaaattcaataatgttgatgaggctatcgatttctactacgatcatgttggtcatgatttcaccccgtcctcttgtacttacggtccactaattgatggactttttaagtcgggaagacatgaagaagcaatgcttttcttcaaggagatgggaagatatggatgcaaaccgagttgtgcaactttcaatattcttatgaacgggtttgggaagaccggagatgtggaaactgttcgtaggttgtttaaaagaatggttaaagaaggaataagacccgacttgaagagttacacgattcttgtgaattctctgtgtgtttcggggaaatttgatgatgctttgtattactttgaggaactaaagcagactggacttagtcttaattcggtttgttatgagctattgattgaagcacttggaagatcaggaagaatagaagaagctttgtgtctgtataatgaaatgcagagcagaggaatttttcctgatctttgtacatacaacaaactaatactcaatcttgggattgcgggaatggtggatgaagcagtgagtgtttatgaagaacttcaggtgaagggtcttaaacccgatgttttcacctacaatgctctaattcgagcttacagcacgtctgggaatccagaccatgcctatgctgtttacaagaaaatgatagttagtggctgcgacccgaatgtgagaacgtttgctcaacttactaatctctaaactgtctttgaggtataaatccttggaataacttcaattaaaagttgatattttgttttttgaagagctttgtttgactgtttgtagatacactttcctttatgaaatgtcttatttcaatttcggtttgtaccattttcagaccgaagagatatgaccaaatccatgattatccagatacttgtatccttggtatgaaatgttggccacttttctaaactaattctatagtaacatattatttctctattaatttattaaactattgcagatttctattatcaacaacaagtcttgtgaatcgatcgcacagagttggacaatgtttgagaagaatctgattttgagtactgaaatgttagttgttgttgataacacagctacaacaaaagtttaataaaaggtttccggcagccatgggaacaggaactccaaaacagtcttgttgtgtatgcagaaccaaatgagaagcttgtgggataggtaatatcaacactggtaatcttaacagatcatatctattgctgagatttgttttcggaaacagatagatgtggtgttggttctgtttataaaatacgatttttttcatgtgaattcgacagtatttggaataatttacagatgaatccgaagagactgagactaagaggagtagctcaaagaatcagacatgtggtttgctctgctccaacaaagatgaatctgtattatgtatggaaggttcgtatttccatcgtccgtgggtgttgtagtaaattctaatgatgtttaactttgtgattcttactccaacaagactcgagacacctcaatattcttaaggtgcgtttggaagtaattgtgtaattacattgtattttaaaatattatgggtgtttagatatattgtggtaattacttatgaatttcggatttcttatttggcaaaataataaaaagtttttagtaattatatattgtaattacacccgattctcatgaggggcatgagaattacttattctccatctgcaaaaccaattaattagtaagaaacaacatgtcatgtcaatgcttgaatcaattgaacacaacacattacataacttagcaaacaaactcatgttatgttatgttattgtggagttggttttcaagtaactagttactagtggttgtgttctttttagttttatgataaagatgatttgttatcatgttatgtttttaattgctttgcttacctagtattaagaattaactgttagtatggccattgttgatatctccatgttaagagtgtaaagatgcaatgttctatgccattggctaaaatcttctttcacatttcagttccatggtgaattccattatgctctctcaacttcattattatccttaatgggcataattccaagaaagatgggacaagtaatttcaatttgacacccacattttctcttcaagtaaataagatcattttggtatgctttcggtgaagccacgccatcaaggtcaatctcatccggatgagcctcgggataactggagacggccacaccaaagtagtcaccatacctagctcagatatgttgcacctgaaaattatcgtttggctaagcttctgcttatcttttattcgaacatttttcattctaaaagctaaaaaagagcttataaaaggtgaaacagttctcgaaagtcatgtaatgtcgcagaaagaggggtcgtgggcaaccgttctctacatcctctcgaagaggttgtccactccttcctcggtcttcggtgggaagaagttagaataagaaaacaacaccttgtcattgttaatattcttctcgatgattaagtagatatcattgaatgataacacattgttatataaatttttatttttagattttattttgaatttttagtagttataaataggaaatatgtatttttattaatacaatacattaaatacaaattgagaaaactatctcctatttggggatttttttcattgttaccttacaaacaaatttttattgtatttatatggtggttgaattatatttcattaagaattatatataaaaaaaataattataaacttatccatacttacctcaaattatgacaataaggaggatgatcatttcattccatgtatgtataattattagtccaaatataagatttgatataaacaagtaatcctaataaattacccaataaattctatattctttggctacgagatcttgtgggttgtttcagttttggaggaatggcgggatcaacatgattaatctgattggctaaattaatagtgtattagtcggatgggacttttagtattgggaggaacacaattattgggacctaccgtcatgagatcttgaggaggatttgagggggtagttcttctagttagaaagaatcatgttaattggtcaaaatgaaatgaacttaaaaaagactcgatgaaaatactaaagataacttttaatctatagtaataaagatttgatttttgtttttacttttctccttagttgttcacttatattcacaattatcagattcaatgtatatatatatatatactaggtgaagtacgtgccgagccacgtattgctagtt

SEQ ID NO: 23494 - DNA, 1439 bp, Cannabis sativa
ggtgaatcgggtcggatcttcgacccgtctacctcgagctcgttatcgttgattctaggcaagaaaataagggttaaagaattgggtaagggttttcgggtatccaaacccgagaaccgaaccgcaaaggttcgggtctttaatcgggttcggggtattgagttggtgaaaccgtggtaatctgtggatctacacatagttgttgtccgtacaggaatgtgaatactgaagactgagttaatgggaatgtgattccttttatatatatatggagagagagggttacggtgggtgacagcacacggtaatgtgtgatgacgtggagaggggaatgcgattgccgccaagattgaattaaggtgaatttgacacgtgcgtaggaagctggtttcgatttgtggtgactagcctcttgttttttgatttttgttttaagatgtttcgtggtatgtggatattttttttgttttgtttttttcagtaaaaacattaaaaataaaaaacaatatatatattttttatttgacaataatattttatttataaatagttatttgtcgttttgtttttttgtttttgggagaagaagaaaatggaagtactaaaaatggacggacgatagtgaaggtgaggttaattaggtgatacgatataacagctcatatttgggaatgtgtgagaaataagtaataatattattaattaattaactaatgtgtaatgtgaaaatttagtgccaaaaaaatttaatgttattactgagcaattgtaggcttgggttcgcggtgcgggtggtgtatttttaactattttttttttaaattaatttgtatatgtagtttttttaatttttcaaattgtactcgtactgttaaacttaaaaattttacaaatttcactgtaaaaaatggtacggtgcaatgcgatttttacagtttgaactaccactaaataattaaactatcataaatataataaaatttgagcaacacttgttaaaaatactataagctttataataaatatgaaaaaaattataagtttaaacaatacaataattagtgggttttagactgggccttcacatattaaatctaaataaatataaaaattagtatatttataatatgcggtgcgatgcggtttgaaccgcatattaataatttaaaatcacaaaccgcgccatacttcgcggtttagaaaaaaatataaaccgcgaccgcactgtaaagaattttaaattgtattttcctatagtgcgggcggtttgataaacatccattcaattgtgctcaacattttttagaagtaatattttatgattagttagcgatatatttaaaaattattatgttaaattatttaaaatttaatacttaattatacaaatatcaatattgtaatgttcccgcttcaagcctccattgggtccttacacc

SEQ ID NO: 23495 - DNA, 5087 bp, Cannabis sativa
ttttttgaataaaaaagcatggtttttggttagtgtgaagtgaaaaacgatatgccatttctacagaaacgacctactatttttactggtgtagacccagaaaaatggcttgccgattttactgaaatggcctgccgtttttcaggaagtttccctgattagtttattttctcgtgtttccttgatatttaggacatttccatgctttttatcgatagaaaaactcttacttttgagtgttaatccccaaaaaggttttagaaagttgtttacctgttttacgtgattgtggtatagggcttccattcaggttaatagacacacttgaattcagtacaaggtaagattagcatagaatgtatatgtatatgtgtatgtatgttatctacatattgttaaatgattcatatgctaccaacactagtatagtagcaatactgagtgcatgtagtgtagcacatgatgtttaagagtacaatctgatgttaccaatactagtacaattatatacgtagtgcatgtgataaaacacttagtggtatacgggatacggttcaaaccctaccagcactagtattgaagtggtacgtagtgcatgtggtacatggattataccttcgttatgaatgttgttaaacatctattaagccttgtggataggtgtatgggcacctaaatacaagttgataatatattgtatgttttatgcttttcttatggagtctgtcgactcacatttattgctagcatgtgtaggtaaaggaaaggctaagagtgagcagttttgagtccagagctcggggaagattatacatgtctggacaaaaggacttggagagtttggtgtcaggacgacttgggttcattttgttgtcgctgtgtgacatgtttattaagtttaatttggttatataagtttaaatatgggatcttgacccttttgtaaaagtgtatatagttatgattataaaagtataaggttttcaaatgtttaaatttgtcgcaattttttgtaaaacccttttattagtaatggtgtgcactataagttaaaaattaatgtagcatgcctaatcattaaggtgttacaagttgaggattcgaaaagaggatattgctaaaactgcttttcataccagatatgggcactatgagtttcttgtaatgtccttcagcttactaatacattagtagcattcatggacttgatgaatcaagtgtttaaggactttttcgataactttgcaattgtgtttatcgatgaaattctagtttatttgaatcgaaagaagctcatgagcaacacctccatatggtattacatcgtcaccgagaacacaagttttacacaaagtttaagaagtgtgcattttggttatcccaagtaagtttcttagcacatgttgtaagtaaggatgggattctagtatatccgaaaaagaccgaagtctttcgggattggccacgacctaagacaataactgaagtttttttttatgaataagaatttttattgccctaaacaaccttttacatctctgatctttacattttgctaacatatctacacttacaaacaaatatttttacaacatcaaaccatcaaaatccatttcttgtcttcttccttggccttcttaggcagtagccccttgattcttagcttgctcatttgctaagttttttgcatggtagtattgatagccacactttttgattccatagcacttcatttctagacttccatatgtgatacacaacacttgcaagcactgttttcaccatacttttccttgttgcagagaaccgcttcgctctttggcacgcttgtagcatctgtttaattcttgttgctggtgtgttccattgcataaaattatttatctcttgtagacacttcctgctatactcgcacttgaagaacaagttctcaatggattcaggatcttcttttccacacaataaacatgttgaatccatattatgattgtacttgttgattctttcttttgtgttcagcctttaaagcacttgccaaactataaacctatgtttaggaataataagtctatcccagaccagattacaccaaagaaatttctcatattcagagaataacatttggtacccctgctagatcttatacttctgcatcacaaacccattcgtgtccattttttgcttaatcttattcttgagagcaactgaagttagaaatttcttaggattggctaggtactatatgagatttgtggaaggttttgccaagattgctactcctttgactgagataacccgaaaaaattgtaagtttgtgtggatagataaatgtgaaacagcttccaggagttcaagaagagatagattactgcatcagttcttagcctgccaatcaatgacgagaagtttatgatatactatgatgcctcaaggcaaggcttaggttgcgtgttaatgcaatcaggaagggttgttgcctatgcctttaggaaatggaaagattttgaacaacgctatcccactcatgatctataactagcagtacttgtttttaccctgaaagtttggtgtcactacttatatggtgaaaagtgtgagatttatactgatcataaaagtttaaaatacattttcactcaaaaggatctgacaatgaggcaacaacaaaggttagagttagtcaaggactatgactatcaaatcctctgccatcttggtaaggtaaacatggcggcagatgcgcttagtatgaaaggtccagggcagatctatgaattgaagcaaatctctccaagatttgctgaagatgtgactagggccgagattgattttgtggtctagaaattggcaaatattacgctacaatctgatttactagaaaggataatgatttgctaacagagtgatcccaaattgatgaacttagaaagaaagttaatactgttatataagggatttcactataactctgagtggactattgaggtataagaatagagtttgtgtctcgatagatgatgaaatcaggatggaaatccttgatgagttatatacaactccatattccctacacttgggaacaacgaagatgtatcttgatgccaagacactgtattggttgccaggaatgaagagtgatattattgaatacatcttgaagtgtttagcctgtcagcaagtgaaagcttaacaccagctaataggtttacttcagcctttgagaataccttagtggaagggggaagacataaccatggactctgtagtagagttacctaggactactgggttacatgattccatatgggtgatggtggatagattcaccaagtcaacgcacttttttacttgtgtaggtgacccatagggcagaccagtatgtcgatttgtacattaaggagatattaagactccatggtgctatgaagtcaattgtttctgaccgtgacactaaattcacttccaagtttttggaaaatttgtagaaagctataggaattaaattgagacttagtacaaccttttatccttacacagattgtcagtctaagaaaaattttcagatactgaaagacattttgcaagcatgtgtgatagactttcagggatcctagagtaaattcctgccattgattgagtttaaatataataacaactatcagattaccatcggcatggcaccttacgagatgctatatggtaggaaatgtctatcgcctatctactaggatgaacctggtgagagacgttatcttgaacctgaacttgtccaaatggccagtgaagccatttagaagattctatctcgtatgctcattttacaaagtagacagaaaagctacaccgatctaaagcgtagggatattgaattttgagtgatagactctgtatttctccgagtatcactcatgaaagaggtgcatagatttgggtagaaaaaaaaaattgagcgctaaatttttatatgtccttttgagatactaaagcgattaggctaggtaagctattggttagctctaccacctgcattgttcgaagtgcataatatctttcatatctctatgttgaggaagtacgtgtcagatctgacacatattttgagttacgatgatgttttgctccaaacaaacttaacttatgaggaacagtctgtccaagttctagactaaaaggagaaagtactccaaaataaaacaatctctctagttaaagtactgtggaaataaagtaaagttgagcaagcgactttagaattagagtcgcagatgcgggagctgtatcccaaattattcaggtaaattttgaggacgaaattccaataaggaggggattgttgtaacatcttcatcagtataatggtaaaaagttagggtgtatatatattattggttaatcaggtaatgagtgggattatgatcctactaatttatttcagaataaatttttgttttattataagtagttaaacaagcgttatttaataattataccgatttatatagcatgtgccaatataatatgagttgtttgtgatttaataatatttttaggtttggcgactttggagactcaatcggggaccaaaaaaatatcattacaggtttatttagtgactttgataagaatattatgataagttgatagtataagtactggggtaattaaaagtatttgggatttgatttagtgccctagatgtagagatttcttaatggataagaaattgtaaaataacttttattaatacagttttattattattattattattattattatatgattattattataattaatacaagttttaacttattagtatatacattaaaattaaatcaaaaatagtatagaaacaaaaccctcccctgctctctgtgaaatgaaaccctcatctccctcaatctattttctttgattttccacttgaaaccttatgatttaagacccagtagtaaatggatagtaaaccatcaaagagggaaagctcaagataaggattggttttatttatgttgaaaaagtttttctttatatgtttactttgtgatttagattagttatgggaattgtgacttcatgaaact

SEQ ID NO: 23496 - DNA, 6821 bp, Cannabis sativa
agtattgtgattaaaaacacatttaagtgatcacaacaaattatgatttttgtaactaatacctcaaaaaaacttatttacaatatctgtatgtaaaactcctgtatatgaatacgataaatgctcaaaccaatgcatatcattctttacaaacatactttggccaaacaaacaaaagatctacttttaaaagttccaataatcatcttcacaagtaaatcaattttaagaaattttaggaaccaaaaatttcatttctagctcttcgtaaatagtacaccaaagatgcaatacctacaacataacacacttttttgaattttctaagcttttctcaggatatccgaatcagttgctaaagagatttagatttagcattccatttgagccattttctcacctcctgcaagcatctcttactaactgtacattttaaaaaacaaatgagcaacaatttctttttccaaaccacacattgttatctttattttcggatggacggtgacattttcaaagtataattggttcgcataactctaagccctagcctttgcgcatacaaaacctcgttcagatcggagatgggccttagcccatctaaactccaaaagccttgcctccaaaaatgaggcccctctgcttccaaaagcccgttaagccttccaagaggcgaaataaatgaagccctttggacaactgttgggacatccagaaaggaagtctaagaggtgcctccagaagcgtcttgaagggtgacgtggctgccttctaacacttggtcctaccaaatcagatcatattccctatgttagaacataatagtgcgtgcaccaccaaatggagtatttcttctttgtctaatgacacctatataacattcttgtctactgtagcagcacttgcacgtgacagttgtctagaccgtgtgggcccatttgtacaaaaaccttcgcccacgagctagaatctttcagtgggcctcaaaggcatgtattccatgtgtttaccctatagtgggcctattttgcacaaaaactctaaataggtcatgggtatgcccgaatttaagcctatagaatcccctttatcctttcatgcaagggggacaaaagaactttcaggttctctctaagctttcttcttgtaagaaaaaattaaggggaaaacattataacaagagttagagttttttaaattataagatctatttgtaatacatcaagccttcataggccaatacattaactcgtggcatagagttcattaatacccaaactacataaaaaatcaccatctcttttattttaatagccatttaatttcttaagctcttatttaatttaattttaaaaatctcgataaaaattttagtactttcattaagagctataaaaaaaattaaagctacctcggatctgcaaaaatggtggctaccaggaagaccgtcgtcgattaaactcctcttctaggtcaggatgtcgtcatggacgatgctaattcgttccttccatggcacgccaagccgagcaatttgagggacagagaagtgttcgaagttgaagactgaacggctgaaacaacccagcgtcgggaacaatttattgagaaaaaactaaaaaatgaggaataggagagagaagacgacgatgaaatcaaagatggatcttacttatcatgagcaagaccccaagataatttgagtatctagtgagttagttgaaactcaaagaaagctactagaacaagaagctttctcatgatgaatggagaaaatgatggcacggctgcatgccaaactcgacgatacaaatgaagactctaaagaagatactcaagaggagcctattaacagggaaaaaagagcaaatcccactaatgttggaacctcagctcctataaaggataatgggaaagcaaaggtaggtgagcctcatcctaagactatcccattaaaccctacaaataacgtgaacacaaccaaccagcccttgcagacaaagaagagaaaattactactctgacaaaactggttcggaatcagagtggagaaatttctaacttggaagatgaagatctataaccatgtgtcaagcggatcatcgacgctcaacttttagaaaatttcaagatgccacagatggagttacacgatggaaggacggaccccagggcccacttgtctaaataaaatcgtctcatggaattggcaagagttagtgatgatgccaaatgcctttatcttttattaatgttaaccaagtccgctaaggattaatggaagacactatctcccgaattgatttacgggtggaaggagttacagtctacctttcagaaataatttatcacaactaaggattatgacatggaagtcagatccctaattaatctcaaacagtaactaggcgaaagcctaaagaatttcatccaacgaatgatggaaatagtgaccaaaaataaagttagcgatgacatgaagcttgtggtcctctagttcagattaactgcaagctcctttttatctaatttaatgtctagggcctaatggatcatctatttggaggattcttatatgcaagcaattagagccgctccatgtaccagcaccacctgatgcaacacccatttaccactcccagagtctacgaatccgctgcctccaaatatgcactgacacatactaatttctctggatttggggcggcacaaactagatgcaatatcgctcttaaaaaatcaacgtataagatggaggctctgaaatcaaatgttagccattccaaaaacaagaggggtggaaagaggcagaaccagattgaggctccaaagaaaggaaggaaagaatatgaacaaaaatactctgagtacaccaatctgatcgataattgggagaatatctacagggaaacctgtaatatggtccagaagcctctaagaatgttctaaagtagaaagtagaaaaaaagactaaaataagaaatgtgagtacacaccaccaacaaatgtgactagctacctgaaggatgagatagagacattaattagagtcagacaccttggccaatggatccaaactccgatcatttatcccgaatagtgtatagctgacggatagcttgtcattttgagacaacaaggagttgtatattttccccagagagtgggtctcccttaagctcatggaagacaatttttggctttacttgctttgtctcacacgctgtgatagaaatcctagctctgggaccaaaaaatcattatcctctagggttagctccaccacctattgacagccatgtcgccactatctctggaggctcacacctcgctggaaatactcgcattccaaaaagagatatttgaacaagttggaacatgaaggggaagtttgtgctttagtacaatcaccggcctagcacatgcgtgaccctttggttattgaagcacaaattcaaataaaagagtttccagaacgttagtagacaatggtagttgtgttaatattttttttcaaatttgctttccaagaaattggattgactgaagcagctctttcaccttgtctaatacaactacaaggatttaatggagattccttgatgttgaatggaaaaatctagcttccagtcaccttgaagggggaacataatgcaaatgccttcaagcactgcatgtttatagtagtggattatcccactgattacaacgcaacactaggacgccctgtgctagttgattttggggcagtcacttccatctgacacttatgcatgaagtttttatgtgataatggaagtgtgggagtagtgtgataatggcatactttctctagcttttcctgaatctctagcaaggtgggggactccaatgataacctaaagatgttcgtccaatggtggaggcattaactggtttttagtgttatctgtttgggcggccctttgttcttggtcagtcttgacatatttttgtaagtgcgagttatttttcctaatgaagaatcgtatttcttgcttcaagttgttgcattcatttatgttgtgggtgtagtccgcatgaaaatgacagaacttgtagtatcccttttgctcatgtccttcttcataggagaaggttttctatatggcaccatggactgggtggttgcaaagattgtctctatttcttctgttaggatagtaagtgcagtgaactttgaggcattctcttgaggatgttgttcggagttgccactgaacctgcttttctttccattaccctgcatgttgccattgtttgacctctttccaccttggtcgaactgctgtgattttgtaaattttggtctagctggatggatgtattggctgcagtggtgtgttgttgagttttcttttgtctaactatatccacaagccaaactacttctttgagccttaaaaatccatctgctcggtccaagaattctgacattgacccacaattagtcttttttatgtctttcccagaggtttaatacctcctagggttacggctagccttccttcctccgtaagtcctttaacctttgtagcttcagtcatgaacctactaatataggtagcacgagtttccttatcacgtttttcttcctcatgaggaaccttcaccgacatccaagaggaatatttttgctcatgtatatccatggtggattgatctttgccaagcagaccacatgccaccaagtttggctcataaagaagaaaacttgaagctctcatcccaaatggcgattttactaaaatttgatggtgagtcgacacaactttagaaggagtgggttttaacatcaattttgtcaaataaaaaatgaatattaagataaaaataagcacaagtaaactcattgtaagataaataataaaaatggattatagggcatacaaggcttttaaaaggttgtgtgggcacaagggtgaagacctgctgtctagaaaaattgatccttatattccttcttttttggaagatcaacaataatcctgcgatcccctgtaaaagtttcgagataaaagaagccttcagaataattttttctcgctggacttgccttgagggtatacatacaagtaatcttgtatggctcgggacctttccaacccatcatgtggtataaagacctcaaagaggccaaaatcctataaccattggagtttagttgtaatggagcgatctagacataattgcagtagtccttaaaatagctcttaaaaggaaggatagccccaacatgtatgtactcaatactccaagccccaattttcattgaaccacttgtactacactcaaaattattagtgaggcggctaggtggaaaaaaactcttctcgtccttttcagttgattggaaaataaagccattaccttattcaatatcgtattttgtaaaaaaaaaaaaggccaacatatggggccattaaagtcacttttgattcaataagttcagcctcaaactgcactaaggaattttggaaaattttggtttgcgagcttttggtggggccatcatttggaaatctaaagcacttgacgaaaaagcaatgttaacaggaggtaagataatgaggctgcaggttctcgcaggaaggaatgtttaccctcaataatttcacctatgaatcgtctaaatcgagcagaaatatttaacttgtttaattcttcagtctgatcacgaattttttcatcatttttctcaagttttgttttagtgattactaagttaggattgaaaggcagggcaaaagaaaactgaatttcgtgatctaaacattcttggttttcaaaattagagttaaatagattcattttccctcttttcaaaagaagaaaaatgtaccaaaaagttctatgtaatttgaaaatataaaaatctaaagtcataaaagatcctaaaaatcgctaaaaaaaaccctaaactagcccaatcaagataaaaatcctatttaaaataaaatagaacaacacatatcataagatttaaactaaagtaggaagagcacatacctggtttggagtttgatgatgaactggatgaagtttttcctagagctcgacgaatccaaggctcagggataaaacatttcttgagttttgaaaaaatagttgcagagatgcggagaaaaaagcaaagagacagtgagggcatgcaaaggggatgtagtcaattttgtgcttattgtacttgggtaatagtagtaaaaatagtggtaaaaaataatattgataggtgttttcaagcaatattgtaagcaccgtacgactaaaagagatgtttaaccaatggtgattaacttacgagtcaattaaaaagatgtgcatttattaccaaaaccatgattagctctttatcgagaagacaaaatttagggtacacaaaggacaagtggaaacagagatttaattttttttcaaaacataaaaaagaaaatactttttaggggacaattattatgctcatattttgagtactaaatatggacataacacgtgtcatataagtctaaaaattgaaggaaataataaatgaaaagattgaatgaatattctgcctcaggtatatatataagctgcgatttaaaagatgtgatgaccttccgggatactattagtactatggcttacgaggatgacatgattacaagttaaatcctcgtgactagaccgaggtaaaggaggcaagtgaatagtaagaaagaatgagtaaaatgaaaatggtagataacgggttctctcagagtatgcaactcattgacctacatacccgtgagtatgttgaaagactaaggaaaataagcataata

SEQ ID NO: 23497 - DNA, 2916 bp, Cannabis sativa
agagagagagagagagatgagtgtgtggtgtatgtgttggggttttaaatgctaggggtaatttgggaacaattaggaatagttattgtggatattatcccatggaataaatggtaaaatattgaaccgtatataagaacatggctactccacttattaccaattgcttttaagatgaaaccccacgattctcaacaataatagcataatttttaaatagaggggtttgtagggtgtttattttgggtccatacatatctattaagcatgtaaccagaatttctcaatgaaaattcaattaataggacaacccgaacaaacaaacaaaattgaacgtacgtactgaacaaattaacatacatgtgacctgttcacaatttttcttcttttaaagagagtttataatcattttatgtacttatatatgaaccacatattttttattgaaatctatacagttattcacaaatttcattatgactaaaaagtggtcaagtggtgtatgtacaaatttatgttatttatacatgtgtgatcaggacttgacaataatattaatgaatccgaacttttataatatatagtttccaataataaccacacattttatcaaaaaaaaaaaacattatattttttgagattaatttgaaagagatcgaaagttatatgcgaatagagccaaaacatctatatattaatatatatatatacatgcatgtaaatatagaaatttatgcatgtaaatatgtaacatgcatgtaaatatgtaatcattgtattgaaatgaaatatagaaattcatcattgaaaaatgggatcaattagcaaagcagcaacagaatctttggtgacttttccaacatgtgtaaaaccatcaccatttttgtagagaagatccataaccctagaaaaattaagaacacgaagtaatatgggtgaagctaatttagttggcttcaaaaactcttcatttatttctttccatgcattaattataagcttattgagttcatcataggcttcttcttcacaaacaccatgttgcatcatatacgattcaatggcagaatcttcatcatatttgtctttctcaaactgtacaagtaaaaaaaattattatctctatgttaataattaattaaaaattagttaattaactatatgtaatataataataaattttatttgtacaatactattgtctaagctacaattaataagtctttgggacaaatatatttgtatgatttagaaataccccaacaaaagaaaaaattaccaaagatacaaccttcttaaatttagtaattttgaaaaatatttgatgaaaaagatgatggtatgtgttggaatgtagaagtatggttgagaaaataagatatggcgaggtgtatggtaagtacagtcggcccaagcaatttgagggtcttgggcgaaaaattaaaattaagtcttttattaaaaaaattatcaatcaatacttcataaatttatgttttttttttttaaaagattacttcataaattctaaattagataaaaaatttaaaatctgtattgagaccacaagattttatcaggtttgtttttgtttttgttttttgtaagtgcttagtgcatattttttcttatgaatatttactatgtaactgaacattatcaaaaaaaaatatatatttattatattatatacttatatataaaggaatgataaaagattggctttttaatataggaggctttgtgcaacagcccaagttgtgatcatatgcttgggtcaatcctgatggtaagatatatgacgattatatctaatcacatctcgggttttgtaatattaaatttggcacttttgactctattttctttgtattacgatcgaatactagtgaggtacatcgtaagataaggttcaatctcgaaaccagttgacaataaatatgaaataactcgtacatattacatatacactacaaaaaaatgttaattttagtaatcattttttagtcacaacaaaatttttttgtgattaatgctgtacttatagctatacacacttactgggctcagattatgattctacctaagaaattgctcaaggatattgaggccatttgcagatcatacttatggaagggtactcacacaatgatgggggctggtttggtggcatgggagcatgtatgcacatccaaaagtgctggtggacttggccttagagacattcaaaaatggaacacagcagctatggcaaggtatgtatgggatatagctaacaagaaagactgtctgtttgtcaaatggattcataatgtatacttgaaagataggtgctggtgggattatgaagcccccaccgactgcagctggttttggaaaaaattgattggagttagagatcaggtgaaggctaagatggatcagacaaccttccttatgcagaaattcagcatttcaagcatctatcaagtgttgtttaataggccagagaagaaggattggtgcaaacatgtgtgggatagacttgttattcccaaacacaagtttatcctatggctagtcttgtgggacagattgaaaacaaaagatagaataagtaaatatgacacacaggtggacttaacttgcttactttgtgggaaggaaaatgaatcaatacaacatctcttcttccagtgtgaatatagtaacaaatgccttacagaatggaagacacactgcaatggggcactaaagctactgaattgcagcagctgctgcatcttatcaacaaaatgaaaggaatatcagcaacaaggaggagcatgcttttaactatgttggctaccttggtataccagatctggggtgcacgcaatgatgtgctatggaaccaaaaacagtggcaaatcgcagcaatagtgaatcgggtacagc

SEQ ID NO: 23498 - DNA, 3857 bp, Cannabis sativa
ctggttcacagcatagagaaattgaattccaggttggggattttgttttctatgtccccgatgaggggaatccaaagatttggaaagaagggaaagtcgagtcccaaatttgtcaatccatttgaggttttggaaagggttggtgaggtagcctatcgactaaccttacccccctgctgtatctagagttcacaatgggttacatctcgatgctttggaagtatgtatcttatacgagtcatattctgagctatgaggatattgaactttagacagatctgtcatatgaagaacaaccggttcatatcctgaattcaaatgtgaaagtgttgcagaacaagactattctactagttaaaatgttgtggaggaacatcaacattgaaaggcgatttggggattaaattcgtagatgcgaaagttgtatctcgagatgttcaggtattttgtacgagtgttttattttaatttaataaaaaagtttttaatcaaaccatacatttcttcaattaataaattagttagaaataagtttgtaaaaacatgacgtctctatgggtcaaggcgttacatatttcgtgagcctctcttttctatctttcatcttcttctctctctcattttcttacacacaggcctatttttaaaatgtcgttaggatgtaaaaaaagtttttgtggttaatacaattttctggttcataaaaaacatataatataagaagagtgtcaattaaaaaaataaaaataaaaaatgttccaattttttttggactctaaagttgaaaaatgggttgtaaacacttctcatttctcaagatatataatgtgtattagtttaattattatattttatacccaaaagacacggtttctttctctctccctttaaatatataattacgttattattatatattatcttagattagagataggtacgttttaattatttgtttgtgtagaatccacattatatattttatttaattgtataaagtatagtttactattaataatctatccgatagtacaattttaataatatgaagcacctctatcttagttgtcattttccttaaatacaaataaaacttcttagagatgggagaaagtcttttattcaaattaattctcattttctttattcaattttagttattctataacaaaatcacatccacacaatacatgtggagaagtgctatataaactagctaggaagttgtaagttataagcatagagagatttgtgtgagtttttcttttgatcaatttgtaataagaatcatattaattaatgatgagttctattaatgataatactattactactactcaacaattatctttaggttatgtcaatttgtacaagcatatgttaagctatgcaagttccatggctctaaaatctgctgtggagttaggcataccggacataatattcaacaaaggcaaagcccaaaccatttctcttcatgagttggtctccgcccttcaaatccctccatcgaggactaactttcttcgtcgtgtgatgcgtgtactagtacactctggcatcttcacaaacgaaaaaggatacaacgacgacaaagaagaagaagaagtatatggcctcacaccttcttctaaattacttcttaccaatggtaataacagtgaggtcccaagcgtgggcccctttgttctttcagttcttgagccagttactgtaactgcatttcatttaattggaaactggctcaagaatgaagatagcccagccacgccatttcatttagctaatgatgatgggttgggcttgtatgagtattggggtaagaatactgacggatttggtgatcgtttgaatgaaggaatggaaagtgattccgggactttgaaatttgttctcaagaatttcaagtctacttttgagggaataactacattggtagatgttggagggaataccggaacgatgtgtaagatgctcattgaagcatttcctcacttgaaatgctcagtgtttgatctaccttatgtggttgaagccaattcacataataatactgaaaacttgaagtttattgaaggtgacatgtttcaaacaattcctgaagctgatgcaattctattcaaggtgtgtgtatattttgatctcatttaattaatgttattatatatatatatacataaagtgttataatagctaatgttttctttttatagcttgttttatgtggttgtagtgatgatgaatccataaagattttgaagaattgtagagaagctatttcaagaaatgggaaaggaaaggttctgataatagaaaataatgtaataaatagtgaaaaagatgagcttctagaattggaagctaagctctactttgatatgttactactggctagtgtgacagggagagaaagaagcaaaaaagattgggaaaatatcttcttccaagctggtttcactcactatgaaattacacctatgtttggtttagaggcactaattgaagtttttccttaattaatgatagattaatcaaacaaaatgagtacttgtgtgatatgattacgattgtgactataattgagcacaataaaatgatcaatatgtaaattatgtttcaacaagggaaataaaatttactttttttaatggtcttgaatgagaatatattcatttagggctcgtttggtatgccgtattatattgtattgtgttagattagattggattagattgtattgtattagtattatttaataccataccatgtttgatattgacttgtattaatagattatgtaaagttataatatattttcaataaactccacccgattaccgactaccagtcgagtcccgagtctaggtctcaagtccacgtctgggttccgagtctgggtctaggtctcggagctcaagcccagttttgattttattttcgaaacccggttccagttctagtttcgggacgtgagtctggttttggttccgagactcggatccaattccagttctgggatctaggtctggttctggtttcaggactcgagtttagttccaatttcgaaactcatgtttgggttcgagtcctgagtccagatttgagtctaggtcccaagttcaggtctagatctgggtctaagtccgggtctgatcctgggtttgggtctggatccagtctcgggtcctggtcctaggtctgggtttgggtctaaatttggggtcctgggttctggtcgttgtttaggttagaaatttggattgacccctgatcctttgtaaatattattatacacaagctaatacagattatttatgttttaaataatacaacttacattgtattaaaaattttagtcctaataattaatacattatattgttttatccaaatataaccttatttattattttatcaaatacgattcttatacgacctaccaaacaagtcgttttaataatactatatatatatatatgagaatttcttgagtacaaatattttgctacatgtctcactatactcaagtaaaacatttttatgttaagatccaaaataggagttttctatatgttaatgtttggtccactgccaagcatgcagtggccggcactattaaaaatcttacattagtcacaataaaatttagattaaaattgaaaaaaatattacaattaattaattgtaaattattatttctatgttattattatatattaaaaggttcgtgatcaaatatattaatcacaaaaatcataatttgatgtgattaaatgtatttttattcattatatttgttgtgactaaaactagaccagtaacaatttatatttaagcatgcatctagttttaattga

SEQ ID NO: 23499 - DNA, 2390 bp, Cannabis sativa
  modified_base (653)..(665): a, c, t, g, unknown or other
tagatggtataaaatttatactaattttggttaaaaataagtgaatgttatatttgacttaaattttgccattctactttaatgtattatgagtaaaattaattttattttccataaaaatatgtaaagcattaaacattaattgaatgtgtataaaaacctattaaacaaataaatagaatgtaaaaagtttcgattatatttttttgataaaagttattcattatattaacgagtgataaaaaataaataaaaagccataattattgtagtgtaaaatttggtttatgctatatttaatattaaatttagcacaatttttagcatgtgctaaatttagaccacattagagcatcttcaatagagatctacaaatgtgatgtattgttattttttaaaatattttgctaaaatttaactccaatagtaatgtaaaatatatgttaaatttggcataagttcataagttaaaactcatgctaaatttagctcaaaagatactatgagttaaattttaacttacaataaatatcactttttttaattatatttttgacactcattagtcattaatactattcattattgaaaaatatttttatatttataagatgttttttttttgaataaatatttataagatattaaaatannnnnnnnnnnnntaattattttgtatatttttaatatattaatgctagtgcattagagtacaactatcaaaattggattaaatataattttatgatatattttagatcaaatttaatctaaaatatatatcatttattaaaaatagtcttataaactactattcaagtttaattttataaatatgaactaagaaatatatatacactatcttcataacactctattactgattttcttattgatgctcttacatgaaatgaataaacattcataatttctttggaaaagggaaagagaacaaattaaaacgttaagaaaaaaaaaagtagagagattcaaaaaaggcaatttaataccttgaataaaagaagaggcaatttagttaagcacacgaatggggaagaaaattagtgagaaggatgaagcgaggaggcaaatacacgtaaaagaagggaatccatgatggtgtgatgatgatgattatgataccaaaatagccaaaagaccaaactttgtcttccctatgtagctgaaatcattacccaccgcatctctattccatacccttggttttgacaaacctaatcattatcattattcattacaacaatacaacttctctcttctcttaactttaccctctctatatcatcattacattacccttcttccttttcctctcttaactcaaattaccaccttcacctccctctctttctctctctactcattacattgttaggtttagtttaccaaaccccaccctaactacattttacttatttgtttttagtatatattaaaaattaagtgtcgaattcaacttcaactaaaaaaattagatacatccaaattagtaacataattagattaaattagattggatgataattttttaaatcttattattaattaaattgaatcaggtctacttggatttaaagaaaaaaattaattagatgggattaaatgtttatttttaaattaaatatatgtagtattttatttcaaaattatttaataataagtcaagtgaatggtatttaatttctagacattattaatattgaaccattttttctaataaaaagtaaaaatttatttattaatttagattaaaatttattttattttactacttcaaatatataatatatgcttttgatgtgtttgtgaaatttgagggcaaagtgaagtaaatggactacatctttatcaagatgatctctttatattttaaaaaaatctctaaattaattaataataaatcatatcgataattaaatatagagaaatgttaaaaggtactactagtgcctaatacctttctcggtgtcatactgttattaatgtaattaagtatcaggtttcatataatttaaaaaaataacttttaaagaatattgcttaccaatcatacgacgctatctacagaagatattgaggactattagtgtccaataacaatacttttaaatatatgtatatgcataaataatttatattaaaatattatacatactatttagtaagtattttcaatttaggcaatttttaatgacacactaaaaaactatataataatttttcctacaaaatgcttcatattttaatagtaatctacagtgtcccactaataatagtagacactataaattatgatatattttttaaggctaattaggatttttgctctctgaactttgacatgtaccaaattatgccccctgaacttt

SEQ ID NO: 23500 - DNA, 7443 bp, Cannabis sativa
  modified_base (907)..(916): a, c, t, g, unknown or other
cactctttccctacacgacgctcttccgatctataaataattttggcatttataggattaaaattggaaaatatgacatttgtgaaataataaataaatagttaaaaaatggccaaattataattagtggggcctatctacatggtcggccactatagggtttaattggcttttattttatcattttttattccatataatttaatcataacattgagtgaaatagtataaaaagaaaaggatggtttcattatccaactaatgcttataacctagtttatattctgtcagacaactatagttttgagaactccatttcttctttttcttctatttttgaaatctcatatagtgttcttcataaatattcgagtcattagtgagtgagtgcatgcccacccataggaagtctagtactcaatcatagtgtgtaagactatgaagaatccaaacacctgaaggagaatctagctcagatcttgataatacctgtgacagaaaggaacaagagttagagatttgagaaggaggagtcattatattccgctgcaatcaatgtaagattaaactttatatgtttttaaattctatttttttagaaatttatatttaggatgttaataaacatagttgttagtaaatctagatcctggtaaaatacattccaacaactagcctcaaagccatggtaatgatttactttcaagaaatatagatttaaaacaatgtatgtgtgatatggatgtgattcatgttaatctgtgtgtttattgatgattgcttgatgtttacgaaattttgatataaaataattagattcttcatctagaattattttatttggatagcatggaaaaatttacgcaattcattttttgtagaacttaattttgattttatttgaatnnnnnnnnnntttttgaaaatttgaaaaaaaaaaggaaggggcatcaccccatgtgtgcggacaccacgtgacactcgggtgtcacacgtgttcagacaacatctgtctgagaaaacacgcacatggggttgtctgaaacccattccgcacgtggagaggctgcttgcagcctcctgcatagaggttcctcggctttgtcccttcccccatgcgcgcgtggatggtatgcactgcataccatccgcaccaaatgcaattttttcatgctttttcatggaattaatttcgattgttttgtgtaattttgtatgtagattaataccatctacacaaaatgcaattttttcatgctttttgttatacccgaaattcggctaacacatcagaggaaaacatgtgtcaagctgggaaaaatacgaacccaggcacgtaattataattacatttgaggtggaataactagttaaaggtataattgacagagtatatttacaactcggttgattgaatagtcttatacgagataaagatatacaaaatgttgtcgtgtgcatcaacgagaaaccatgtaacttcaagtgtacaagacgaggcactaacctcgttatgtggaggagatataatgactatgaaggcgctcaacgtataatatccagtatgcaaactaaatataacagatgggtaaaccaaagcaagtgatagcgaggtgtccatctctccataggaagacatgctcgtggtaccttcactagtaaactctagacatctttcaaggagattcacagcttcgcggagccagttttctcagatagaagctgatattcaaatgatattggcttttgaagttcacctcatcaccaagaacaacgattgtcagattgagcattatgtcttcagagcagaagcgacgagatcaacattatcaacctcggaaagatatgggaaaagctccacctcgctatcaaggtcatttgtaccgagaacctgtcgagacatcccagaacgttatgatttataacgtgtttaatacacgattatcttgacccagtaaaagcggactaatcacatctttgtgatattcaaatattaaccgcgtttattttatgggatatgttatcaaaccccactattttaggggataattgtcgtaaagaggcaagttagactgaaaaagggacaaaaaattcataagagaaaaggccctagaacaatatcggaaatctaataagattaactcgtggactacgtagaattctaactgcaaaaccacgtaaaaaccttcaagttcattcttttctttttatttctctactgtttttatttttttgtgtaaacttatcatcgttaaggcaaatatctggttaacaaaaatatgcgttaacatttttgtgctttcattgagaaccttcgtgaaaagctcagaaaaaatcatccttacataaaaaaataatagtcctctctatggctgacaaacgaagaaaataatcctcacgaagaaaccactcatcgtcctggaaaagatccaagagtccccaaggatcctttgacttatcatttgaacggtccacaagctccgggaaaaccaagaatcttggaaccaaacttgaagggcctagaatgaacgatggcagttcaattccaaatctagttgatggggattgagcctatgatctgacaaagtatataccaatcgttgaattataaaaccgccatctcaggcgtcgattggaagaggcaaaccagcataatgcttaattagagtgtgacgcacctgtagccagggcgacacaagggaatagctcccaaaatcaacctgaccctagagagagagaattataaggctaacctcgagactcgcaaaccagggggcaggaggcagcctgaaggaatccccagaacgcttaggaaagacaacctggggaaactgggggataccttgaaggcgagatgccatatgatcaaccatgaacctgggaaccaaaaattcctcaaagaaataagggaaatctggggacacaaccaggggtacatgggtcatcgttaagagatcgccaatgttctttcaaaacttataggaaaggagatcccacaaatctcaatagagggaacgagatgaatcatacccaagagagaagagcggggcgtgaagaggcgagtattaccacgagacacacaataacccatagtcgatcaatgcgaggaggagagaatactcgttacaacaatgatcaagaaggcaaaatacggtctatgggtggaacgagatccgccagccgtcatggccaatcgaacctacaagaacgcttgaaccagaaaaaaattgatcttcgccaacaacttggtccaaaacaaggggattcgatccatttgcgagtagacgagttggagaataagttcaagaagcatcgagtcagggagctaggaaaacaatcgggatgtgattttgtggaggaatttgagtcagaagcttattggtcaaagaggaaagacgactgtaagaggtcgtccaaagataagaaataaaagaaacacgataaataggtacccatttatactatctataccgagcttaatgaaactccggagagtatctaccttgtgtatgaacagaagggcgctttcgataaaccaaagcccatgaaacccccgagacataaaagggacccaaccagaagatgtgaatagcatggagatattgggcatacaacagaagaatgttgccagttgaaagatgagatagaaggcctcatagcgcgaggacacttccagcaatatggaaaggggcatgacaatgtccatgactagcccgatctacccagtaacctaagcgactagggaccataaccttcccctgtaggaggaacggataccctggttatctctggaggataacatattgcaaagaaataacgatgatgccccaaaagaaggatactataggaggtcacccagcattaattagacaaggggcaatcagtccggtcaagcaattatgtaaaagtattgtgatgtaatcaaataccgactcgcaatggctgtcgtataaagctgtgacacagtaaagccagtcgtcaaccaatggcagtttgaggagaacaacaaataactaggatcagttcacttggagctgtggggatatgacagggattgaccctgaatacacctcggtgggaatatgttaaggattgaccctaaatattaaaaccaactttatcaaaagtaggtgcttatggaagattgataaaataagcaattgaactgggaaagttcttacgaggttaaatcgataataaattaatgattgtaaattgcatcactgatgtaatattttgaaattcagtcgtgaataaagtaatcatttatttcgacaagtaattataaagcataaccctttaaaattacttgaggggcatatatatatgattaaccggagtttatctagaaatacatgatataatgcaaacccacggcattaaaaataaaaatttcttttttttaaaaggttttcgaccaaacatttttgacgagaaaggggttgaactgttataacttcctgaccaaaactttttgacgagagatgggtcaaattgttataacttcctgatcaaacctttctgacgagaaagggatcaaacaaatataatttttttattaaaaacctatctgacaggaaataaaaatcaaaagttataaatgagatataactcataactcgcgtgtgaagttgaatactaacggctcacactaaaggaaagtattaaacgaggcatcaaggtgtcttgataaaagtacttaaacctaacacatgggtagaggatctaactattcatgtaagcaataagaatatatatacaaagtgacaaggtcattgaaaatatattcgagtttgcttgaaacagattatagttgattattgcgaggcaaaatcaatgactgctcacaaattgagtgcatggcagatgataaaccgcttgcgcataaactaggctattaactacttaatgtcaaagggttatacgcgcaatggaaacccctaaaatactttgtgtatgatcaaaatatggttgtttaaattgtgaataaaacacaagcaaacaagcacatgtcaatgttcaaacataaaagtacaaggcattaaaagataaaataaaaagcagagttggacatccaactacgcaaatttgtctttacaaaaagttccacaaagggcaaaccattgtcttggctctaaagccatttccacacacacaaaaaaaaggaaagagataaataaaaaccaagcctacattgtacgagacttggatggatcttcttctaccactgcctcggcctcttcctcctccttcctggccttttcacaataagccaaaatctccttctcatcctcctccatgaagcttgtgtccatgttgggatttgccatcaagactcgataaatggtacaaaaggccaaccttgatgcattgctttttggtttcagcctctttcccttcgagctcagcctctttccccgcgagcaccttcttaagttcattgcattcatcagtcttgatctttgtggccttcttggcttcttcaaggcttttcttcgacctctcagcttcctgtttgagatgggtgatttcctgctgagcgttgttccattgtttaatcacaaccatacgtttggctagttacttttggatctcgctctccatgtatttgagctgctctaggattcgccgatgggaagaaaaagagaggaaagaagtctggtatattacaatgaaaggaatataagaaatagagggaaaaataaagaagaaatacatgaactaacacagtaaacttaccatgagggcatgatgcaagctcctccaaatcatttcctccagattcccacgattgattagatcccaatcgtgggggaggagagccttgagttggcgccagcaggcagtcccaaacacctgggaaaactctaaactagtcttccccgctgcggtagacaatgtttttatggcctggcttgaggaagcagagaaataggtcgtgttaggaggaggtgctttggtattaggattgatcgaaggagaagtttgttcacgagtctcagtgtcagagacctcgaggtcgataggctcagatattttcttctttttgtgggcagtggttttctttggccttttagaaggttccacctcggtatctgtaggagcctcttagttggttcccctcttcttctctttccgttcaatgacatcctcgaaatgcatatttgagagacaagataaaatattaaaattatttaaaggcaaatgaaagggaagtgtggattgtaattttccacttaagaaatttaccaaaatcactagaaggtgagctatcactaaaagaggtggtagaaggacagtagtatccgctaaaatccctacaacctgtaatcttgaatatatcaaatggctcacttggttctaaatcccaggtcgtgtctatatgacttaccctatctgtcatggtgccatattgctcggctataccgtaatacgactcgttacagctaatctttggaatctagggtagcaattgtcaaacctatgagcaattcagtctacgagaagggaatttcaaatataaaaattaaggcggctatctcggaaggtaactaatgtgttacgctcggccctaagtattgtgggttaccaaccacattgattaccttgggatgctccttaactagcttcccgagggacagtgttttggaggtattatgcccgagccacgcgatcccaagccttatccccctctggaacgggaacctgctgcgaagatgaatacttgggaaatttttaattgcaggtaaactccttgtcagtaaagaggtccacagatctcagattggcctcgtttagaaggaagtcgcatgacctaaggctgtggggaagattcagtaggagcttgtgtcggttgaccatctcgggagtagggacgggtctcttcgagagggctgtaaaaaacaaaaccttagtcaaaaaacttagaatgaaaagacatggattaatctaaccgagcctgatgaaagtaaaaataacttacgaattatgcaaaaggtggttgtgccgattggggagaggccagttgtcgaaaagaagttatctttaaaatatattttgtttggaagtccacaataattttaggctcgctagagtgagtaccaagataatgaaaaccccttgcggcattcttcctcactggaacaaccttaatagagtacagatactcaatttccacaggcgtagggcattcccacttcagaattttatacaagaccttcaaactggcaaggattctataggagatgagagttagttggaatggggcaagtccgaggtggtttacgtaatccttaacataatcacaaaggggaattatggcccctgccctgatgtgttcaagggtataggcccctatactagtcgagctgctgttggaatttaatttaccaggatcttagatctacacacaagtatgtttattaacatcctaaataagaactt

SEQ ID NO: 23501 - DNA, 3174 bp, Cannabis sativa
ttagtacatacatgactatcttgaaaagtacaagtaaattaaatagaactaaaacgaattcaaatgtattaatggttattgccattgacatgaacaactgttacttacccaagctgacaataagcaaaatgccacagcagcaagctgatagagctcatttgtctggttcaaaatgaattaagatcaatcatagggtccatctagaaagacagacaagctttctctggtaactgtttaaaacttacttgagaggataactgcatcatcagtttcaaaaagcagggtacaaatgaccaggacaacagagatgccactgtgagataaattgataataccagcatcctgaagtcaaataatagataaagtgtgttcaatagttctcatctagggtgctactgcttttcatatatatagataaacagataatatatatacacacacacatattaaaatatatatatatatataaattttaatgtaagaactatttgataaaggaagcagatacaacatatgttgctctgtttgcttctccaaccagacaaagagatatgctgcagacaggaaaaatagcacctatatggggtgatggactgactttggataaaagagtaatgaaagaaatatatagccttagcctataaataacatgattctaatcgtattccagcaaaatagaaaataaaaaaatatattatggaatatattaaaaaaatagctacaaaaaatgttataaaggtcatgaaagaaataaacacttcaatgtttaaacaacttacagctttcccattgaaatcattccttgcaaaaggccactagtaccacccaaaactgggagcaaagcaaacagtaaaccaacagcacaatcctgaaacactccattattataaatgaatgcaggatgagccaaaaaatcaaaaacatgtataacttgatattaagagccacatacatatgaacaaaatttggagtacatgatacctgaaaaataagtgtccctattgtaacttgaccaggaagagaattgttagtattccgttctaccagaaactttattacctggcaaaagagtgtatgagaagagaaataaggacttgcatccagtaatttgcaggcaagaagtaaagagaaaaggaaaatgcatctacaacacaccacagcagttgatgacattgacaagaaggaaccaacaaaaacaccctcagacaacttcgccccacataactgcaaagttggcagataagtagtaatttagagtcagttttgacaggcaacactcattatggaattacttaacagaagaattgaaacatttaaatactatcagcactataccatagcagttactccacacaagaacataaatgttatgatctgaaggagtcctcctataacagctacaggccccactgcttttagctgcgttaatgagcttttcagatgaaggaaattttcctatattccacttcagctgtgttattttaaaaaatcttaatacaatatactctatacaaacctttgttaaagaaaactccagccccaaagcaaaaagaagaaatacaacaccaaattgggcaacagtttcaacctgcaagaaacagaaacatatgataaatggtaactgaaaacgtggtaccctcaacgccaatcatggagaaaggtgtaccattggttttgggaaagagaaagaaaaggaagcttgtctagaggcgatacactataacacacctgtaccatttcactaatgaatttaagcccccctggtccaatgatagaaccagcaagaagataacccacaataacctttgtccaaaataaaaaagaaaaatctcaagctatggttatggtcaatttatatcaaatatcaattaaaatgtacaagcatgaacgacagtacaagaagattttaaaaacaaaccggttgtcccaaacaagaaaacagaatgccaccaatggcagcagaaactataacaaccaccaaatcggaaattaatctgcaatgatatagataaacaacaaagcatatactttaattagtaaaaatgtgaagaaaaaaaaagtaacctatgtttcaaaggacttatttaacacaattttcttaataggagaaagaaacttcaggccaggctttaaatgtcagttcccataaattatagaagttagctattgaagcatctttgcaatgtaacaacccttgaatgttttcaaaatgaatttttaataataacaaacctaatagcagttcagaaaccattagagttccagaatataggaaagggaaggttgcttctttggccatctcattaacgattgttatagatattgcttaaaatttatcaatcaatctttttagttttcatttttgcttgttataacctcaaaatgatattactttcatttcaaaacagcacaaaaaggtcgaattcccccggctaattccattgaaaaacacataaagacaaacattcaattactcgttccctaaagcatttatgaatgatatttcaagttgtgaacaaagctagaactattaaagaaactatagtcaaatcattaaaaaaaaaacaaactagagttaagaagatacaggaaaatgtacctcaaatctacttgaagaattggaaacttggatttcttgtttgacatgacaaacacattatcctgtcattaaataagtgatgtaagaataaacaaaaacatcgcaagtgctgtcatacctcagaactttcttctacacacctaaacactacttattcacttattacctttttatcaatcaaggttgtcatgtcatcagagtcttcattctccaaagaaaaaacatcttgcagctggaaagatcttgtgccactgaaaagataaatactattacttatggaaaagcagaagtagactcgtacaatttcaccttaaaataaattagtcattagacaaaaataataaaaccaggactgcgattcatattgataaactcccatacttggcttcttgtgtatcatttttcttgcccttctcatgagtgattttggctacagtctccagaacagcctgtaaacataaaattaggaaacaactttaacacagttaaaatgatttccttccttttttttttttttttttttttgtggggggggggggaaaaaaaatttcccccccttaaatttttttaaaaaa

SEQ ID NO: 23502 - DNA, 1349 bp, Cannabis sativa
tcattccaagaagatttgatagcccaacaaagagctagttgtattgcaagaatttttgcctccaaagccgaagaagtagttgtttggagagaataaaaagcccaggtgtcatcgacacagatagtcataactgttgctataacagccacaccaacagcccaagaagcattcgtgtgcaaagaacaatatccacacctcctgcttggaacaacacagcaaacaaggggctttgacgacctctttgaagattcatgaaccatgtaagaaaattcagaaaagagagtttcaactttgatggaaactgagtttagatcagctgatccactcttcaatctaattgaatttctctgttgccaaacttcaatggcgacacaaccgaaataaattaagaccaacatttctagtgttactgggagaattatgcagcaaaaactctaacacctggagcaaagaatggcatccaaacgacaagggaaaggtctagaaaaccagatggctttaacaataacaaaactgctctctttaaagagatgaaggcaattttcttccatgccaccacataagaaacaatattttttcaaaaatactttactcaaactcacatcaatgtttgccatatcagatcactcacatcaatgttatttaatttaccatttaaaatactttattgaaactcacttttttttttcattttacatcaaattcttacattatactaaacattaatttctttattatttgttctctatatcactttaatattatgtaatttaatatatataagtattcatttgttatgcgaaacgaaaacaatcaatgacttaggatttagtttatagtaccaacaaacaagcaacacaatcaaacaaaaaataatatatcaagagatatcaagattcaagtaatgaattaagcattaaaacataaaagaataacactaagtttaaacgagttcgagtcatgtttaatgctctacatctcagttggaactagcagtcggacccagaatttttattatgtgagggcttaattgttattaaaaaaaaataggtctactttatttaatttatttattttcgtgggtttttttttttaattttttgtgctataattatcaaataaaaagaaaaatatttaatttttttaatgtattttttttttttcactgggggctgcagcccccacaccaatgtgagtgtgtccgtccctaggaactagggctgtacaaaaaaaattatagaccgcccaaaccgaatcacccgcccaaaccaaaccgaaaaaatcgattaaaattacaaaccaaaataacccgaaaaaattacaacccgcccaatctgttaattgggcgg

SEQ ID NO: 23503 - DNA, 3300 bp, Cannabis sativa
gtatattctgttaaaccaagaaggttaaaccaaaatgccattagatagacacttttaatatataaatatatgctgttgttttttgtaattataataagtttgttgtgtgtatatatatatatatgtattttattattattatttttttgtaattattttgtattgtataatatataaatgaaaaaacaccatttaaattcctacccaaatcaacacttcactatatataacaaattttaagaaaaagaagccaaatctcctacaaaaataatggattttgggcgaaaatttataattttactgtcacacgaatttttttttataaaaatattgtttttttataaaaacaaccgtaaaacaataaaacagaataattaaaaataacagtaaaacaactaaaagtcctattaagggtgttctttgaagtttttggtataagaagaaaaatacagcaatgttggagatcatgcagcacatttgtgtatgcattagttctatgttttgatttctaaattgagatttctttcttcataagtgaagtaattgtcaagtaacaaaatcacgagtcctatggtacaataagcttgatgttattaattattttggctggttatggaatttgactgtgatctaataatgtaattaggatggataatttattggttatcatgcactattagttgttttaattagaatgtcatgtgaattttttcttgtataattcgagtgctaatagttaaactttgaaatatgtgtgctatgaaagagatatttaagtgtgtgaatatgctcatactcaaactttcttttttttttttttaaaaaaaaacatgacccctaaagattaattaaatattaaacaaaacattttttttatgagcatttcctaattcacactcaaattagttgtgtacttttcaaaaaaccaattcactagatcaataaaagattgaggaacccccaagacctgataatcaagaaaagaaaatcaaagccaacctcccttaacttaaccccattaatccttgaaaaaaaaaacaaagaataagcacaacaaaatggataaaaagaaaaaaaaaaattaagcataaaaaaatgacgaaaagaatagatcctcacacatgccctccatttactgtaaaaaatcttactttaatctcaacaaaatttgtgactaaaaataaaaaaaaaattgtgactaattataaatttgcattcttatgttgtgactaaaaagtctgtgactaaaagtattagtatcaaaaatcacaatttgttgtgactaaatttatttttagtcacaatacttgttgtgactaaaactaaattagtggcaacttgtatcttaatattatctttagtcacataatttgtgactaaaaatcacgtttagttatatttttttttttattataactaaaaagttgtcactttaaaggtggtcttttttttttgtagtaactaactattaactaatgagtgatctagcatagactcctaacatcgtcttacccaagtggatccaagcgacaaacaaagaagacccttaaaattcacgcacaagacatttggagaccaaagttggcaaatgggattaaacttagttaaaaataaagagtgatcatgcagtggaagagatggaagaacaacgaaaaacctaatgtgaagaaatcaacaaagtcccttggttagagcctcattgggaccaaacagtgaataccgaccagactctaattaagcgaaacaaatttgtccttttggaggtggcacactagcctttacagtctctcagtgtgtacattttttttttttgtaataaatatatattttaattacacatatcattattttatattgtttattatcaatcatattgctcaaatttataaatactaaatgtttggatttttataggtaaaatttaaatttcattgtatgtgtaagagcagtctcaataatataactaaaatacttttttagctaaacatattcactattccaaattaaaatccttagcttaagcattacaaaacattttaaagaaagcaattgtaagatttattgaaagaaattagtgagaagtggacaaaatatatatttaacagctaattttaaaagccaatgtaggctgatgttgtaacatacaatttaattgatttgaagaaggatgaataagcatataaaaagattaataacaaagaatgagattaactaagggttgtaatttgggtcagacacgataacacgacttaaaactcgcacgaaataaacgaatttgggtttgccttaaatgaatcgagccatttttcaggctgacataactgactcgtttattaaacggatcatttttggattgagatatacttaacccaaaaataatatgaaaatgacctatgtacgtaagagtatctatacattcttgagtttattatatttattacatgtaaattatatttttttagttaaataagacataaacatactagattatttataaatgtgtcacaacaagattgtaaacatgttaaatttgttataaacgtattaataaattcgtaagttaactaaaattaaatatgattctttatctaaggttaaacagattggtcacgtcaatttatttataaatttgaattttaatttttgacacgattaataaataagttgggtttgaatttgacatttacttataatacttaagtctcaatacgaatcgaacacgacctacaaagacaaattttggctcataagattaattaatcaaccttatttgaaattgtctcaaaaaaaaaaaaaaaccttttttggtccataaaattgcaagggtttatcctatgagaacacacctcaatacctcatgtgaatgtgaatattctcagcaaataaaagtactagtgcattatcactagtgatcaatagtgactacttactgatcattttcagtgaatggtattgcttgtagaatctagttttactttaagggaatcccaataactcattctgaccaaataacaaaattccaatattacccctccataggccataggatactgatattgtatatgtcatatgactcatcatattatatatactcttaacagaggaaatcccaaaaaatgacaagcaaacaacaataatacaatacaacctccattattattttcccaattcagtaccaaaagaaaaaataaataaaaaacagtgcacatattgcagagatttatgttaaaaacactaatagtacctaatactattccaaaggtacaattaattatgggatttcatattaattttaggtag

SEQ ID NO: 23504 - DNA, 2917 bp, Cannabis sativa
gttagttagggtgttacacaatctttggggcaagctttattaatgtccgtgaaatcaatgcacattatccaagtgccattgggtgtacgggttaaaattttgtttgccagccatactagatataataattcccagagaaaatcattcgcaatcagtttatccacctcaccttcactacttctacgcttagaggatctaagggcctccatttttggcgtactagtattgcatcatccttgatgttcaaggcatggaaaattgtgttagggttgattcgtgtcatgtcagaatggctccatggtagcacatcattattttctttgactatatctataatcttcttcttcaccactagatgtaagtttctccccactttgatggtcatagtgggatatgtatcgcagatgttgaccttttttacatcctctagtggtttaattactctttatatacccattctgaggtccaactatcttcaaaatcctcctggatggcttcagcttctgcttgagtatccatttcgagaggaatagttgtttcctcccgaagcatgaacaaagtctagatggaaacattgtagaaactccttgtattgttctaatcacctctggctacaccaacgcacccattgtcatagggaaactttatgcccaagtgtcttatagaagttactgccccaaagtctaccaggattgatagccctagtatggcattgtaagttgtgggaaagtccacctgttcaaaggtatagtgttgaaggtgcaaacattgttttctcctttaagcatgagttagacctggatttttctcataggtatcagagcttccccattaaagccttgtagttgaatggggcaaggtgataagatagtctccgtaagcccaattgcctggaatgaaaatttgaacaagatgtttgctgagcttccattgtccactaagactctgaaaactctcttgttggcaatttgggcttctatgactaaagggtccttatgatgaacatgtacaggtctggcatcatcctccatgaacataatgggtaagttcatagttttaggatgttgggctggtgattgtataactgcacatgtttcccttctccatcaaattccatcaagtatcgtttctgaattttttttgtatttcatgcaatatatagtccttcagagatcgtggctacatgtccgtctattggtggcgaagctagatagggaatggatgggttccttggtctcgatgctagtactgctactgcagcctgggctggtagagtcggtagggtcgaaagttttgatttgggagcttgagagtgacctcctccatgtggagaatttatggtacactactgtttggaacgactaacagtctgtgaacaacaccctatgcaatagagataattgaaatatggacgcattgacccaagtgtctagctcttaccaacatcttgatttcatcctttaagtagatatgcctcacgtctccatgaaaccttcacatctttcttatttttttttaaaacattcccccttgaggcattcttggaggcttcctatagtgaaccatattgtaggttgccttgtacatgttttccctagtatccaccatgttggtatacccaatgtactttggttcataatccttccttggtttctttgaagtttcgctccgaccttggttctttccacttctcttactccaggatacattttgttctagaacttttgtttgaggctttaactgtctaggagcgatactacatccggtttgtgccactccataataagaaaaatttatttgtgcaggcaccttcacgaatgtagaaggtctgtagatagttggggcatattgtgttcatgaattaggggctcgtggaacgaatcctggagtggttgtggaaggagcaggtactggaaagactccaaaagcttgttgataagcttcctccaaattgataaatccttatgccctttccatgaactcaaacaatgtcttaattcttcttctctttatcaccccataatagagagccaattgtgagtcaagattgcaaggtcacaagcttcatctcattaaccacttttgttttggttgtcgcctccatcatccattgaatgaaattcttcaagctttctcctgtcaatggtttaatgtttgtaatggatcccatttccatatcatagttacaggcagctatgaattacttccgaaagggagactacaattccttctagctatgaattgattcgagaggcaaccgtttccaccagtcctcaaaataccttgtgagggtcaacgagaagcataagaattttgcatcttcacttactcttgccacctagatcattttgttatacttggccaggctggtctacagatctgtgcacccatcatacagcttaatgtgttcacccatcagagttggtgaggaccccattttgtttatggaccaacttcgtaagagtagcaattttcacctctagccttttggtgttactgtcgaggagatatcgtctgcaaaccttatcatttagatgatttctgaggtcgttccctcgtggcctcaccttttcacttttgcctttttcatacactttcgtaccaatccctttttacatagtaggaccttttagagcaaatgggtgtccaagcctagaggtgttgatggccttctatgcttaagtaggtctactagctagattcgtgcttttttgaggaggtacgggaggtggagggttttgaaggtctcctacttttgcttttcccttgtcttgtacaagagtagaggttccaacatcagccaagttttccctattatttcctcagacacattccactaagggttcatcttctgaatctccctcgtctagatctccaaacttagcttagaagcaagccatgattttctccattctct

SEQ ID NO: 23505 - DNA, 6883 bp, Cannabis sativa
gtagtttagccgccaaaaattcagtttttgtgttaagtgttacaaaccgtaaagttgaggtggtttagccgccaatatccttaaaaattattacattaagcgttaattaaggcaaaactcttaatagtttcattttgcttgcacttaatctttaaaatttaaattttggcggcaaaacccccaacactcggtgttctaatagcaatttaatatttacgtttattttaagtgttaagttttatgttagactatccatgtatgtatctacatgaacacagtttatacatggcacaattttattgattaattggattgcattccataatttatgtcgtttcttttctgctgttgagattgtctctttacttgaggatctagactttctcgtttgaagtttgttttaatttaaataaaaaaaaaatctaatattgtattgtgttaggctatttgaagatttggtaaatgaaaaattattattaaataaaaataaaaattgttgttctttcattgttataactaatttgttgttagtatttgtttaagttattacttggttgttaatttccagctgtataatttgtttgttaatttccagctatataatttgcttttctctgttagtagagttgttagctttatatgcttgctataacagaacaatattacattccatacaagagattccttcacacaaaaaacactttgtacatcaattctacttgtagcttttatggtaattatttaggggaaataaatcatggtttttatcaatatcaataaatgcacagcaataacttccacaattacaaatggtataacctaaaaattgaaaagagatagtctaacagcagaaaagaaattatgcaggaatttgaatgcttctaaaaaaaaaagttatgcagttacatatttttttaaggatatttagtaatttgaatgcttaacatgcatttggaagttagtaacagtgtaattattagggtgataattacacaattaaagtgtaatgatattgtcaaacaaatatgctaaattgtataattatctcccattacacacaaattcaattatattgtaactttacaaacgcgtccttaataatttaatagatggagttatcaaaatcaataaagaaatttcaaattcaaatctcatttctcaatattaaaaaaaatcaatagaaaaataagaatgtgttggagttaaatacactctacaatggtaaattgattagtttgatatgttaaaataaaaggctcaaactttttatgacaaaaatgcatggtatataaacagaactcagaatgttaaataatggcatgcttttttcttttttacagatttttattatttacagatgttttggctagctatgttaggaattgaaagtagtaaagattgaaactttagatatatattaaagcaaacaaagctagcaagaatgatatgcatcatcaactctttcttcttttttttgttccttttcctaattaaaactacacaaatgtttgaactttggacttttaacattaactggtgttcttcagttgctaagagaagaagtaaaatttgaatgagacaaaagagtattcatttatgtttgttcattatctgagtttttggtactagtataaaatctacacaaaacaacatacaacaaaagactgagtgtgcttgacaaggccaaaagccagtagtaattgtctagtcgggcctcgttcatgtcatcagagaaccagctattccttccctttgttcttgtcaagtcttcaataactgttataagaaaagcactcaagaaactcccaactccaaaaacactattgtatagagcaaatgccatggttctcattctaacaggaacttcagaatagaaaaactcttgcataccaacaactgtaaatatgtctgaaatgcctaaaagtatgtactgaggtaataaccaaaagatacttaatgacactgtctcagtattagatgatccttcttttctactgatctttagcctttgtgtttcaacacatgctgcaattaccattgctatgacagaaagaaacatcccagctcccattctttgcatcacatttataccctttttgtttcgagtaaccaatcgcgtaaatgggataagaactttgtcatatagaggcatcaagagaattatagacaatgtaattgaactttgtagtgtagctggtgggatttgaaagttacttcctatatttctcttcattgtcataccttgcttggtgaagaaggttgctgggagttgaaagatcacggcgaacattagaagcattgtccatatgggcaaaagccgcagtactacttttgtgttttcgagcatgtaattagtagtactgcttttcgggttcttgtccaagctttccatggctcccaagttttgatgatgacaaagaggtttctcttgaagcctatgtaataaataaaacaaacagttaagatcatcacaatctgataatttacatgttaagtaaggctattttacataaaacaaaagttaaaacacttactctagctcaaccatgtcattgacatttggtaaggctattttgcaacttatcaactttgatagagtttctctgatgttttgaattatgttaagaagaggtttatgatgccccatattctcaacctgtttgtatatgtaaattctactcccagatgagaaaaaagctattgatataaccattgctatggcaggaatagcaaaccccagaacccaaccaaaagtgtcttgtatataggacattaatgtaacccctaaaagactaccaccacagataccaaaataccaccattgaaagaaagaactcttgatgttattactagacttttgctcatctttactgcagggcaattcttcttcctcatctagttgatctgctccaaaggcttgtaaagatgagttgtaaccaccttggcctagagaaattaaacaaagtgaccagaagagaaaggtggtagatcttgttttgtttgcagcagaccgggcccataccgaagcagatgttgtcaatgccactagtccctagagccaaaagaagtacaaaattttattaaaaaataaaagcttttgaccatatttggttggctataaggacaatgaattggcctttaatgagacagagttaaaactcaaatggttcacttaccgcaacatagagaaatgaagaagccaatatggttgtatacctatgcaaataagagtcagcaaaaggtgcaaacaagagtggcaacatggatgtgaaaccacaccaactattcacagttttggctgcagcagaattactcatgtttacaacatctgttagatatgtcactaaatttgatgccactcctttgaatgcaaatctctccattccagcaataactgttgttaaacaaacacatgttagtttttagtacaactcaaaacaaggttgacatggtcccctccattaatcttgggaagctttttaaagcaaaaaatgatatcaaagaaccatagttacttacctataagtagaatgcatgaacagctgagtcctcctttccctttcccttgcttccctccagccatgagaagaagaagaagaagaatatgaaaattgaagtaaccaaagtaagattataatctgatctttatgctgtcatctgaggcaaaatgtccaccagcaaacgacagtactatcttaattagtatccatcatcatcaccagtacaaatttccactcttggttttctctgagattatctaacaaacacgccaaacagagttttctttatatagctcagctctttacaatattggtacactagatatgtcactaaataaattctactctccaacattgctttgcattattaattttttttcttctcacaaatgtaaaagttaaaccccactttaggaatactagtttggacggatctctattatatatagatggtgtgtcaatgtgtcatggttcataaactttatgtcgacattaaaaaataatacaatgttcatgaataaccaaatttatatattaattttactctcacatactattctgcagcagagattgatatgatatgtactgcacctcctctttatcatgtgccacgtcattgccacttggcatcttcttgacacgtaggtgacagaatctgttccaggtagaccaaaacaaaatctcaaacttagagccataaaatgccatagtttactgatattaccatatacaaactttgaatcaaatcatgatcatgatcacttcacatcatttcaaagattatatatttggtccctaaaagaggaccagacaagaccaaaccaaaccaatccctttactttagaatgaaagtaatctcttttaagtttgattaatgaagataccttagacccttttcctttcagggaaaaactcctttgaatcacgtaacttttaccaccttattatctcaactgttaacttttgctttgtccaaaaacccataaaaagaagtgcattttgtgagtgtcaccaacaaaactacatagattaaatataatatatatatatatatatatatatattttctttcttattcttctctgataaacgttacagtaaactatatgaaacgacaaaacgttttgaatgcataataaagcgtaaggcaggcacaaacgaacacacaattcacacaagcaaacacacaaacaacacacagacataatattaaggcatttgaaagttgagtgggcagtgcttagtgacgaaataggaaaaagggtactcaaaattagtgtcgttttagctatataagtcatcaatggttatctcatatcaatcttttaactctttaataaatagtagtatgttttagtaatggattattagctttcttttttggaaattgggtgcttttacaaagtaaaatttttccacgttaagaggtttggtgtttcatgagaaggaaaagcacttaattttgttcctaaatgggtacccccacacaccactatgatcatcagctttgttgtcaaacttagtaatcaatcaaatacaacttcaactaaaattacaacatcatcatcatcatcatcattatcatcaactaatcaatttcgtcgaagaaacatgtaatctatattttctttttgtttggctgattttttttgagtgatgagataagaggacttaattaatttgagccaaacttcttgtttgcctgccacatgtttaaacatgcacctcatagatattttattattaaaactagtctcttctcttctcttctcattattttacattttgtaattatgagaaacttttattgtgtataatttgccaccaccaccaggggtttaataagttttattttataggaatctccatgtaatattctctttatggagatgaagatgattaagatatggattaatattttttttttgggggtgtttttacactacaccgttttttataataaatgtatcgatatattcttatttgttttagtataaaaaaaaaaaattaatctatttttttttataattgtatgttataattatttaaaacatcttgtaaaattttaaaaaattcaaaataatttataatattaaaagtgttcaaacaatttattttacacgtatataacagaaagtttgaaccttatttttaatgtgttaaattttttttgaatttctcaaaattttcaaaaatatcttaaataactataaaagacacgattatgaaatataactaaaataatttttcggacgctgaaatagataggtatgtatcggtgcactgttaaaatgcattgtagaatttttgaatgtttttaatgtagttatttttagtctaaagatgataatttagtatagggtatttctataatacattttttaaaagaggtccattgatgtattttctatttatttcggtatttggacaaattttttagtctaatttttttttatgatcatctacgttatagttatttagtccagttaacaaaaccttgttttagtggatgttttcatccaattctcatggattttgaaagaagtaaagagacaactccaataatatatttcattgcgtataatattttcacttgtaaaacatattatcatctcacaaatttttagatcaaatgttgacacccttgtagtcagaaagacttcaaacataagtgtttttattcttgaaaataataattaggcatacattatttcaatataaaaattctttatattattataattaattgtttggcatgccaatttattttctttacctatatattttgtagatagtttgctcaaattggttgtttacctcgatttacttgatgggataatttatcaataaaaattatgtaagcactaatcgctaataataatgcttttttttttatatatatatatataattttataattcaattcttttttttttttttttgaaagaataattcaattcttaaaccacctattgttcaaaaatctccaagtattattgctacagaaaaatttacatattgttaaatatgcatatgtgtgagtcttatctaattatgatgcttacaccacttatatattgtaatagtgttattaactcatatgttggagtaaaacaaattaaaatttattcaaaatttggaaggatgagagaagtattagaaaaataatattacaattactttgatgaattgatacaagtagtgtagttaactataagatttgggtcacgttttaattatataaaattatagtctttggaaaaatatttttaatttataatatgaggaattgggcacgaaaggaacaacaacaccatattatatttaataaatttaattagtgcgcctaatagggctaaaacgtaacgttgaacactttctta

SEQ ID NO: 23506 - DNA, 1515 bp, Cannabis sativa
atagagtgtaatttcctctttgataaatatgagtcaaccatttcataaaaaatagactggcccatttaggcatagtacgggtccagcccaataaaaataatgtgtttatgggacgggctgagcttacttcaataatatgagccaggcctagcccgactcgttttataatatgagtcaggccgggcttgtataaaaaaaataagataagttgaggaataactcttttttgtatctattaatcaataatattctcatattatatattttattaaaatatacccacttttttgagtagattgcctaatatatgcttactccccacttaactctagcacatattttacattaacttaaggagtataataatgggaacatcatctataaaagtgtgtatatcttaaagaatataaaaataaaagtaaaaattaaaacaaataaaataaaataagtatacaatacaatttcttctaaaaaaatagatttttataaaaacgggcgggctgcccgaattttacaatttaaggtagaggtattagcactaaaacaaattcttaatctacaaaaatagcaactttaaccacaaaatcaattttttaattactaattttttttttaaaaaaaaaaaatcaattagtctcgtacacgtagaaatcagcaaggacaattatgattacatatatttttcaaaattatgattatattgtaaaaccaacttatttaacaacacacaatccatagtcttccaagcataatcataattcataatcataaatgcttatttctataaaattataataataataataaaaaaaatcataaatgctatgctggtctatgaaaatccagctaaaggaaataggtggtacttgttgggccttcgttcgagccctatcttcgagccttttcataacatgggctagcccataacgataaccctgggcctggcaacccatcagtagagggcccagtaaggttggggacgttccatcgaatccgagtctagtgagaaggtggtgtgttagctgtattacgcggtccggtccctattttaaaaagtaaaaaataagaggcgtcaatcaattaattaaatttacctttagttttatatttaattgaaatatacttttttttatatttattgtactcaaaataccttatataagagactcacatagagatattgtactcaaaataccttatataagagactcacatagaaatagagagtatcttgaagtgacaggaacaaaattggtacaatatttaaaaaaaaaaataaaaataatagactttaaaaaagatagtaaaagtaaaagagaaaaatatataaaaaaaaaaatataaagtgtaattttctcagaataatatagttcgtatatcatgctgtatcgttaatatttaaaagaataagttacaaataatattgtactaactaaaaaatcttaaaaaaaaaacgtaaagtccaccattataattggagaatttttcaatgtcatatttggaattacacacata

SEQ ID NO: 23507 - DNA, 2972 bp, Cannabis sativa
agacctatgagagccactactagagctactactggtaatgctatatacataatttctgtttttccctttgaacttctatattcttctgtcattgttcaaaaaataaaaagtagtgtcagcaaagaaataagcaacatagaaatcataatatattggtttagttctcattttgatttaataaatcagatactaatcattatatattgaaatttagaattaagacatacccaagtcagaggaagccattctaatataaatgtcttgaccagaatcagcatattgtctaatatctatcagttctttgaaccaaagtatgcaaccacttcctccatttcttatgtccatattagcataagctgtacaagagcaatttttcaagcatttctgctcacattctttgaggtccatggtcatgttgtaccaggaaaagactgtgtcaggcaatttaatgctggaatattttctaaaaccctctccttcaatgcagcccaatgatgtttttctttcacatccatgcgaccaatctccagagttatagtcttccttggacttaggcacgaatccctccaagcagccacaggcaggtgagttgttgatattgcaagtaccatagggaccacatgttgcatacctatcacaatcatccatctgtgcactcaagtagaaattccaaccctttgttctgtcaatccaagtgaacctttgaagatgtccattgagatccaacacaagccttgatacaactgagttgctgataagtttgtatgtgtaataaatctccttctcattgcaaacaaagtcatatgtgtatatgggatttggtttcaagttgggcataccactgaatctaaggccattccatggtccagacctgaaccttattactgatccttttctcagataaaactgtggtacaccattgggatcaagtatgtttgtgaactcaccatcagaaggatcattatcactcttccatgaagtcaatcctcgatttatgcctgttaccatgctaattccatacttcatgcctggaagaagtgtattccctggatagtcaaagctttgccatatatatttccctacttttttttcatcatcatttctcactacaaaatttcctgtatctaaaagctgagcaacagggttagttccttgtttcgtcgaattagaagaccatacagttttgttgccatcatagagaagggatagaattccattaccagaaagttgaaagattccagatgaatcattgagaggggtgtctttgttggcaacccaaaccactgtcccagaagctattttcttataccatattcctaaatacctgttttttgagtttttggggctaaagaatccaagctcaaagcttccaccagctgagactatagagcttccttctttaattgattgagttgcagtaattttgtctgctccatttgtgatttgaaagattgatgataacaaaaagcacactaaaaccaacattgcaatggactccatttgaaggccttataaaatcaataaacttgggcatattagacattgacttaattgatgatatttagaaaggagaaaatgaaaaccaaggacactaaaaggatcatttgaaggacttgtttgcattaccatggtttggacacgagaagaatcattgctatgacttgcctcataccacaagttttgtaagtgggaaaccaattgttaagagagctgtccatgaactagtccatgtttaatcctttgaagcatctttagattgatatattctaattgattttgtcaactcttattttttatttataatgtcattataattacctgatacatgttttatatatattaagaaaaagataaaatatactaatggaactcatagagttgaccatagttttttattaacctgtttaaatatttgacaataaaatgacattttatttgaggtaatgaaatgaaatggaaaataaaggaggcaacttttatttcattctattttttggtttcattttatagtatttgaatgatatattcttattttagttatgtttttattttattttttaaccaaacatcacttaatttggtgtttgttatgtgagtttgagttggagagaatagagttggagggagtaaacttagaaggaatatgaaacctatgttagttgggaggaataaaaatataagaataagaatgggaatgtgaataggaattcaatcgaattaaattgaaaatgtgaaaaaaaaattgatacaaaaataatttagtttttttgatcttgcattggaatgataattcctttcataaaataaaatagtcattctaccaatatgatagaaaaattatttcattggaatgacattctaatactttaaaatgcaactaaataaaagaattaaataaaaattatttaatttccactccattatatttcattacctttaacgagatggggattatcattactacttctattttaaaaggtactatttatttgaaaacataaaccattcaagtggagttcggaatgaaatagataggaaataatttttatttcattttttttttttttgttgtattttcaagtattgaaatatcattttaatggaataatttttctattattttagtagaatgactattccattttgaaatgaaattctaaggataaaaattaatactttttttattaattttttatatattataaatttaatttcattgtaattctatttctatttatcattattcctcccactaaacgccatattaaaatttaatttagttgttttttaaaaatttaatttagtttgagtcaagagttttttcttaaacaaggtttcgaaatataaagacgacctaaaaatatgtgcgtgtacacacataaatcccatatatgtgcgtggtctcgcattagcgttgttattttttcaaatgtttgaagatgacaaacatcatttttttaaaaaaaaaaaaa

SEQ ID NO: 23508 - DNA, 3015 bp, Cannabis sativa
agatcagatacatctgttaaaatttacttactgctacctttttttttttttttgaaaatagaaattttataattaaaaggatttaaaattagatttcatcgtcgttataaaagatagagtctggtataaaagagagctcaaccataccagttatatgattcacaaaaacccatctagcaacattgtgggtcgagaaattacaaagtctgaaaatagaaaaaaaaaaaattacaacgacaaacgagaagagagttgtttaaacatatgaatataattatcaataccccaactgaagtgaactccctttagagcattgataaccttcttagaatcactctcaacaagaacaaaaaggattttcatcataacggttgtctccagagctagcgtacacgctggagcttctctaattagcagattcgagaagctgagcatgttaaccgctacccacaaaatagaccctgtataatccctagctaatgctaccgcacacatggagctactacaaactttgacatcacagttaattttaatccaatcagccggaggaggggagcaaataggagacataaaaactaacatccaaacaaacaagcaagatgcataatctgcgtaataaatagaaatagaatcaataaagtgcttaatgttatccatagaattattatgtacattgtcgttgcgagccttccaaatagtatccaccataattaacgcatagaggaataacttatcggtatccacccctttcgacttcaagtttcaaagaaaagcaacctaatcctatacacgagcacaagaatcaaatacaagcttaaccccccaaagagaatatcgttagagatggtagacaaagttgcaatagaggaataaatgctccattgattcctcaccttccccacaaattggataagagacctcttctatcttaattctcttagcgaggatggtccggataggcagatgtcggagagaatgcaccactagaggaccttatgacgctttaggattttggagttccaaagctttttccactgtgcgggggccataacgtagtcgggagctctttctaaagcttggacaagataggcaaactttgtcgaaaataaaccatttggctcctttgtccacacccacctatctctgtcttggccacttggtttaccactcttaataatgtcactaacggtttccaaggtaaaggtgaatgaagtttagggatgttccattccccattctttaaaagtaactccgcaacctttgtcgccccgtcaagccgagaagcattggccttagggtagaaatcctgtccgtgaataatccaaggatcagtctagacataagtctcttttccatctgaaatcatcttgtaagtacctttcttaaggatctctttggctttcaccacattcttctagaactacgagtcagaagtcttataagagcaatcgaagaacgatttgtttctcagatacttagattttaacaccttacagcacaatgattgatcttcgttaaggaggtcccatccccacttagcaagcaaagcctgattcatttccagcaacttttagaatcctaggatacttacctattattaatttcttccagaaaaataacctattgttaattaattattataactaatgttaggagggaggtgcatcgagatttaattaagatttttttttttttttgagttattttaggaatatttttttatttgagaaatacatgttttaaattttttttaaaaattaaaaaacatcacataaataattaagcatcatgtaatacattgtttaatttaggtcaacgagaatttttaccgcaaactttgacatatacaaaatcatgcctcatgaattttttaggctgttcaaaatttttctcaaactattgagattgttggatttatgaatttttgtctaattttactaacaaaagtctaacgtggatgaaagttcacgatacacaatttggtatatgtcaaaattcaaggggcacaatttggtagatatcaaaatttggagggcacgatttaatacatggacaatcatcgtattagtaaatttgaatgaaattggacaaaaatccttgaatccaaccattctaatagtttgaggggaaatttttaacaacgtgaatagtttagagcataatttgggatatgtgaaagttcaggaggtaaaaatcttaattagcctttaatttaataactattatagaatagcactagtcatttgtaaaagtctacctcgtgatggtatcaacaatgctctaaattcaaaatattgttaaaattgagatcattttacagttgacatgttggaacttattttaccaagatcttaatttactaacatgtatgtttgattatacatctataatctaacatcctaaatatgaaattcctaaaacgataaattaaataggtaaaagtgtcgaaaccttacattgattatagtgggattaaatgtctccttccgttcagtattctaacccttgttcctttctgttacaaagtagtaacaagtactgaacctgaattctccttccttaacccgataaagtgatagttcttcataatcttccacaaaggtctgagtatcaacctaaactatcaccttgaatagtttgggttgatactcaattcacctttggaacacatttgaaagagaaataaatagtatattccgaaattgactaatgaaaataagaggagagctttttgacatataattagagttttctagcattaggaagctctctcccatcaccttctatacatagccttcacttagggttagttttaagattaagtgggcttttaaaaaaaagacaatggactaaaagaacaaagtcttggccaaaattccatgtgggcctcaaggatttgatttttctcattttgtctcattaaaattgtagaaaatagtgattcgaattgtgtatatatttcatagaatagtacatatttatatacaaagctaggagactaggaaataggaaact

SEQ ID NO: 23509 - DNA, 1734 bp, Cannabis sativa
tttgtattttaaaatagagtgtaaattcatcccttatttctatttcctaatctcataaataaacacactattattgaagcatatccatcatcatgaattttccacaaccgatctttatttgtagaaaaatcaattattagacccttgttctaaaagtatatggtatttttttaatatacatgttgatttttagcctcaacttgattttttttttgcttgattaggacttgtccgctattttttagcttcacagtgtgactctgatcggtcttgttgattcccacactattttaattttactacagttgttgctatcctttgtctaagtattattttcttcttcgtcttttttctttaaagacatatctcaaaaatttgagttgctcattggctctcgattgatgatattcaccgattggattttatttttatgtttatttttatttttaataatagtgttactacaccaccttactattattatagtagtaagattttattctattatctaatttttattggaagatttttagttgatatttattagtaggagtgatttgttatatgtttatttgaattagaaatttaccatttttttgtgtttcttttatgcttcaaagctaacgatttatttgtattttagttgaagttgatattagttttcattcctatttttgtaaatgatataatttgtttattttgttgatttccctcttttaaatgatatatcattatatagtgaattatggtcaaagttgccaattctggaatttccatttttcttaaaaaaaaataaaataaaataataagtgaccctgccttcaattattttttgcaatgagttcttatctaatactgagatataattatacacttgtatcaattacataaaaattgattaatacaatatggtaactgaaaatattgtatataccaaatttacccgcaccgacgagaaagcttttttttttttaagcaaccccatttatctaaactaaaacctactgttttcaaaagcagtgtcacaccgctgaatgtaataatttagtgcatattaagtgcaattatcattactctttatttacctcacatttgccccttcatcttaaacgtaactgataaagttctcttaaatctttaaaaaaaaaaaataccgtcaattttatactaaacccaaaatgcattcagagatatatgcttttgtcctttcaaaaaaaaaaaaggacatatcttttacgttttatcccatgttggtgttggtaaatcaaagaaagaggatcaaattagggaggattcactttatttttactaaaaagactcaatgcgctattcttttttctctaaattaaacattactaaacaatattaagtagccttttgtttaggtctattgctagctctatgtgtgttatttaagaatattgtatcctgtttctaaattaattaacaagtttgggtccctcagtccccatctgaacagattgatagtacaccagatggtaataactatcaaaaatagttagttttgtagaactacttccactcttacacacaagatcaccagaaaacagaggctaaatttagctagctacttgatattactcttaatctctctctcacacacatattaacttttgcttctgtgtgtgttcctaattcaacccgtgacttaaaaatatgtacaaatttatagccaatgaaaaatatgaggcaccccacaaatccaatataagg

SEQ ID NO: 23510 - DNA, 5046 bp, Cannabis sativa
ctacataagaaaaccaggctgatcccgattgacatgatttcaaataaacagcgaggaaacaatccctaatcctaggcaagacaactattgaaaatctggcttcttaacactggagtttctccatttacaacactagattaaaaaactaaaaaatcaggctagtccacttcttatttcgaagacaatttcacactcccttgctaccttggaatatccacttttttttttacttcgacttacatgaagcctcaaggttttttttgaattacttaacacaaatgctgcaactaaatgaccaaggagtactgtgttcgaatctgagaactccaccttgcccatcccctcccaccccactgagctagcctcagtggcttgatggagtgtttaaagtttgaatggtaggacaaataagaaacaaatagcttgtgttggaaaaataagactttgggtgctttacataataatctataaaatggtgtggtggaataatgattttttctgctagtaattttatgagttatagtgactcattcaggagttacaaaatttattatcacattgtcattttttttactattggggagaagatatccaaacttagacctctttgtggggaaaggtgtagtactactaatctatgtctagcttattcttattacttcctctttcttcattattttttaagaatttttagcaatttttttgttgttaaagttgcttacacctcagtattgaccaaacgaaacattttagttcttgaagaagctgtcgcataccttagctctaataaggctcaacattaggcaataggggcggcctagggcccccaattaaaaggatccaaattctttaaaaatgtcccccatttttcctatattaaaaaagccctcaatttttttaaaaatatcacattttgcgtttagccctcaaagttcaggactgaccttggttctaatgatgtaccaatggttgtatgagtaataactagatagtactggcatacaagtggaatgtttctagtcgttagtatcatcgggaactgtgttttctgttttcggggtcacaaataaatgatatgtgagggagtagagtggattatgactaatttgtattggctcgctcttttctgggtagaaccaggatctggaattcctggtacttgaatataatttttcttctatttctgtctctgatcttatcacaagtctggccaaattttaagacaccatgaatgttttctgaatacttctatatccactgataatttgaagtaaagtacatataaaaaaatatacacaattgttccaagctcagctcatttatcagtaaccaaaataaacaagaaatgatagggaaaatatatatatatgtgtgtgtatataataaaagtagcaagtagtggatagtaaataaattgaagtaagatattggctgaatcacacacaaaaaactaactgtttaagacacaatacatggaaagtggataatatgttatagcaatagtatgtttagatattgaaatctgggagaggagaaaagaacctgcagatttacagcaaaaaccatggtgacataggccagattgcactgcagaaagagttttcgatcagtttccatctgctagtaacacctccaaattttaaaaattaaataaataaaaaaaacagcctaccattcttcgggaaactctctcaacatgcttgtctataagcagtgtcaataacctacacatgcatcaatcacgggaattagaaaagtcttcagcaatactagtacagaagaaggtgatcatatatgcatagcctagtgatcacaaagaggagtcccatgttcaaataatagaacacaaaagtgttcattttgttgtgattcagtaccagaaaagaagagaaagtatccagactccaattcttgcccgtttattgcttctcattccagatgcctggttctgaaagaaaagaaagtttcccaactgaacaccaataaggtaaatactccaataacctgagaataaatggcaaaattttacttgtaaaaaactcaattatatgtgtataaaaagcaattaagtaaatggtgttaaatgtgtgtgaaaaacgacacccccaacatgttacactgctattaagaatatttggtgtaagagaatgttaaaattattttctcctacttctagttctgaaggatttcaagcacagttattggaaatttcacaatatttgtttaccgatctaatcttcatggcatcttcgcctccttagcttgtgtatttggcaaagttactaatttagctggaattttacattaattataatatccatttgaaagatatagcaaaacaaactatgtgtagtggcaaccgaactccagtcatttagctatataaaaactgccaatggaatggcgctcaatatcttaccaaatctgaagtcatttctaagatctttctttaataaattgtataatactgctattttaaatgtaccatgtaattatatgaaatctcaattctagaaatgacaaatcaatttaatgtgaaatctggtaccacaattatatattcttgacaggagttcagacagatgaaagttcagaatccacaacttagtttgaagaagatcgacaaaacataccaaatatactgaaaagtccttccttattttggctgattagatcagttcccctttcattagataggaggtacaaatttaaccctttcatcaagcaactttggtatcctacaaattaatataaaaatgaaaagttactttttcaaacatatgaaatacaaaggtggttctgaaattatacctactagaattagtgaaccaagaattccacaatatcgtggagggacattaattattgatgtaagaattgatatggcagcgagtgtgaaaaagaaattccagtgcacgccatattcacccacatgaacctacaatgacatagagttgctggtctcatgtattcttcataaggtgagagatatacaccatctaacaatgaggaatacatagagatggcatggaacacgtgctactctaaaaaacacttctaatgaaaatatatgtcagaggcaaagggtgccacgctcttgtcttccatacctaaaacttttcagaagcgtgaaagaattcactcatcaactaaaatgattgctcgattctcttttttgtagcttcaggttttccatcatatcattgtttagaagcacaaacacttacaaaaatcaattaaagtttaaggtctatcatagtgtgtgtatttctatgccatactctgtgtttgaagagcttagatgctaaatttatcaacaccgtgtcagtctatgtattattaaacatagtttacaacattcactcaaacctatacgagcatcttatatttaattgcaaaatagtgtaacagtaatatattttaaaattttaaacaaacagctttcatcacgaagtcggtggctaacatttacaatcaaacttataaagtggaaacctttcctccagtttccaagatgaatacagttattatgttgtccttgagtataaattacaagtaacatcttcaacaatttgaagtaattagtttctcattttatatctcagcagttgtgtgaacataatttcaacaaactacatatacttcaacattaatgaaacagttcggaaatgataatattgagatcagccaagtgatttcagattaacattacattaaatatatatgcatttcattgattttagattagcaatatgcattcactaaaatttctcttctggaaaagaaaatgcaacaaaaatgaaatgaaaagagaggtggaggtaatagtgtgagcttcaatctcagtcacatgcaatgttggaaacagaggtgaataactaatataaaataaaacttgaggagaactgtgtgacatatgacagcaatgattaattacaaagaaaagaaaatctaacctgataattaacacctgcagtagatagaagacgaacaaatcctaggatgagaagtggactggtggatagaacagcagatttcaatttcctgagagatcacataatcatatcaatccacatttattcacaaccacaagaaaaaaaaattaactaacttcatttagctccctctaatgattataggtaaaggttgtaaaactaagataaagaactgatttgtattcagtttgtgcttaacttggagcctcacatcgagttttgtttggaagtttctttgcactaatatgctacatgtctataggttatcacaaatgttcattttccctcatgcataatttctctacatacgagcttgcttatctatgcacaaaaagacaacatatagattgaaatttaatatccagctccatatcacttcatcatgaaatcacggagacacacacacacacaaaagtcacaactcaaaaccaacagtttcaatataaaaaagctcaaagtgactcacatagatgaaatattacgtgcttgccgtgaaactagtgaatttgctagtacaaatgagccaactccaacatccatctgacaaatgaaaatacatgacaacctcacaaggatactcaggtaaaatattctgaagtactgattaaagaagctcaccaggccagtaccataagtctctgtcttggcatatcttctaggaaatattctgaagtcgacagccaaaatagttaagcaggttacaatcatctgcatcaatcatttaaggtcaagataaatgaaaaattaaatataactgaaccaaacaaaagatcaaaacaacgcaagtgcaagactgcataccatagaaaccctgtaggaggagatatttctcctaagagaaaggggtccatcattcacatgaggagaagaagtcagcctgtaatgatgtgaattcaacttgtatcaactactgaattcacaacggttataaataagctacaacatgcaaccatctagtatctacagcattccaacttagtaatgtgatcaacatgtaaaagaataagaagtaaacaaatggtatcaacatttctaatttaagtttcacctt

SEQ ID NO: 23511 - DNA, 3724 bp, Cannabis sativa
aatccaatgaaaaattaattccatatatttcaaaattaattatgtttctaattcaattttaattatggtaaactagtataattagcctattacgggcttgactggtttcttgagcttggctcctccctcgtctccgaagggttcccggttgtcgggattggtgtttccacctccaccatggatgaactgctggagaaaacccataatctttaggtcaccgatgaagaagaatgggaaatagataagagtttgtcgattacgattgcaaagttcaacctgagggggcgattatgccctaatactgaacacaacaggggatttctaaagagagtgctgggaggaatatggcaattgaaggagacagaatggaatatcaagatcaaagaaaaattcgattcaggtcttttcttaactcttacttttgcctctgagtcaattcaaaacagagttctatctaaaatgccatggtatttatcaaacggactgttgattttgggaaagatggaaattctaatgagtcttggaaaaatgatttgaccaattttcctatttgggggaaggccattggagtaccgatcgacttcttgactaagaataacacagtgaaaatggcaactaaaagcaggggaggttattcaagttcagaattcagatgtttcaaaaattgtggcggatgggttttttcgattccgggtatggatgtcaatcaataaaccggtgtgtcatggtttccccttgccgtattcaggaaagaaaatatagatctctttcaagtatgaagaattaccatttatgtgctttaaatgtgggagaattgggcatagtgttaaagattgcaacaaagaaccaatcaagattactggggatgagaatgaagaggtagctgcttatggggtttgggtgaaggtggataacgggtgtagagatggatttcaaggcaaaatactaggcatggagcaatatgatcctaaaggcgacccttctaaccagaaaatcaatgggttggagaatgtaactaaggtctctaatccgtttggccctttggagaaaatgataggggggttgaacaaatgatagccgaaatagtagtccaacaagaaaaaatgaatcagaacgctgaggggggacaaagcgcactgctacaggatcgggacaactactcagattatatagagctgggggacaaggaaagattgcacgatgatggagacaagggcaaacgacgaatggtggaggaattggaagtgttaagatatggaaagctgtagaaaccaccacttccctttccaaagagatgcaggataaaagtctctacgacattccaatctcttatgcgcaagaagctcaattcttgaacgaagcgatgacttttgcggtaggcagtggcttgaaggagttagctaaagagcatagaaggaaggtttcggtgaagaaggattcaaaagaaaagaaggggaagatagagggtaatgtggctggtgtttctcagtaaggggattcggtagctactcaaatcatgaaagaggcgtaccctgatgttcagggtcgcctgtagccatgagtctcttaatttggaacgtccaagggttggggaacccgtggacggtacattccttacatttccgggtgagtagttacaatcctgagatggtcttcatttcagaatggagactgaataaggttcatgctgaaactttgcgggttaaactgggttttagtgggtgtttcgtagttgaagctcgggggaagagtgggggcgtcagcttgttttggtcaatggatgttgagactcaagttctttccttttctcccttccatattgattccttcattagaatggaggaagggcaatggtggagatttacgggattctatggtgatccggatccaactcaaagaattcactcatgtaagcttttgaaaagattaagttgcatgtatttagggacgtgggctgtgggcggtgattttaatgaaattctgagccaaaaagagaaaatgggagactcctctaaatcgagctatctaatcaacaatttcaggaaggcgctggattcatgtcaactaagggatgtgggttttgagtgttgtgattacacttggtgtaatgggaggaaacaaaaccttatttttgaaagacttgatcgggtttgtggcaattcggattggtttgaaatgttttcccatgcgatagtgaaacatcttgattgtattaactcggaccattgccctcttctccttacggaaaaggacccctcttctaggatgtaccacacggctagatggaaatttagattccattttgaaagtgcttgggcagatgatgaagagttcactgagattatacagccggtttggttattgaatgaaccaatcaagcatagtaaggagctaaagaaccggctagggaagtgtggggctgctattaaacaatataaagttaagaagaaggaaaaaaatatcccagctgaccagcagcaccgaagtaaatgaatggcaacaacttcaggaattggagcataaacaaaatatcgtgcttcataaagaagagaaattttggaagcaaaggagtagagcgatatggctgaaggaaggggataagaataccaagcttttccatcggaaggctagtaatagaaaagcaaagaatacaattaaagggctggtggatgagagacttaattgggttacagtgaaccgccatatgggtaaggtggcttgtgattactttaaaaatttattcacttcaaatcgagctactgatgaggagttactagaatttcaacggattgtgccccactgtataccaagaagtaccaatgaaaagctcttggaacctttcacaacagaggatgtcttcaaagtaatgcgcgacgtactccccaaaaaagcccctggtagtgacgggttgcccagtctattctataggaaacattggtcaacgataggtccggagatctcaaaagtgtgtctgggaattctaaatgaagggatgcaggtgaaggacattaatgatactctaatttgccttattccgaaaatccccaagccaacaagaatgacagattttagaccaataagtctttgcaatgtggtgtataaaattgtggccaaatgtagctggtcgaatgaaataaagccttcgtcaagtaatatcggaggagcaaagtgcatttatgggggaagactcatacaagataatgccataattgaattcgaaagcctacactgcataaagacaaaaaggtttggcaatggtaagaaaatggctctgaaattggacatgtcaaaggcttatgatagagttgagtggaactttttagtcactatgatgagggatctcgggtattaggagaattggattgagaaaattatgaggtgcgtgacaagtgtgtctttctcagttcttatcaatggggagaagctcaggtgactctctattcccttatctctttttactttgctcggagagattatcttgccttattcatgaagcatagagggctggtaacataaatggggtacaatttggaagagatagggtcaaagtttctcacttattctttgcggatgatagctttgtgttcctcaatgcaaaggagaatggatgtgacaccatgaagcttattttgcaaagatactcaagactcttggggcaacaaattaatcttgaaaagtctgaagtttgcatgggaaaaacgatcacagcagctcagggccatgt

SEQ ID NO: 23512 - DNA, 1367 bp, Cannabis sativa
ataaatcattcaacagtcctatagcattaagtaattacatgttagtgtcaactgaactaagaacatttatacatttatatctcaacataatcaaccgataagcgatgaaatcaaaattacaaattccttagtctgcatttgcatccatgaaattctataactaaactaacatgaacataaactgtaaagtggaacataaattatggaatcaaaattacaaactcctcagtctgcatttttattactaatacgaatatatagtgtaaatgaaacataaattatgaaaggaaaggcattcaacagttttatagatagtattaagtaattacatgttagtgtcaactgagctaagataagaaaatgcagccataacacaataacaataataataataataatagagtcatgagtaaccatacctgccctttcatgattttttcactacaacgtttgcaagtggcacgagaagtttgagaaacttcaataccacattcaacattcttggcaccatatgtttcctcaggttgatcaccaccagcaccagcaccagcaccaccttgaccctccacatattttctgattctctgctgatcttcccaccttagttgctcaataccttcaacgtcatcaatactaaacaaaaacagaacacaaaacattataaagttaacaactttctccaaactccatagtcaagaattgtacgtattacacagtttgcaatgacaacaacatacgatttaatctgctttgctttcttcagtatacaactagcatgattccacatctgaaaccaaaagattgtgtaagaatcattctatttcctcaaaagggtttacagaaaccaatgaaaatgtaaagaaaagttaacaatgtcgcagaaataataatagaaaaggaaaaaccttttcaatattacaagccaattaaaagaagggttttttatcctataacaaaaacaatggagaaaaatggggaaatgggtatgtaagagagactaattagtgtgaagaaaagattacatacaggcatgaaaccgtcgaattgggtggcctgaaccatctttccgaaacgaagaacttccttttcaatgggggacttacaagtcttgcatgaggatcttgatgacttagcatactccaccttccatggcttttggtcctcaagcttcgccattgttaaaagcttgaagctttagccctattatggctttgtaaacagtggcaatatagtattatataggtatcttctctacctggaaacacagaaaggagtgggtttttttctcaaacgaacctttagcttctcttataagctttttttatttattttattttattttttataatttatttttatttttattt

SEQ ID NO: 23513 - DNA, 1908 bp, Cannabis sativa
taaaatatatgtgaagaaaaaaatgaccaaattgtccaccatgcatggatttatatgtttttcaactaaggcggccacttgtcgaagattctcctacaaaaattaaagggttaaaataggttattgaatatcttgtttggttgtagttgtcttctaatagcccaattattacacattagtgtttggctttataataactcttaagtgtgtgtgcatcgatttctaagaactatttataacgtttgaacatagagacaataaattattgaataaaattaaacaaaaatctttaaatttaacaattatagttcaagaaaaattttgaacggccaaaaaagttcagaggcataatttagtacataaggagcaaaaaatcttaattagccttaattatttatagcccaaaaatacacttgaacacacctacctagttagtaggagtttctcttttctcacccttaatatattttattaatcataaactcttttctcatcttacacaacacatacacacattcatactcaacacttaccacaaaacatttgactttatcactacttgttcttataccaaaaaacacctttgtaaagaggagactcatcatcactctcaacatagagacactcttttgcctctctccacacagctttaattattggagtctcatctaaacgataatactctcctaatattggcttcacagctttagttgcttcaactgcattgtaatatggtattgtggggaataaatggtgcacaacatgagtgtttgaaatgttatgaaaaatactattgagaactccaaagtctcgatcaactgtcgacaaagcacctctcaaccaatcccattcggaaaagtcatagtgaggcaatgcagggtgagtgtgttgtaagtaagtgaccaaaacaagccaaccactcactaataccattggcaccccatacactaacataacccaactcaaccctttggctaaggcgagttggtacaacacgaatgtggtgatgaaaactcccacatcggaaattaatatttgaagcctttcattgttggagtatataggagagtagggattataatgagaagcgaaacggtcatattgtctgcctaataaattgaaagttaagtatgaagggaaaccaatagttaataaaaaaccaagggttaggactcttcctagtgaattgtttaagtatttggagaaccatggcatttgagatttcgtctttggaacaaaagcttcatcgcggttaatggagccagtgtttgaatggtggcgacggtgactatacttaaatgagaagtatgggagaagaattgcagagtggataacaaaaccaaccatgtcatcaatccatttgtagtcactaaaggcgtggtgaccacattcatgaccaatgagcccgaaagcaaacaaagcgcaaccttggaagatccaataaagtggccaagctaagtatgggagtggatgggggagaaggtggaagtaagaggttgctaagtagtagaacaaagtgacatagaaaaggtctcgaaagacataaaagaaggagcgaagaagagagcgttggaagcaatggggtggaatggctttcttgatttggcttagtgtgaatggtggtttagtgtgtggtgctcgctcaattgggctattattattgttcttactatctttcaactcggattttggctcgagcattcgacttttaactcccattttcgcccctaattaagaaaaaagaacaagaaaaagaaaagaacaaactgttagactacttcaaagtgagctaaaattgccttatttaagtgcaataaggaggatactttggcattttaggaccacatataatttggataagagtatcaacaatgtaagcaatggatgaccccatattaaatattttat

SEQ ID NO: 23514 - DNA, 3430 bp, Cannabis sativa
acactaaaaattggcataggttaactacaagaaatgtcaaataagacattaaaaaacaaaaaacataataacccaagaactaatggtcaagtgagttcatgttataatggtctctttaaattcattccaagaactaagaagaatcaaataagactaaataacccaataaaaaacataatatttttccccaatagaatttgagatgggtacatctaaaaccaatcaaagcagccacttgtttgctgaatagagtggacatctcaaacccaattctagatggatgctccacttgtagccacctttccctttcattataacatctctgaacagtgagtcaatttcattactacagcaacaaaaattgaaaaaagaaaaaagaaaaattcatataagaaaagaaaccaaaacgtcattaagtatatatgaagactaacccatgtaaaggctaagtcttcaaaaatagcaggtcgggaaaaacagagtagaattgtgtagaagagtagaattgttcatgcaagagtagtagagaaaatactaagtagaacttcatgtaatttattaatatttattaactctctcaactctaatattccccaaccaaacttgtacaatagaaaaagtataatattaagagcaccctttattctctcaatattcagcaactagttgttgaaacaacctataatctacacatgtgagcagtagtgaacgttaaatcccatttttctcaaggtttaccacaaaattataattgattgcatataagagatactatatccgtgttttcctataagaacctatgaatatagtcatatacatatgaaaagacaagacacatatattagaacatatcaacaaaacataggaattgaataatgttatttcagaaaaatcttaagtttatctaattttgttttacgagccgggccatttatcctataatgatcttcattccttattaaacatctcactttcctatcttttccaactcattattcagaatggtattcttgcaactaattctgtaaaccaaaccaggcaaatttgtctataattaatagattggaaacaggaagttacatactttggcaacaatttacagagttatatggtaaagttgctttctttattattcttggaaccaatggacaagaattacattactagaaatctcaaaaacatgagtataacattagtgttgatggaattctttttgtcctgacagaaatattatattacgagtttaaaaacaaaaagaacagaaagtgattagaaaagtgtctgaatataaaaaactacactaaagaaaaatgagagtgaaccttaatcaaggttctctttaaccccattattttttggacaaaaaacatagccataaattgtaaaaatatatatatacatatattctctgataatttgaattttttatccgccgactatataaaacattcaatgcttgttttatttttctttaaaaaaatgagcaacaattcaaactcaaataaacctaaaacgtaataacaaacacatggagatcattataccataatcaatgaaactaacatattgagccatcaaacaaaaatttcaaaatttcaaaattttttctctccgtacgtcttgaaggaatgttggaattctgacgcgagaggtggtttcgcacgtccctgaaatgggtacggaggggcaatctttgtcctgtgtacggcgggaccaaggcgtccatagtccggaaaggtattacctttatgattctgctagggttgtgataccaatccattctatttcttcctttttccacagaaacagaggtcctcttatcgactgggatttgggtttttcttattactggttgggctgttcttcgttgccctctattccttgcttgtgtgtttctctaaaggtttgggttgtttctgcaatgtcgacgccggagatgaatctgaatacgatggaggaggtgatgagtttagtcgaaaatgttactatggatgatttctctgtggacctgaccccagacgatgcggtagcacaagacactatcaagaaaactgtggtgggtaagttttttatcaagaggaagatcggtaatggcaagcttcgttctatcctctccgagatgtggaatatcagccccggttggcgtcttcaagagataagtcccaaaatttttatctttcgattctctagggaatccgatgctctgaaggtggtgggcaatggtccttgggccccctgtggaggttttctgcttgttacactgatgccggatgatggaaaatggaaatctgctgatcttaaccatgttaatatttgggtgagagctctgggagtcccctatcggtattttacagatgagaatgttgaaaaaattgctaatagggtgggtaagtgcttgtccaccaacaaaatgagagtgagaggggtgcttcgaagcaactttatgaggtttcgggtgagcctggacattgctaaaccgctcctggcaggggtgggtttggatgatgaagatggtaaaaaggtgtggagctatttcaagtatgaacgacttcctcttttctgttttaaatgtggctgtattggacatttggagagttcttgctcggcggggaagagaatgatgtctttggatgatggtagaagcgttccgttattcggcccttggctccggtttggttcaaggctggaaaatggttttgcagtgcttgatgcagaggatttcaaagaacgaactagtatggaacaggaagatgatccactcttaactcgtggaggtcatgatggcggttcggcggtaatgacaaaccgtattattcaaaagagtgataactctttcaatgtaccctctcacgagaaaaccatacctcaaagtcccacctctccttctgatgaacctcttattgggctgattacaccccttaacagagcaaggggaaaggtttcatccctgctttccaaagggagatcaaggatggcccataaaaactctcattcaagaatgcttgggccccgtgggattccaaagaaaccgatctttgggaattctaatgatctggataagagtgatgttggtacaaaaagaaagaaaatctcggatggacacaatgaattcgagggagacaaccttaagacgaaaccggggcttgagattgaccggggaccaaaggatgtgtttgctgagggtagttcaaattcgggtatccttttgggggacgtgcgaccagctgttaagttgggcgagagaaatcttggtctaatggaggacaatggaaagaaaaggaaagccggcgccgataccgaagttagagaaggccaagggaaagatgacttgggtagaggaggtgatgatcatctttttcaggagattcgcggtacaagaaaccggagtggaaaaagcaataaacccgaaagcttgctggcccttgaacaa

SEQ ID NO: 23515 - DNA, 4480 bp, Cannabis sativa
  modified_base (2871)..(2871): a, c, t, g, unknown or other
  modified_base (3725)..(3726): a, c, t, g, unknown or other
  modified_base (4444)..(4445): a, c, t, g, unknown or other
tttgatggatattgactgagattattctatgaattaatgttatttgattgttctttctttctctattattgtgatttatttatatttgtgcttattacatgtgttggattggccaccttatgcaggatctatgatctcaaaacaatatctaaaaaaagagtattgagaatgctctaaataaaaaaacataagttttgatgtgaaatgatagtattcacatagcttatgtgacttttagattattgcttaatacgaattgtatgtttttttttttctcagagatgtagtattcgggatgcaatttagaacctttatgatctgaaaagagtttaggttaatttataatctgtcaaatcacataggaggaagaagaatagtattaacaattgggtaatcaaagcaattcagatcatattcctaatttcacatccattgttaaactttttatttttttgttttatttaattttgcttagtttatttagttcaaaatttatttattcgattgcaaaataaagacaagaatttaattgattggtacttaactacagtcctcgtgggaaaaatttcacttacttgagtattacttgttaaaacgatatgtatacttgcgtgctagatttatcacaacaagtttttgacactattgtcggggactattttagttaatatcaatataggctaattctattctaatttcgtttctttttatttaatcttactattgttttactgaatgtgtttaacttgcaaggtaaatccaaatactataccttgtaaattttttccaacaacacaaagagctattctattatgcttgggggagatttaaggagctcagagagagatgttattccaatttctcaagtggttgttttattctattcttttacaatggacttgaggatgaaacaaaaagttgggtggattatggagcagaggtaactggatagcctttgttaaggagaagtcatgatgtaataaatattctattgaacgatatgacaaattttgattacgatcggcattgggatccatcacttcagggttggagtcaccaatacactccttattgtccaaacttaccccaaccaattgaagaagaggagaatatactatcacttccagaagagattaatcgattggcagacatggtaagagctctatgtgataatttaatggtacatgattttgagagttttaagtataataactcaaataatgaaagttatgagagttgtttgaagatagtagaagcaccattagatgaatttatagaagagattgagcctataattaaagagaaagaatcctttgaagtggctaaaaatttgggtacaatggatatgcttgctcaacaaatgatgatctcaatttggtgaatgaagaaatatccatcctcaattatgaagttattgaagattaagtcacagtcaaagatgtggatggtcaggagaaaactaaacaaccaattgagaggttatttgacgaaagtgagaaagaggtgtcattggtggttgaagaatcacatgtagttgttgatttgaggtcatcaacaccactatattatgaaccactaatggacccttatgttctactaataccgcatttcccatattgtattctgtacgagttaccaatagtttcttcccaagctcatcatccaagatcttgtgttggcggtgcggctttcggttcaaactcatcacatgccaagcttgagggtactttcaaaaacagctttcaagttgtcttgcatgatgcttatgatgggcgtcaactgcttgttgatgtggcatggacctaaggtaagtgtttcttctctttaaatttttgtttcacattggggacaatgtgaaattttaagtttgggggaagggcttaattttattttttattgtttagttttatttatttttttgttttagttgttaattaaggtaatgttaattttactgttgttgttattggtggaatggattaaaattttaaatcgtgtgcttattttttttgctctttgaattaatttagatgcttgtaaaaattttgtattgatgtaaattgtcaatagttggattgtatcataattattttactttggtttatggtaagattgattaaatatgatagaacttgcatgaattattttttgaggtgaaatccttaacaatgcttatttggaaaatgatgaggcaattttttttggatcgtttggacctttcaagcttacctttatctttattattcctagtttttgcctgtttgagcttagcctgttcaactgtatttttatgagcctaactttgaatccacttgcaattctctttctttgtctcttgaattataccataagcttagaaataagtttgggagagatgaattgtgtgtggatgaaattattattttaagtgtgtgaatgagacagtgtgtgaattgtaaaagtatttttcaacatcactaatgttatttatgttcttaaaaaaatgatgatgaaataaaattaagaaaaaaaaagaaaggaaaaaaagtgttgaataaataaagtgatgttggaactaatagttgtaaaattctcaatcattgaaatttttgggcacaatttgagatatgtaatttattgtaggtgcttgatggtttgtagtctatttatggtataatatagcctaaataacttttcatctacctattacctaagccaatacattacaaccttgaaaatctttttgattccgagtaaggattgttgacattagtggaaagaggtaagtcatgcaagcatattgatcattggattgtgaaaagttagaaataatggaattgatatgatgtttttcaaatattgaagttaatttgcatctttacattatttttnaaagtaagcatccgaattaattttagagttttggaattaaaattctggttttaataattgattgaagtttcacaggtggcaacaacagtttgattgtttgaagtcttagttaattgtgtgttagtttttttttttgtcttagtttttagtcttactcgagggcgagtaaggatttagtttgggcgaatttgttagactattttaagtctaattttcgggtcactttttaaagttatttttcttctttattattatttttagaatagaattacatttgttttctttcatttcaggtttcgacactttgaatgtataaattagtaaaattttagaaaacggtgatctataaaatagagaaaattttgtaagaaaataaatctgaaacttcaaacctgaatttgactatgttatggtcatatttttgaaaaagcaaaacataaaagttttagatcacttttttaaatttctaacgcatcttgaatcagctcatttagagtttgtatgttaaagttatgcatattttactaaaagagttcgaaccagaaaaaaaatgggttcagtggctacggaaagcccgtttttcacttttctacagctactgcggtgaggctattggccgcgatggcaccggctccgtacaggtcaaggataacttcgtcttttcttgtttttggactgaaaagaactctatttaatgaaagagggtcgcgaataatagaggagagataaaatagaaccctagaaacacaagaagaaggctcttggagcgagcatgggcgatctgcgacaatctttcatctagtttccttctcttctcttgatttcttatgtttttatttgtgtttagtttaatnntggatttgattatgagctaaactttctatttagggatttgatggatattgactgagattattctatggattaatgttatttgattgttctttcattttctattatggtgattaatttatttttgtaattattacatgtgtttgattgatcaccttatgcatgatctatgatctcaatacaaaatctaaaaagtgagtattgagaatgctctaaatgaatagacataggttttgatgtggaacgagagtattcacatagcttatgtgactttaaaattattgcttaatgcaaattgtatgttattctatctcagagatgcagtagttggcatgcaatttaagacctttatgatttgaaaagagtttaggttaatttataatctatcatcacataggagaaagaaaaattgttaattagtattaataattggataatcaaagcaattgaaatcatatccttgatttcacatccattgttgaaccttttatttgtttgttttatttaattttgcttagtttatttagtttaaaatttatttattcgattgccaaatagaaaaaagaatttaatggattggtatttaactacagtcctcatgggagtgatctcacttaccagagtattacttgttaaaacgatacgtatacttacgtattggatttatcacaatagaaagaaagtgggagtaagattttttttcttgttttatatgtggacnntattcttctttcatccaatgataaagggttgctac

SEQ ID NO: 23516 - DNA, 2786 bp, Cannabis sativa
cagtatgaaacttataaaaaaaatgcaataaaaaagtaaaaaatactgcagtatttttgtaaagtaaaatatttaaaaaaaaatttaaaaaaattacatagtttaaaataactacaatgtatataattataaaataaaaaattgatttaaaaagttttcgtgaatgctaaaataattaggaagctatactagaattactcttttttatacacatttctctaggaattatgatgtttttttataagaaaaacaattaaagttgaaaaccagtatttttttttactaattaataagtacaaattgagtgtccaatcaattattatctattctccaatatttatggaaaaaaaagtagaatccaagattgtaggaaatttaattctgatacataggaattaacttttataattttaaattcaagatcacacttaaataaacaaaagttaaatcaaaacaaacaaatcaagaataaaaaaccagcaaacacattaaactatagaaaaatataatacggatgaatctaaatggttgtcagacacaataacacagagatttatactggttccgattctatgttcaatgtgaacttggtcatactccagtttgaaattattgctaccaatattctttattgataatgagaataagagatattaatctcaggagctataaggaaataatcacagcaaatcatttatggtgtaatcaacactcattaactcactaacctgagccaacataattcacaatgttgcttaatacaatattccaatcccaactctctctctatctctctcagatatgtctctctatttctcactttaacttctcttcctactgtattgtgtctccctactgtgtttgacttgtatttcacttttaaaatgagatgagtagtccactttatataagccaagagacttaatatagttgctgtcatattttatttgacagttaagttagttaaagactaactagctaaccgaatcttagttgagagtttaaggaataatacctcaaaaatttacaaattacatttaaaaaaaaaatgggtttttgcattccaaaaactcatcaataattttaattatataataataagatcctttctcataatattattgcaaatgaataaaaagaaataaagtaaaatgaaacttatctattaattttcttggaaggccatatacaaaatatatatttaaaaatgattaaatttgtttttggattggagtaaagagacaatagtagcaaccttttttaagagcctttcggttaatttttccaacaacacacgtcaatgagtaccattataatttacgtaagctttaccaacacttctccaattttttctatactatacgttttcctttttatgtttttttttttaattaaaaaaaacatgataatcattactaataatattaactaataaccagtaaccacatcatgtcttattcatctaattgtaattagtaatactttaattaatcatgtttttccgttgtactataatatattataagtatatatacttagcaatcatgttatgctactacgtacgtaacacacataattagtaattatgttatttttgttgtgacgtgttgtgtttgtgttcctataaaaatcaaataaaatcaacttaatcttatagtttacttgtttagatgagattcacgtgagaagttaattaaaaattaaaattaagaaaaaaaactaatcagagcatttgtaatttagtcttaaaggtgtgatgcaaaaaaaataaataaataaataaataataaaaaaaattacataaaaatatgaatgtcacctatctttttattatttttttagtagttatttaaagatttgtcacaaattgtacttttttttttttttttgagattttcttaattttttttttcttatatttgggcacacaaaataatatattaccattgataaccaattatcatcatgatattgttacttatattttttttgtaactaatcatgtgataactcgttactaatttggagaatcaactgctatcttggataaccatatgcttatattttgggtaactggcaaccatgcattatcttcggcaactagttacttatattttttatatagtttgggtaaccaagtactatcttgggtaaacagttacttatattgtagattaggtacttgtattttgggtagtcatgtgtatcttgggtagccaattacttatattttaggtaactaagtacttatatttagggtaccaagtactatcttgggatatcttttctaaacctgatactctttgggttaactaggttcaatatttctacttgaagggtcaagatttttaggtgtacaaggctaaagttgatccaagttggcattgaaagaaactcctcaggggaacaacctctagttctatgattcaagctgctccaagtaatggaagattcaaggttagtactcttgacaattccttgattgatgttgagaaagttgactacgctcgagttgtgtggtgcagactctcggttcttaaacataaatttattctgtagcaaatggtgaactctcagttgatgaccaggaataagtttcaagggatgcatctcctcatttctacagccttctttgcctgatttgccacgagtttttagaaagctgtgataatttattttttctctgtctattttctgttgcgctgctgcgtaaggttcatgaatggctcggattcacatctagccaatagtttttttaaattggaagtgttggtttgggtagcttg

SEQ ID NO: 23517 - DNA, 3952 bp, Cannabis sativa
  modified_base (575)..(575): a, c, t, g, unknown or other
ttaataataatttgatgactaaaaataaatataattattataattacatatttaatataaccattaaattctattttataaaatatatatataatatttgatgatttttaatttctagaggggttagaaaattagggtcaaatagtttaattaatgcaatttatacaattatgtaatgaaataattcatgtgagaggtgtttgacgttattgcttaataattaagtgataattataggttacataatgcaatatcatgcatgctttgcttaaaaaaataatattgttttatgttttttattcacaatatacttccctttaattaataaaagtgaatccttattggatgatgtagttggtgttcctcacatatattatttcaataaccatcttatcttctcctaacaaaagccaaaataatattgaaattttttagctagggatagatatttattggtttattttacttgactttctttcttcaaactatgtgtatataataatgggattatttcacaaatacacaacaacaacaacaaaatttgaaaaatacgatttcacagaattttaaatatntttacaattttttttttattttatttacaaaaaatacagttttttatgttgtactcttgttaatttattgttgattttttgttatatgtatgttgttttttgtttttgttttggtattatttaaatgttattttcatgttatttttatgtagttttcttattgttttcgtgttatttttatgaaaaattgtaaaaatgtacaaaataaataaataaataaataataccttatgtaactatccaaatttataataatacaccaaacaacaaccacatttcgtattaacatagttttcaatattagttggaaaacgaaacaaaagattatggttgttctacccaaaccatatttatttatataaacatatatgatcacaacctctcaacaaacatatttcttttgttctatatgtcaatgtaaccatcataattaatttaattatagtttgcaagaatttttttaataaaatggcgtagtcttagatcattaattaattaaaacaaaagagcggattacctatagttttccttggtgaaatatatagaaccagctaaataacacctaaataatatgatttcaatttttttagaatgaatcataaaactaatgcaggctatataagtagaaggaacttccaaaaatactataaaatatatagaaagtttataaaaatattgcaacacgaaattttttacatttttaatctaccaattttacaaaaataatgtatttaaagtttcaaaattacaaaaatacaatgtttgagtaaaataaaaaaagaaaaaccaaaaaactgaaaaataatcctataacaacttaataaacaacataaaaacagctataaaaaaaacataactacaaagcaacataaaaataacaaaacgttaacatctaattgcaataagtaaaataattaatatcaactcctaaatatgtttttgtattacgaattttgtttttacttagttttgacaatatgatttatttttttgtactattatattgttattttttcaagaaatttgttgttacaattttattctttcaattttttttctctttttctttttgagttagtgataattaaaaaaacaactataaattgaaaaataactaaaaaaaataacaaaataaatgcacatatatacaacaaaaaattgtttggaataaactgaaaaaatatactcaataaaaaatgaacataaactaaacaacaattgtacaagaagaagaatacataaaaataacaaaaaaataactataaaacaactatagaacatctaaaaaaaatagcataaaaataactataaaataacaaaaagacaaccaaataaaaaataaaaaaaaaataagacatcaatcttgttaaatatgcaaatcattcataaattaactctgaataaattataaaatatccaaaaatatatactactttaattaatcatgtaaatgataaaaaaatataggagtgctcttaatttttttataagagagaaaaagaatgttaagaaatcgagatataaaaatgtacatttattagaaagagagagagagaattggaaaaaaaaaataaaaaagagaaatagagagagaagataagagaagagaaaaaaaatagtgtcactgacttcaaaataatactaaaaaaaaaaagaacaaaaggtgacctaaaaacttttttttttttttgaagctttaataagtaaaaaataataaagaaaaattaagtagggaaaaaataaatgtaaaaaatttcttatcaaagtaaaaaatataaagtttcgaaaaaagttaatatttagtataaattttttataattatacacatacatatgtagaaaaacatgcatgtgtgtagtgtgtaattcatgtctatattagtctttgcacaaaattagacatcaatataaaaatatatatataaataaatatttgagatatatatttataaagttaatatactattaaagtatttttttaataactcggaaaagtgtatattactaaaagagttaattgtggcataaccttcagaactcaaattttgactgtaaaatctcaaaaactactgtattgttagcaaaacatatctgtccccttgaccccgttataatttatctgtgtggctcatccaaccaatgctaggtagactgatacatgctatgttattaacaattaaatgacgtggcatgttaggaaataaaattaaaaaataataattgagtttttaaaaaaaaaaaaacaaaaactaatggccaattaaattaaagaaataaatgaaaataaaataaaatgaagaataaaaagaaaataaaataggagatgaacaaaacaacaaaattaaaagcataaactcaaaacctccaaacccagatcgacaagttctcagtggcgacgatctgggtttgcaaaggagaaaaaaattctcaaacctattttcggtgaaaagtaaaggaaaccctgcggtcgaagtcgaacagaagaaaaagaaaggttgaaccattaggtacttgtatttatgctccattgtggaaggtgaagatcacaaactagccaaaaaatatccacggggcctcactactacaaatgtcgtccccctagagttgcacaaatgacctccatctttagcagctatccaaaattcggtgagctccatctttaccagccatcaaaatttggtgaacttcatctttgctgaccatgtggagcttcattcctaaaaggtcaattcatcccataaaatccttacttatctttgaaatttctaaattctttcttaactgggtatagaaaattcataccttgaaactgccaatcggtccattcacaaaacttttcttgggttttggttaatggagtcaaatgggttttgatggaacaattccatattaggaactaatgaattgaaatataggtcaaacatactaagaactcaaatggtggtggacgcactgaaatcgtcgaggttgtgatgccggagcagagttagttgagtttaggagaagaaggtggaacggtggttttactgcgtgaaaagttactgggattattttagaagaaaatgtaaaaataaatataaaaagtttaatcattgtataattaaaaaaaaatggattttttaaaataaaaaataaaatattaaataagtgggacccacagtataattataaattaataacaatctcatacactaaaccacattatagtatccatgtacccattttatattcacaaaaatgtagtggaacccaatttataataaatactcagagatagaacattttcaaaatttcccaccttaaaaaaatcctataaatatatacatgttataaatattaataattatgtggatgtccaaatcttttatttattacca

SEQ ID NO: 23518 - DNA, 2077 bp, Cannabis sativa
  modified_base (1693)..(1716): a, c, t, g, unknown or other
taactctcttttgactgtacttttaaaagattcaaactatatagctaggtataaaatgaaccaattaaaaactacctatgcaaaccattttttttttttttttgatataattcatgagtttttattttactcattcaatctctctaaataaatctaaagtttcgtaaatacaaatagataaaataaaattttatctttggtaataaagctttatcaccaaagaggaaaaattaataagaattttgtttttatgttattttagaaaatgttattttatgtatgtacacggtaattatttaaggtatatatatatctttgaaagttttgaaaaattcagaataatttaacgtgcaataaataaagttaaacaatttgttgaactagtgtttctttcttttatatataagtgtgaaataaaccgtttgaactatactttatgcattgtaaaatattttaaatgtaagtacgacattaattttttcagtttcataattgtaactggttacacgacattgtattgctagttttaattttcaatttcatagtgaccattgtcggcaactaaactaactaaaataaaatatgataaacacaaaacaataactagtatatatattatgtctttacaattaattaaagttagacaagaaggacaaataaataattgacttatacgaagttgatcatgtcgatcgtttattgcagtattatgacaacatttaaaacgatgtgtcctatatgagcacaactaaaaaaagaacttgtgttaatattgaacgccgtttttaatctctggaaatcatgaaatgttaattggcctaatataaaaaaaggaatatttgacttttctctttatcagctgagaatacaaaaaagacaatgaagaagaagatgcaacaatatgcataataatatgtatagaagaattgtattataatggttcttaatttcttgcatgtaacatatttcttcatatggatatatcgaccacgtacgtagacgacccagtccaacgttgctatatatgtatatataaaatcaaagttaagacgactgatgagtcgtgatggagttgattgttcacgcgggtaaaacttaatttacgcctaatttgacttttattttatgtacgtattgtctaaggtcaaaatcctccttgaccgatttggacgttgtgatagtacaacatttggattttgtttatgtaataatatgtactatttctttttaaggaagatatgtacaattcttatttcattcatagtaactagagatatatagaaagttgattaattccaggatttgaattcacactttggtggattatgggactggggggataatttttcaaaaatttatttgtataatcctattaaaattattagctacaaagttgatgattgatctttattattattatatttttattattattataataaatattttttaatatatagtgttctacctatatatcaatttcaatttttaatattttacttataaacttaacattataaatatatgtagttgattattttctagctttatattgtgttttacaatttatagaatataaagcaatgatttcaaacatatatatatatataaataagatagaatatttattttaaatttaaaaactttttttattttcattttaaattgtatatattacattattattattatnnnnnnnnnnnnnnnnnnnnnnnntattattattattattatggggtattcaatgagtctccatacttattaatagagattctcctgataccccaaacccgtagaaaattaaatcagaaaaaccagttaaagtaagaagcaggtaagttaacaaaggaattaacaatgaataaaagttagggctttcgatttcaattgcatctattgattatggtttaatatgattatcttcttattaccaatttctatgcaatagcaggttaacaaaggtaatttacactacaagaaatgacactttatgtgctggcaaaagttggtattgcgctggtaaaatagaatttacctatgatgtgctggcaaaagggggttggcaaatcaatgttgg

SEQ ID NO: 23519 - DNA, 1308 bp, Cannabis sativa
tattaaattattcacattttttatataattttaatctatgttttgtagtctttttcatataaacaaatcatataaaaaattataattatagattagtaaaagaaataaaaaaaagcatatttgtatgcataatattgtaaataaaaaatagagctatgatttttttttttttttatgattaaatgatatgagactttgatagtaattaacaaaaaaaagggacaattttgtaatttattttaggaagttcaaagccagatatacaaacacacacatacacaattactagcacacatataataatatcatcacagataaatagaaggactcaataaatatgctatgagaagcttttagttgtagcttggatttagtacaatgttgtagacacaatttagaaatggatacgatatgtgggcttagcaagcatgtgattagctctacccatggataaaccaaacttctcaagcatatcaaggtctttaggatttgtaccactaagaagctcccaattaaaacaatgcatcaattgagcaataacaagtcgaacattgataagacccaattgcattccagggcaccctctacgaccgtacccaaatggaagtaagctaaagtcatgccctgtaatgtctctattaatattgctaccaatgaatctctcaggataaaattcttccacattttcagaccacacatttggatctcttcctattgcccaagtattcacaataattcttgatttctttggtatatgatatcctttaatagtaatatcctccatagattcacgtggaattaataatggcccaactgggtgtaacctaaagctttctttcaccaccatatctaagtactctaacttccctatatccttttcttccaccatttgatccaacccgatcacactttttagctcatcttgaagatttttcatcactctagggttcttaagaagctcagagaatgtccattcgatagctgcggaagacgtatcaaatgatgcagcaatcatatctagtaaaatggctttaatgtcaactcgatcaattatatggactttctcatcttgagaataattcatgggttggttcattaaggagatcaaaatgtcgacaaaatccttatggataccatcttgttttacatgttgaccttttattaatgacattgcttcttgttcatgctcagtaattatcttctctagtactttgtttatgttcatactaacctttttcatacgtcttgtataaccctaaaccaaacaataaaaaatcatgtagttaaaatattatatgtatacatata

SEQ ID NO: 23520 - DNA, 1962 bp, Cannabis sativa
tgctatgaccatgagacaagcttacatcgtcttgaaaagagatttaaaatgaaagttgaatcaagtcatttgaaattttggataacaattgagagagttatgtctattttactaaaggattgcaagtacattttagctccaagtctaacatgttccacgtcatcatgccaaaaagtggcagtggtcggtcgtgtatgttctcgaataatttcgggtgttttttgaatttttttatggtgaatcatattttgtgtgttgaggggtcccgaagactcatttcgacatttgaaaccctaactagagacctctaccatcttttggtgccaaaagatggcagtgttaggccagggctattgggaagcatttgatagtgtttcttgcttattttggtcatatagatgctagacaaacactttggtcacattaattcggccaattggcggcagagatcactgccatcttttggtacacaaagatggcagtggtcggtcatgggggttacactccctttgaagactagctaacagagacaacggtggaatgagcctcgattgctgaagtgaaatctcaacctctttggttagaaattatattggaattattaatttctatatacgagtataaatggaaataaaagaatacaaattgagaaaatgagaagcgaaatcaaaaccctaaatgtcattgtcgaaactctctgtgagtgttctgtgattttgtttctctctctgtaattcaatcttcgtcgtcgccgaagctcttggttgaggtcgagtttgaggggcaagtgcgagcgcgaatgagattcggtcgaaggaatcgaagaagcaaccactatccttttacaatttccctgtcttggtttggtttttaaaaggcgttcaaaataaggtgtttttctcatctaaaatatttgattgcttctgtaatccttttcaccagtgttacaaaataatgatgtggcattttctgtgtgacgacacttgattgggtctttaaaaaaatgttttttttcaataataaattgttggcaacttattatagtaagttataaaaaatgtagtgatcgtattttctacttatgtatatctagggtgtgcgtttagaagtaactgcgtaaatattagataatatataatagtaattatttatgaattcttaatttcttatttagtaaaatagttagtaattatataaaaaaaaataatacattttaatacataatatttaaaatagaaagtttttagtaattacacattataattacaccgaattctcatgtgggcatgagaattagagagtgtaattaaagtctattaattatttctaattatatagttacagtataattatatagttagacaaatacataaaattgtagaattactttcatttacactcaattccaattttcttttagttttccaaacatgcccttagattgagaagtggtttggtgatgttatatcaaattgattaatattttattaaagaaaattaagataggaaggagctctttcctaagtattaattatttgtggtattaattgcagctatacatatgcatgctattaatatactcattaattattagatattattacaatatttaattataattatgacaaaatgtccctaaaattttacacatttattgttgaatttcatctccaacttcagtttactttttccttgccgatttctttaatattaattatctcttcaagtggctctaatatgcacaaaccatgcactaggactattattattgaatttattaagtccagctaacaaaactaaagtataaatataaaatgtggattactacaatttcttagacaaaataaataaaaaatgcttatgtatcacttacaacatttttatttttttatttataaatttccatattttttttgaatgcaaaataattatcattaagttaatgcaaaaaaaaaaaaaaaa

SEQ ID NO: 23521 - DNA, 1214 bp, Cannabis sativa
ataatacaacatacattgtataaaatttttggtggtaataattaatacaatacattactttatcaaaatatagtgttatttattatgtaatataataccactcttatgcggcagcccaaaagaggtgtatgagtgcactctaaaaccaccgagaaattaagttataaattgtatgttttggctaaaaagataaaaaggagagatggaagaatcttagttgaagacgtgactatgtgttcatttggtaataatgtggtcggacacttggacgtgaataagagaaagatgacgaaaagctggtgaaaagccagagattctagtgaagatctataacaatgaaagaggaaattagagagaaaacgaaaaaaacaaacagcgaaattcacagccttttgttcaggtgtcggatgtggtcagaggaatccatgtgactgacttcgcaaacagccactgtgattataatcatcaatattgaacacagaacacagtactataacatataatataatatatatgtgtgtgcgcgcgcgccaagtatggttgttctacttccaacaccaggttcgtagataatgagctatttctgttttccttctttactctttttctattttttttttttttaatttaactcaagtactatttacctaacaacaagcatctttagaaactcattaacccaaaactcattaacccaattccgatgagacattctccaaggggtttttcaaacttattggttctcgtgtatcaaggaatatatcagtaatgaaaaatattattttattacacaataaaaaaataggcctattaccgcgggcacggctccctattttgtaccggctgattatttaagcgtcgagatttaatatggacctacactactacaaaatacataatatacgtcagttaacgcgtctcatcaaaatcattgaccgaggtaaaaaataggtcaagattttatgcttttgtacataacccaagctaaaagaaaacaactattgtcagctagtatagtaaagctaaaagaggaaccgagaaaaaaaagtgaaaaatttaaaaattgtcttttactttttgtttcagtggaaaaaagatacaaatttctttagtttcagttgtaaaccgaggttaaaaaatttgcgactgttattcgcggaagcaaaaatatatttttttttttatatatatatataagggattatttaacaaaa

SEQ ID NO: 23522 - DNA, 5163 bp, Cannabis sativa
atcaaattgtatttaaaagtaagaccatgtagaatattttcaagaatacgatatggagctaaaacaattattccagtgcaattaattttggtatgtaaaccagttagtaagagtactgttatccgtttttttggagaagagacatgtggtgtaaccagaagataatcaccatctaaaactaggtttaagacttccttcttgcagaagcccaagccagtcatggaacgggcctaagcccagtgaagactcaaagcttcacctccaagacattatgtttgtccaagatctgaaatttccctactcttttgagacacagaaggaatgaagaccttcaaatgaagataaggatgcacctggaagtagaccacgtaggaaactcttagacacctactaaaaaatgacagtcggatgtctatctgggggtgagtacgggatgtgtaccgcgagacgagaggtggatatctcccctaaaatgatgtggccacctctttgacacatgatcaaatattgtcccctgtgtcagatcatggtagtgtgtgcaccacacagcatacaccccttttgtctgacgactcccctaacacctttgtatgtcaggcatgatctttatgcaacacatgtcctacaccaaatggtcccctcatcagtacaaaaccattgccccacgaactggatatccttggtgggcctcatagtcatgtatttgtgtattatgccccattagggggctcacttttacaataaatcatgtatgggtcacaggtattcccaaacccgaactctagcctatataaaccctcctaccctttcttgcaaaagggacaaaattttagccaaagctctgctagtttttattctaagattttttcttctccaagataaatctagagaaaccaccttatggcatgggttagggttccttattttaaaagtcatttgtaatacatttcaaagcctaaaagtccaatacactgagtcatagattagggataattaacgtctgaaccatgtaaaaatcctccatttcttttacttaatatttatttgaattcttgaaagctctaacttgtttagtttctgaaagtctctgtaaataagtatatttttaagataaggattactatgagtgtttttgaaacaaaaaagattaggacacacatgatgagtggatctagtatcaatgatccattcagaattgtgaataaaagaattcttaccaaaaaatgtgacactataggttgataatcatgagtattagatgaagagttgtctgcaactttctgggcaagtaaggccattagcttttggcattgagagctggataaactagacaccaagtatttctctcttggcatgtcttcaatcttttcttcttcaccacctgtgaagtttgctgatgcagatttccctggaggtcctttatcatttctattggggaatcttccatgaattttgtgctccaaaggatagccaatgattttgaaatatctatcaatagtatgtccagacatttcacattgcgtgcaagtatatttaggtcaaaaaggttagacattaccaacaaagtgtccaatagtgtttgatgaggatttctcaacttcagaataactacttacaccactagttagtcctttctatctctcttcttgaacaataaccgcataggcttggtttacatcaggaagaggatcacacatcagaatctgagatctagcaatactatatgagtcattcaatccaactagaaattcaagaaatcgatcttcatcttgatactcttgaatagtcttcatagcaccactactacaaataagttgtggtctatactctctgataagatcccatagagacttgagttgagtgaaatatatagtaacactgctcgattctcgtgtaagattctacaaagttttctttgcctcaaaaatccttggagcattttatcattgaatctttcatgtaattcaccccagattttagtagcattgtcgtgatacatgatcctatatgtaatctcactagattttacatgaagtatccaagaaatcattgcactattacatctgcactagctgtcataatcttcatgatcctcatctgtctgtggaatttttccaaaatttgttttattttgagaaacaaggcctatcatcatcgatcacctccaggtgctacaattctcacttccggtgagaagtttagaactaacacgactcttggactatcactattagaaaagaaggaaggattggaatgataattatcattcgttgatcatgaattttcaccaagcactgaaaattgattcgaatcatttgagttatttttagaattgcgtctgtttcgagtttgaactccttctttgtgtgccataaccatgaacaagagaatgaaacaaaagtctttaccgagttttttggtaactaaatatttttagagcttaagaaagtaataacataataaatagcaagataaaaaataagagatttttacgtggttcatgggttaactatccttaggccatgagtccattttattaggttcatcggccagtaactgtttatacaaatagatatacaatggacttggaactccttcccccgtgtttctcttgaagaagagaaagcttagtaggaatattctacagttggctgtaaggttatacaaaatgttttttcttaggatgacaaagaatgagtcttctctccgaaaagaggctcctcccccctcttgtgctttttcaggggtatttataggccaaattctttgcatgtgctgccttaatagatcatccttggggcgaagtccgactgttggattggtaggtggcatttttcccatatggcatgtaagggcatcagatcatacaggttgggcctcatacgcgtgtcatcccagggcttttcctttttgaatatcccttatccctagccattggatcatttgctcaagtacataaggacgcacatgctctatacgatagcatgttgtgggagacaacctctgatgtagtacctgaaaaagcctgatcacataaattgtagtctgacacgtatgggcaaagcttccatgggccaacggcgtagcccaatttagcgcatccttgaaatgccttggccctgtagggaaaatccatactcttctcgggagcatatggctttggttcctagaacggagggagactttggctcacggataccctcggtgttgctatcaattagggaactccctatcatggaaactcttcccggaaatttatggcccttatcttactggagcattaaatgaggaagttggtccgctaatgacttcttagtctttcttgattaaaatccacgtgtcatgattacgataatatgaataacatttaaccataagcttctagggcgtaccatggtccgggggcttacagtgtcttctactgagtgatttcgagcacgtggaatttatgacaagctctttattacgatacgtcattagtcgccaactgaagtgtcactatctagaaggtattattaccttcgttttctcttcagggctttaaatgttgacttttgagttttgcgcgcatactaggcccgtatctgtgggatgatcaaaaacgacggtgattagatttgagcaaactttccatttgtcgagcacttttcacgatgcatgcaatgatggaagccaaccgttgggaggtgatacaccttcctagcttcccacttatccaaccagcagatgctctttgggcgatcgagttgaaccgtttgctcctcgtggaaggcgcctctttgtggtacccaataaatactttcagcagccatttcataccttacaatttttctgcctattgtactagagttcttaacatttggtttcatcccttcttctgccttgcaagatagtcttaataactccatacccaggcatgcattccgccggccaagaggcaacaccaggatcaccagcctcatctcctcttaataactggtaagttttcttcaccatttacttattgtagaattcttagggagtcataagggtgcatgttgcgtgggactacctgccctgggaatattaacactgtgcttggagtcttagagagtactggggtcctatgctgtgtggagccgttttgcttttgtaccagtgcctgacaagtacattaggtctgcaatggagaggatcgattcttctaaagcggcatgcggcagtgcctctgacagaaaaaggcaaaggcttgaggtagccacttctaaaatgtaggcccacccccagcatcatgatccaccactgaggctggggcagtctaagtcacaccatccttcggccattccaaaaatacccttagtgggattcactttcccaaggaagaccattccttttaatcctcttaacatgaagaaggagagggaagtgaacaaggccctgaagggacacttggaggcgaaaaagttacaagttcgtagaagggccactgtgctctcagcggtctgtaaggctaaaattttggacgacatgcacaccttgccctttgctaggccaactgtggaggttgaagccttggaaaagtgcctagcttttaaggtagagagtgaagctgcccctttgccaccgagcttctggatcaaatggctgggaatgcttcagagctgcccatggagagctgagcatcatgcagcagcgtggacatctttgtactggccaactctggcaagcagcaggcggtcggggtaaggccccaagacattttcttcctcttttctttcttttttgttatgttatgccccttgttttgatatttagcttctttaccttagcctatttcgacaagtggccttactggctgagagaactgccaaggaggccagtacgctagtgacagagctagagcaagttaaggggacaaccgtgacttgcacaatgccaacaaaacccttttgcctgaagaaggaaaatcagttactggaggccaactacgctcaacagactcgccacatatggggtatgagggtcgttcatgacctttaccaggagacggtggagcgattgtttggagcagagtcctccaacccatctagtgctgcctagtcttgaacgtcaacaggccctttcttaaattgttgtttgtttgttctctttttttatatatcttccttttgctacacttttcaa

SEQ ID NO: 23523 - DNA, 1728 bp, Cannabis sativa
atagtgagtgttcattagtgtttcccagaatgacatttttaccctcgtgttagtgatcaacaacattaaaggggacgggttattattggaaaatcagtgcttttcccgctttttaacgactgacagtgtcaatatcgtaataaagaggaaaaaccaagggtgaattggtaaagagattcaaaattcaaaaaagtaaaagattcgaagagatccaatgctatgaaaccggattaaaagaggtccgtttttcggtttctgaaaagactgttttacccttcggctaaaacatcacactaaactggccgcttaactaccgtagctgaaaatccgaataggggtagaatagtaaataaacaatccgccgatattccgatttgacataaatctaaagcttttttttaatggcatttgagtaaataaaataaagaaagatgggtaattaagaaaattccaatctaaacagaattaattatccttgggaaaatagagaagaggagatgattgtcggtttgttttgtcataaaataaacatttatttatttattataataattattaattaattatttggtgggtgggacccacaaatgggtaggattttttggactgacaaggcaaggaacgtgatgatgagtgagagagaatgaagagaggactagactaagactttactacatctttgcataactacacaaaaaggaaagccaataaaaattgataattattgtaaaaaaaattaatggctaagattttaggcattcaattttattgcattgatggtttaaaaagaaaaaaaatatatttttttttttgaatcaaagatggaatttattcaaaaacattcagaagatataatattctttagagcgctatgagcatcatgctcactatattcacaatctgacaaataacaagaccctctagtaacacaataagcagccttattagcagatcgtttaacaaaaatcaaataaacactagtaaaagaagaaagcatctcatggcaatcccgagctagtaatctaaactgagaaggcataagaatagagctattaatagcttgaaccaccaccaaagcatcagtttcaattacaacattagtccactgtttcttctttatccatctcaaggcttctttgatcccaattatttcaacaatttccgccttgactaagccaaaacgacttacagacaaggccgcaatcaaacaaccattggaatcacgagccacacaaccaacaccaaacttgttttcagcttcaaaaatagctccatcaacattcaccttaaccgtattgaacgcaagtttcctccaacgctcacatgcattattaattacattaactagcaacgcactacctttttgagattgagcattcttccattagtcaaggacaactctagctgaccgaaccacctccatagccgaacaagttttactattccacagcacatcatttcttgcagcccaaattttccaaccaaccattgccgcttcacacaccaatacccggcgttgagtttcagcgacattaaagaaccagctaccaaagtctacccctaacccagcagccatattaacacctgaaactctccaataagattgagcaaagccacactgaagaagaacatgatgaatggattcactagcaaggttacaaaaagggcacatcaaatccacattcacatatttttgtgtttaactgtgtcttagttggaaggcatcct

SEQ ID NO: 23524 - DNA, 2248 bp, Cannabis sativa
ggcgggaatcctagtttcaaaaaactactatagatagaatccatgaaattacccgagaggggtagctcaaatggtcaggcatgtagtttgctcccagtaggtctaagattcgagtctttgttgggtacctacataacaatcgttatagtttcttagtcttcgaatattgtagggttagacgaggcaaaatccatgaaatttcgagtgttaagctactttgattgagtaaaatgcagttaaggattcaatttatctgtgtgatacttacttgggaattatgttttttgttttcatgaaattgtccaatgcagcaagaacaccatcctcatcagctttttctaatgtaaccggtgtcattgatggtaagttcgaaagtggatatcttgtatccgttgtcataggctccaagcgtctaaaaggcgtgctctacgagtctccacacaatccatctccaatgcaaataccacgacgagtagtaaatcaaccaacatccaacaaaaatgacaatgcagctgaatctgttgtgcctgttgttcgccgacgtagacgcaggaagaaatgtgagatcaaaaggagggatcccgctcatccaaaaccgaacagaagtggttacaatttcttctttgcagaacaacacgcgaaattgaaaccacttcaccccggtaaagacagagagattagtagaatgattggcgaatcatggaacaagttaaatgaaaccgagaaagctgtaaggaacattacccaaatcgagcataattctaatttttttctatcacatgagcaatgtgggacaaaacacacacacagaagtctttttcgagagaaagaaagaccgacgaattaacatgactgttttgcaggtttatcaagagaaagctgtgaaagacaaggaaagatatagaagagaaatggaaggttatagggaaagattaagaacaggtcaagtgatcagtcatgcaattcctcttcaacaacgattccccgagcctcgtgctactatcactactactgctgctgctgctgctagtactgtggaagtaaatgcaaatattaatgatgagactgagtgtggagagtctcaaactttagggaatgagagttgttcaagtaaaagtgattctgaagttgatgtagaagaatttcaagagatagtaatggatactaattctaatatcattggcattgggaagattactcatgatcatgatcatggtcatgatcatgatgagctgaagaatactcatgatgatgacaaagctgctgagattaaagatctaaactttggactcaaagagaaggagacatagaaggaagaagaatttcatagatttttatcaaccaagtttaaatttttctgtttttttttggcatttaatattatagttttaattagatatttagatatatgacacaatgaagaagtaacccttcttcttcttcttcttcttcattaggtgtaagtaaaggtggtttattgtcacaattggaggaaaagttttagaagacctcaattttgtagtgacaagttttggtatgtacttggtactatggtctaattatagtaatggataagtttcttttttctattagcaattttattgagcaaagtgattggtaatgttatttggtaacttactagtttggaagtttaatctctaggtttatgtttgcaactacttttaatttagtttatgaggaagctctttctcaaaagagagttttaataataagtgtaaataaatactcaatctgcatactttaatatttatttttagtagcataaatactaaatatttgtaagactgtaatttttctttaatttcgtcttctgttttgaatttattaaaagaacatttggaagtaactgatactatatgtttctgtttatactcaatgatttagaatttggactttatgtgtaatgtttaaggtaataacagagtttgtatttgtatacatatggtttacatatgccgctaaaagtatacatatggtttatgccacctacaaatttaaaagtttaggtatttgtatcactattcaccctaataataattataaagtattatattgttattagtgtaatttaatattgagtcttatttattttatttaaataataattattttgcagttacttataatacttaagtcttgatacaacgcgaacacaacctataaacacgaattatcactccaactccaaatgtggagaaattaatagaaaaacaaatagaaaagaata

SEQ ID NO: 23525 - DNA, 3118 bp, Cannabis sativa
ttttgtagtgatttatgctgaattaggctagcaagatcataatcttactcattactctctaattaatcccataatatataataaactctaattattcacaattaagttttagaatattataagatatttggtgatttgagaaatatgatggaaaattagtaaaatatgtgatattttatatggttaattttgataaaactgtgtgtacacgtacttgttatttaattataaattattaatgaaagagtaacaagtaaattgacaatggtcgtgtgtttggaacaagtagccgcccaagcatatatctactagtccatttggaatgtcatatataatttgtcttgtctcaattctataaataattaaataataacaatacgtacatcagagaagaaaaataaaacttaattatttttcttaatttctttataagaaagaagctatttttctccttaatttgactttatacaaatattatacaaggatatatagtctcaaatgagataccaaattgtgtatatatctaaattattattcttgaaaaaagagattattgggtatgacccaagttgtttatgattatgagcaacctatatatatataaaggcttaggagaagttgatcagtgaagagttcttggatcttagattgtagtgagagagaaaatgcatgcttactgttggtgtgagatgaatatctcgaaagtgtggtaattgatagtctgtactaaaagtttctcatttgaatcgtaatagtacaagaatctgaatccattattgggagttcagaaagaggaataggcttaatttccaactttggagaaattggcaaactctaattatttggttgtgcttttttttttttattttacttctttaactagctagttcgaattgtgtgattattaattaattattcttgtgtttgtgctgcacaattttagtttattatgtttaatttgtatgtgcgagagatttgacttgagattagtgttagattgaatttcaaaaagagattaatcacctctttttattgcggaagatatataatttgtaagaaaagtaactaattacttaataaaatattgttcaattaagcgagactagatccatactgtattaggtacggacataagataatcctctatatcaacataattgttttgttgttacatcttatatatatataaatataaaaatatatgagctgatcctaattatgctacagtgatttatgcaataattaaataagttatttatttttatatatataagaaaactattttatgagaccgattctactgcataattaattacatacataaaatcaaaaaccaacatatctgttgtctatatattcttatatatgtgccatcacaaatcatcaacataaacctttgatacatacaaaaatgaaaatacacatgcagaatgaatgggcctcattgtcaaaaccacaatatattttagactgatgattttttgttaaaaaaaatgtattgttcatacacgtacgaaataataaagaattataacaaaacaacaaaaaataaataaggtagaaaagtctattagaagatcaatttgtttctattagtaaattatatacaaattaatggagaaatctacaatctcaccacagatcaaagcagtggtcaaaaaagacctatatcaacacagatccatgcagtataatattcaagatataatagagcatgtttaatatacatagtgcttgttaaaaatattttattattattatttaactgtgttgtattattatattttctttatatatataaaataaatgaaatatattaaaaatataatttttaaatgatgtaaagaaaaaaaaattatgtataagtgtgaggtaaaataaagaaaattttaataaagtattttgaagaataatatagagaaactgagataagagttctctaatgatcgatgatgaagaaaacacaacactaacaactagcaagctagtaataaagaataaaatcaaataaaatcaagaaataaaaagagaaaaagaggaattcatcaccatgaacaaactatatactgatgtacattaattcattataagcaaaacgtaacttagtgtgtttccacatccatattggaagattatgctagcccatataattatataattaagctcatgaccaagtatgtatggatccaaatcaaatttaatgtaagctctttgaattataataaacttcttaagtaatcttggatattataatttagtaaaatattttaaaatgtatggggccttgagtttaaacggccctaagtatgggcctagtccgctttaatttaacgatattttattacatatactaaattaaaaaggaaataggaatatgccttcaaacaaaagaaggaaataggaatatgccttcacattttatgttgtatatgtagcgcaacttggcagggcgtttatttcgggtattaaatcatataatttattaattatttttattttaaaaaataatataatttaattaattcattataaggaaaactacgaaaaaagtgataaaattaattaataataaataatttttttaaagtgttgttgctcttggtgtttggtggttgaaacttttttctaaaaaagaagtagttttttttgttttaaaaaaaactaatataataagtaattaaatgtaataaaattaattatttattaagaagtgccacacaaaaaagttgcagcatgcatatgaaaaagaaatcaacaacttaattataatataagaaaatgcaaaatatgatatatatttatagatgatgaagattttatactactaggctgaatttttctgaaataaattaaatatatttacatacccttaagttccatatatcctttaaataagtaaatggataaccaaaattctggagcaatttaaataagcaaaagtctcataataataataatctgattaattataacatatatatatatataattaaccaattaattaattagaaggcacccacaaggctatctctgaaacagcttgcttgtataattcttccacagaattgaaagcctcaaagaactcatctgaacccactccactaacctgttatataca

SEQ ID NO: 23526 - DNA, 2904 bp, Cannabis sativa
ctaatttgtaagatttattattagcttgattttttttttttattaagaattatttcgtatattattttttttaaatttttttcttaaatttatggtttgagtttctaatgtggttgcagagctagttgcaatgagagtttctatacgattttttgttgcaatttaggctgcagcgctagttgcaatagaaatttctatgtagaattccgtgaaaatgtaaaaaaaaactattttgaagtataaaaatgaattttttttttttttggattaaatttatagagtgttttaagtaatcttagctagggtgactattctttattgatgaataatgtagtcaataatttttctaactatatatattttttttttgaatgattctagctatattattttgtttgaactttttgtattaaaaaaaacaataatatatttttggaataaatataatttataattaaacccttaaaaaaaaacaaaaacaaaatacataacggatctctaattaaaacctaatgacgttatgaaattcaaacatttttataatgcagttaaaaaaaattttataatgtatgttaatattttcttggagttctgactatttttgtcaaatattcacaaaaagtcaatattaattaataggttagttaagtataattgtttgtggtattaaaaaaaagtataattgtttttttttttcttttttttttccttttttaaataacaatatatttacaaactaaaaggcaaaaactacaaattttcactaattttagcgatttgaatagattttatagtgattgaaatcaaaagtagatattctctgattatattaaaggcataatcaaactcattaatacacaaatcttctttttaacaaaagaacaaaaaccactaattaaaatgagaattgcttagtatttttcttttttattattgctattagtataattaagtatcgagttactatttaatcttattgtacattattagtgcccaagaacaatcatcaatcaaaattaactaatcctcaatcaaaattaactatgaagctaagaaaaagaaaaagatgcaaatttggggagaaaaaaaaataaaaaatcagaaagaatatcccaaaaagaaaaggaaaaagtaaaaaaagaaagaaaagggaaggttgtctacgtatgaagagaacagctcaataagaccttccattccactcaccaataaaatgagctgcccattgcctttgtctttctcctctcattaccccttttttagctctctttctcctatagctgtactactcttcttcttcactctctctctctaaccaacaagaagaagaagaagaagaaacagtaattgattttgaggacccaaaagagaaaagaaaaaacctttattaattaaaaatggtttactctcatttggggtgtttttgtatttggggttggtctttgtttgtgcttacagttactcttgttaatgtttctggttcaactagtaataataacttgcccatcatagcttttgatgaagggtacacccaactttttggggatgataatctgattatccatagggatggaaaatctgttcatctttctcttaatgaaagaacaggtctgtaattttcttcttttcatttgcatgcctcttctattttaatttttcagtttctgatttgattttcttaactgggtgtgttttttcagggtctggatttgtttctcatgacctttatcttcatgggtattttagtgcttctattaagttaccttctgattatactgctggagttgtggttgccttttatgtgagtaatctttactctcttattattattactttgttttaattaaaacaaaagattagtcttttttgttaatgaaaaatgttattttgaagttttaatcagtttcaagatttaatctttcaagatgggttttctcatagtcttttctgttattttaataataaagtttcactttttttcttattaacacatttttcagatgattcattcttctcctttaagtttcaagtacatataatcccaattacagtcttcaaaatttgatcttttttcactaaaaagtaaaaccccttttcagtttttaaactttaccattgattaaaaacatatcattagttctctaatcctatttatgatttgtttcagatgtctaatggtgacatgtttgagaagaaccatgatgaaattgattttgagtttttgggtaatataagaggcaaagaatggaggattcagactaatgtttatggaaatggaagcacaaatgttggcagagaagagagatataatctatggtttgatccttctgacgattttcatcagtacagcattctctggactgattctcatatcatgtgagccttgtattttagttttccaatgttttaattaatattaacattgtttatttaatttattttctctctgcaattatatcacttttgcttttctcctttgttattattatttttctccaattggatatatatgatgaaagtgatgtgaattgttgtgttgtgcccctttgttgtagggtatatagatcagagctcttgttttggtaaattacagtactaaagtttcttcctttttcattcttgtttgcctaaaattacatcccctctttctcccaaaacaaaaccactttaccatattactaataccaaccaacccttttaagcttactagttaacacttgtactaatcaagtttatgctttgttttgtgttattattattattatttggaaagtttctgactttgttttctttttgttaaattcagattctttcttgttaatacttcccaatcaagtttcttactttgatttcttttgttaatacttgtactaatcaagtttatgctttgttttgtgttattat

SEQ ID NO: 23527 - DNA, 3369 bp, Cannabis sativa
  modified_base (2282)..(2283): a, c, t, g, unknown or other
  modified_base (3288)..(3315): a, c, t, g, unknown or other
taaaataaaacaaaaataaataatttaattataagtaaaagagtgtataaatatatttatgtgttttattagtttttgagttattagtagttttggggaaatgttatgtatctatgttaatgggtattaagttccaaactatgtgccttcctaaactcaaggaatgatcatattattataatatttgttagtttgatttaatttgattaaataagaaatagtggatgcatgttatcaaaatcgagtaagataatttccaatggtgtttattttatattaaatttagtttaaaatttagtttaaaatatagtcaatatataactcaagatataaatttatgagcattgctattaggcattagtggtgcctaacaccttctcgacatgttacgttgtgattggctagcgatactctctaaaaattattatattaaactataagacccgatactttgttggatcaataacgatactgacacataagagagtgttaagcaccactggtgccctttaacatttctctaaatttatatacaatatagaataccataataattatataataattgtgcatacatattttttttgatccatatcaattatcacaatttgatagtgtaatactattaattaagtctttttctatagatctctaaattaagagcaattttgtttatctaattattaaaagtatataattgtgataaaacaatatatatttatagagttagaaaggaaacttaattacataaccttaattggactgaatctgctcatcaaaagtttcagttcattaaaaaaactcacatttctgtttcaaccagactttacacacatagatgctaagcccattaactattgattactaataatataggctaacacaacaaaagaaataactatccaaccaaccaaaattttcataaaactaataaaaatgatgtaaacccaaataaaaaatctaacacaaagtgcaacttaacttcgaaaaaacaacatatttaataatattttattaaaaatattaaaatgagtaaataaaatttttaaatttttaaataaatagaaatttcaattgatagaaaataggtaaataaaaaattattctatgctaattttagctcatactatatttagtactaaatttgaacaatttttataatgttaattagattttgtttagatgtgctaatatataaaagatgccaaaggaatttaagaaaaggaacaatttagacccctttgtgctaatataattgttctatgtcggttgagtgagtgaaaaggaatttaagcttggctagttagacccctttgtgtatccataaatgcactatatatttattatatatcaatttaaatttttgtaccctgaatttttatatatatcaaatcatattttttgaatttttcaggttgttagaaatttcttttaaactattgagattgttgaatttaagaaattttgttcaattttaccaatgaaagtttgacgtgaatggaaattcaggcacaattcagtacatgccaaaattagggaggagcgattttgtagatatcaaagttcaaggagaacgatctagtacatggacaatcgccacataagtaaaattgaatggaattagataaaaatctttaaattcaacaatttcaataattcaagataatatttaactgcctttaaaaataagagcataatttaatacatgttaaattttaattaacattttatatataatagaaaagtaataataatatgacggtgaccgtgataatttttcaattaattatatttattttagacagattattattattattattattaaacatcaataatatttgtaatttgatagcgtcttatatatgattaataaatttgatataataattaattatttaataaaaatatttgagactcattattaatttttgtttgtaagatttgaaactcgtacactaattagattatgattaaaattaaataataattcagaagaaatttatcatttctcctaaattagcaaagaaaatctaataaaatccaaatattagctaatgtgaaagatttgggctttgcctttgatgacatatttcttttgagtgatataaataaatcaacttttaaattgcaaattgttaaaagataataatatatagttttgtttatgaaagttttaacaataattccttttaaggaccttttagaaagagaaaaaatctcacataaacattgaccattgaagtactaattaattttggtcaattattattattattatnnttattattattattattaacatggagagatcagatctatcactatattttaaaagaatatatactattattctaaaaaataaaattaaaaaaatgcatggaagtaggaagcctaatatttttattaatgagactaaaaatcacatattataaataaattcatgaaaagcacaatcacatgtggtttggagtttaatatactacaccaaaaaaaaaaacataatagtcaaaattacattatttaaaggtattaatattattttaaaattagattctctattttaaaaaataataattttttaaaatagtataaaataatatactaagctcaattttatatatatatattttaatataattaattttaagataatttttaatacgaatagataaaaaaaaatatgtactcagttttgttataataatgatctaggctattattaatgtttattttaataaaaaatcagtttagtatactattttatacaattttaaaaaatatagagtttaatttgtcacttaacaaaataaatgatccaatcaataacttttacaaaaacataaaatctaaaatagtatttaattttatttaaatttccaattatatatattattaataatttgttgatcagtagattctacaaacaaagtaaaaagttggggtcgaaataataaaaaacataattgagggactaaaatgcaaagccaacttagaaaacaacgccagaaaaccttttcaacattattatcttgggatgtggtcttccactagttttttattttttaatattttatttttaaggttttactaatttaatattgacccttgttttttcttttagattttctttttaatttttgaaatcttttcctagattaagacaattaaattaatcatattgaattatagatatgtacttaatattacaatttctttatatattatatatctttttttttagaaaaaaaatatatattgttttcttaagataataataataataannnnnnnnnnnnnnnnnnnnnnnnnnnnaataataataataataatttgcagcgaaaccctcttatattttactttttatac

SEQ ID NO: 23528 - DNA, 1552 bp, Cannabis sativa
caaaccttgaccccgatcctgaccccagaccttggacatagatctcagaccctaaccttggacatagatctcgaacctcgacctcagaccctgttacctggacctagacccaaaccccaacttcaaacccggactctgacccaaaccttgacctcgaacccaaacctaaccccggcccaactggggtccaaaccctgacctcgacctagacttcggacactagacttggactcaaaattaggcctcggacctcagagttagacccttagtccttggaccctggacctagaccccagaccccgacccttgaccttggaccctagacccagatcccagaccccaaaccccgacccccatcttggactccgacctcgacctcgtaccttgaaccttagacggttagaccccgaacccttcatctgcatcccaaacccagagccagaccctggacctagacctggaccccaaactcggaaccgaaccccaaatcaggacctcaaccctgacctttggctcgaacctagtctcgggccccagtactggacctcggcctattttctctcacctcaatttcttatctctcaattaaataaaataaaataaaaaaataaaaaataaaatttacgaaaaatatttttatttttaaaattaaaaaataaaattagttaccaaacacatttttattttttcaaaaataaaatacaaaattattataaattgatttagcactttaaattacctacatttttcaaaaattgtaaaatattaaccgcacaattcatattagtaccgtacaacaaagctccaattttatgtagtgttaacataagtgcctcaattattttattttattttattttattttctttgaaatggtacaagtgccccatactactttttatggaatttttcttgttggtagtcctttttgtgtataaagttgtgttgagagaaggataacaatcacctaccacccctcaaatggagtaaatgttcttaaacacccaaacaaataattagaagaagaaagataattaagttgatcttaaagacaaccatatctacacataaacacaatcaattaatatacttatatgatcaatacttctcagtagacacgtctaagaaaaattgctttgtcaccaatactggttttttttttttttgataaatgaatactgttttctttttagtctaaaaactttgcattaatttgtaagaaaaaaaatactactttgtcaccaataatttgtttgagtttgttgatttttattagcttacgccaaagtagtaaaatttgattttttgtgtgtcaaaacttaaaaagtggtattaggccagctccaatgctagctactttagtggttgtattttattattttttaattaaaatattaataaacgaatcaattgaagaaaaaagaaagtgaacggtactcaacaggagcaacccaccttgtatttaaggttgaaaagtcaatacttttttgggaaaaaaacagaaatattctaaaaagggaaaaatattacaacaatactgtgggccggccca

SEQ ID NO: 23529 - DNA, 1964 bp, Cannabis sativa
aattcaatataatacaatacaacctaatacggcgttccaaacgagcccttagttcattataccaccaccaaacttgtgaattatatatatatgagaagttatggattctattctactataccaaacttatatactttttcctatactatacgttacgctacacatttggaatggtcacattgatatgactatattattatcacaacaattaacataaaatcataacagtttgattgtaaattttaaattagaaaatgtgtgtgtgttgaaatgcaagctcattataataatttttaattatattatgatgagaatacgtggatggatttggagatagatatcgacgaaaaacgacaataattaatgggctgtgccgagtgccgactgctctgcaactcgactagcttgcttgcttgcttggttcccctcacaaaatgatacaaggaaactgcaaaactttgtctctttcctcactcaaatcaaaattccatattaaagaaatgaaccattttctatagcaattaaattccatattaaaatagaatacatatccctttagcaaattatcaaagaaaaaaagaaaaagacaaaaagaaaaagactaatgcccattgccattatgtatgtcccttctctaactcttttttggtgcttttgatgtcccagcaggcagcagcagtagctggctgctctgctcacacattatcgccaacttcaacaactctttttaagcgtgtcacttaggcttaccaaaatcaaaattaccaacaaaagaaaacatcttacgtggatcaatatttaattaaaaaaaaaaagttttttttacccttgatgagccgaaagttcatattgaattacacatgaaaaggaggagaaaaaaaaagttatataattatgttcagttcaggtaagaaatataaggcacgtgattattcctggaatcacgtgataaccagggtcaccatgttagagaaactttaagagtggcttatttatcatatttgtagcttttgaaccatattaatggagtttcttaaatccaaaatatgaactatggtaccaagtaatcctcactctgccctgaagtggcttgatgcatttgctttgctaatgtagtaatgtgattaagacctctaaaaatatcctatacaatcagatttaagcttaccttaccaacaatataggatagaattgcctaatgcaagcttcactcaggtgtgtttccccaaaataatggtggaaacccatagagtaaattgctccaattggtgataaaaattgatccttgttatgtcaaaaaggtcttgcagcctcttccatcatcttttttactcttgtaagcctttcaatctccttgagaacctgagttttcagaaaaataaaaacataatttgccatcatctccattgatgcttgttaagcatgtctagtgttaagaaagaaaaaaaaagctttccttacctccaaagtcatgtcctccgtggtaacagcatttacgtcatcataacctaacttagatgcaacttctgctaaagataagaagcaattagaaccaacggaaaaacataaccccattatgaaaaattccaagtgaatgggcggaaaaaggaaaatactttgaagtgagatggttgtatcagctgtggcatatccctctctcatttcttcatacagagaagctaactgagtaaacacctgatagcacccatcaaacaaaataatcaagatctttttagaaaggagaaacttaagtagacaaatgtttattgtgctggaagctcttcttattcaggtaaatttagctttggaagttaagaccagacctctgaatctgaaacactttggtcttccatatttccactagccatcatgtctaggggaacatcaatccatattgtaataccatgtctcagaagagccctacgtgtgtttgcaatgcaaattaggataaattgaccaattaa

SEQ ID NO: 23530 - DNA, 2685 bp, Cannabis sativa
tattaggctaattatactagtttaacctaattaaaattaaattagcaatataattaattttgaaataaatgcaattaatttttctcgggttgtttaaaaaaaccgatgtcaacttcacctacaatcaagttctttttctactggtgtcaaccttacctctcaatacaatggatatgtgactttgaaatacatagaaaattctctctaataagataaaatacaatgtgaaatcctagatagaattgtaagcacaccagagaagaaatgaacaagtttggctcaagtgtgtgcagtgtttacttggaattaatacttagataaattgagaaacacttgtaagatgttaggtttactcaataaatgctcaacccaatgtaaaaaatgtgatacaaatgagtttatatagtgtttgggagaaaactagccgtttcacaaacaggtaaccttttctgggccaaataggtaaccatttaaggcacaatggcaaaatataattttttcgacttaaaatgcatataactcttagctcatttatccaatttcaaaaattctagttactttctctttagataaaagatgaataatcttaaaatataatttagaaaaattatgtcatttttgaaaataacttgtcgcacaagttagtgagccaaactttaaacttataaatcctaatatactatgcaaatcacttaagcaaaactaaagtaaacttatgccatttgattgggtgtagtcttgaggtagatgagctttctagcttgatttgtatgttttgatccaaagttgacttttcctgagagttgactttcacttttatttttgagttgacttttgactttgagcttttgaagtcttcttttgaatagggtcttgaattctcgatctcttgatgaaactttttctcttattaagtatgaagtaattggtatacttgtttaatccacttgtttgattatgtttgattatttacagagcaaatactgatactttgtgtatttgcttgcaaaatgatgaaaaaaagattatcaacaaataataatcaaattttggtttatcatcaaaataagtgagtgactggcttttagtcaacaaatacaagagcacaaaagataagataacatcaccaaatgctaagagagatacttatatacaactgctgacacttttttggtgtcagtaattggatacctagagattctcaaggtgaattggcacttcgagcaaaatatcacatgcatgcactaaacttgaaccctaaagtcaaagttgtaccagaaaagaaagagaatggtgctacatgagaattgacactccctaagtggcagtactcacatagcacaggactattgacacttagggtgtgttagtacttgtccaagaggagaatgaagggatctagttgccaaatggttctttccaacatcaatgattgcataacaaataagagaagtccctaaagggtttagaagtgctctacacgagtactaacactttctttgcggcagtattcgtgtaggctaactcaaggagaagtcttgggtgttttgaagctcaaaatcctagggaatgtcaaccaacctagaaggacttgttaaatacaactcaagatgtctaagtagagaagtgccacatgactactgacataaacatagcgtcaacacacacccaaaaggtgccttaaatgggtattgaaattttttggtattagtgtttgccaataatggtgttctccaagggtgagatccctctagcatattgtcaacttatctctcgaagatgaagtttctggaagaatttcaaagcttaaccacttctggggatatagaagatatttattttttgtgtagttcttttattattattcaatgaaaagtacagtacaaatgtaacattcacttggattgtggggcaatgagagtgcaaacccttggcctatataagtgtgttaactagacctaggaaatacaccacttttttggactttgagttctagaaaactttcaaagcttagacatttctagggatagagaagatatttattttttgtgtaattatattattattcaatgagaactgcaaaacaaatgtaacattctcctacattgtgggtgaatgaaagagcgaaccctaagcctatatgagcgtgttaactaacctaggaatcacatcgcttttttggactttgaatccaattcgaatctttgacctctaacaaccaactcgtcatctcatcaccattcacaagacaaaacttggtggctctctctttctcatagatacatattctcataaaaagttggtccttgttcaccaaaaagatctgcgtttgtatcgaatttagcttttaggtataacttttttataaattctttaataaattattttttaagggtttaccaaatacttttttatcacaaattttttaaaaagtagtttttaatttttttcaaaagctataccaaacaggtccaaaaaaatctcttcaaaaagtcataagaaatcacgtataatttaaattttatgttttttttttctaatattgaaaatcaagtataaaattgaaattcaattaaaaaagtgaatttaattgtatttggattttgaagcttaattaaattagatcggatgatgaattttcaaatctaaaatctatttgaatgatatcagattagaagaaaaaaa

SEQ ID NO: 23531 - DNA, 2827 bp, Cannabis sativa
  modified_base (743)..(754): a, c, t, g, unknown or other
agttgtaaaaaggttaatttttttaaaaaaatccttttcaatatttgattctacatattgaagtattattttcaaactttttaaaaaattataaataatttactatattgacaataaaattaattattatttcgatttatcatgctttttttttttttgaaaagcgatttatcatgcttaagaaattaaatttattgtctgccattataaattagaatactttcaaaaattacaaaaaataaaaaataaaatacattttcataaaaataattaagaaaaatattgaaataataaaaaaaatatttacaaatagttttatgttctttacaagaataaaaaaaattaataagctatgttttattttttattagaaactaaaaataaggaaaggacacatgtcaaccatctatccataagatgcataacctaaattaatataataaataatagtgaattagtgatgtgttctagatcttatcgattattaatatttataataataattaaattttttaaaatatgaatagtatataataatcagttcttatcaaactttttgttgtttttttgtttttgtggtgctgttcttatcagctaaactttctataaattaaaaattaatcaacgtttaatttaatcagttatgtttgattttttttattataattaattataaataaagaatcgacacatgtcaactttatatccatatagtgccaaaccataataataataataataannnnnnnnnnnntaataataataataataatggagtgttcttatcaattatgaatatttttattttttaaatttatatatataaaaagaatagttagatttttttataggttattcaacgtttaatttgaatttaatttaaggattttggttattttttggtgttgtttgtttcttagatagtatttcagtattacaaaccgaaattttagcttttttggtaagattcaattgaacttatttgtgcagaatctcaattaaagatgtttatttagatttactttctttggtatcgactttcaacaaaagaatgtattttttaatgtgttaggagtactgtttgaggatgttatacagttataatcttattgtctaaatttttgggaacaattttgtcccatgtagctcgcgattagaattctactgctcatggtttggcaaaacatgcatttcggttagacgataagctaccctagttcgaggaggtgtcgctaccaattgttataaattctaactcacaaatttttctgcttattagaaaatggctaaagtttaggggtacgatttggtacatgtcaaagtctagagttttgttatatgtcaaaatttggaggacatgatctagtatatagaaaagagaattggtaaaagacaccactggtgtctatcaccctccttagtatcataccgctatttgtgtaattaagtatcaaatctcatataacttaagaaaataacttttaagaaatatcgataactaattgtgagataccatatataaaaagtgttaagcattattagtgtccaataacaatggtctataaaaaatcatcaattaggcattcgttaataaaattgaatgaaattgcatagaattttttgaattcaacaatctcaatagttcaaagagcacaatttaatacatgtcaaagttcagaagatacaatctgatatatagaaaatcatcacaacattcattaataaaattaaaccaaattagataaaaaaatttaaatctaataattttaataattagaaaacaaaatttaatacatataaaaaattcagaagcaaaacaaaaagaacacgtgtcaactatctatgtagagtgcattgtataccttaaaattaaagaaaaaaataaaaaagaatgatgtgtgagtgggtactatgattgggccgcaaagtcgtacaaaagtaagacacatggagttagaaagagccgtacgactcttttactctaacaacctaagatcacgacacgtgtcacaccaccacccctttctcactataatatatattatatataaagattgcaaatttatttgaccaatatcattctttctctccctctgtatatcattatcgccatttttgtttaaattcaagttttttttttgtttgtttttcttaaacagaataaacatcatatcattactcattacagagacactgagataaagacagagagagagagagaaagtttatagctttttctagaatacacttcagattacacgtatgttctcttttgtttccttccaatcattataattaataaaaattaattctttgtcatatgatgatgatgatgatgactcatatcatatatctatatatctgttgagttgtgtgtgattgtatgatataattaatctcaggttgagacgccatggttggagttggagaagctcatcattctcaaaacacaccattattacctaagtttccccgtaaaagaacaggtaaactcaattttctatggtttttctcatctgggcaattccaatattgtgtatctatttatatatatatatatgtgatttaaatgattcgatagtcaaaataatgtatattagatgtttgtttgtctctgtttagttttatctcattattaaatttgaaatgttgaaagcatattattaggtgtttgtttgattgtccgtttagtcatctgggcaactctctctcccacatttcatcactattttaatatgtatatgtatatatatacacatataaacatgtatattaaatgtttgttcgttcatttgggctgaattttgaaatgttgaagcatattatt

SEQ ID NO: 23532 - DNA, 7944 bp, Cannabis sativa
  modified_base (5826)..(5827): a, c, t, g, unknown or other
  modified_base (5874)..(5884): a, c, t, g, unknown or other
taagtttgtgacaatgtgagtgcaatgtgttcgaatggttaatttgaattctggtttaagtgatgatcggagctgtatgtttccaacatgtggtatcagagctacaggtgttcttgaagatcttgaattagtttagagaagatgcgagctttgttgcttttgcaaggactgcaagatgctttgttaggagaatttaaactccctgcaactctgtctgagaaggagaaaatagagattcttgaaaaagcacacagtgcgattattcttagtcttgatgatcgagttctcagggaagtgtccaaggaaacaacaacaacttgaatgtggctcaagctagaaaacctctatatgtttaaatctctagcaaaccggttgttcttgaaacaaaagttgtattcttttcaaatgttcccacggaaaagtattgaagatcatttggatgatttcaacaagatcgttcttgatttggagaaaataggaatcaagattgaggatgaagaccaggccatcattgttttgaattcgctggcttcagaacagtatgaccattttgtcgacaccatgatgtatggtaagaattctttgacattagaagaagtggtcactgctttaatttcgaaagaaatcaagaggaaatcgaaaattcagaagaaaatgtagggatatggcttactggttcgaggaaaattccaaaagaaggggaacaaggcacaaaatagtcgaagcaaagggaaggtaaactcaaagactaagagaaggtgttatgtctgcaacaagccatcacatttgagaaaagattgtccaattctcaagaatcacaacttaaagaaagatggagatgctggtgtggtctcagatggtgatgatagtgatggctatgacagtgcaagtgttcttgtgatcaccaagaacaatagggataaggtatggataattgactctagatgttcttttcacattttccctaataagagtcaattttcaagttatcaatccaaaaatggtggcactgtcaagttaggtgataatcattcttgctccatacaaggaatttgaacaattaagttgcagatcgataatgaaaacatggtggaactgaaacaagtaagacatgttccaaatcttaagagaaatttaattttagttgcaatgcttgatcatgaagggttcaaagtcaaggttgagaagggactgttaaaggtgattaaatggtcaataagtgttatggaagctaccattggcaatgatatctatgtgctgcaaggatgtattaaaagagaccaagtcaatttagtcatgaaaatctcaaacagtgttcactctcaagtggcacaggagacttggacatataagtcatggtggtctgaaagttttgagtaagaaaggggtatatggcaaagatcagatcaaagaactagatctatgtgaacaatgcattatgggaaaggctaccaaagaaaaatttggagttggaaaacataaaaccaagagcattgtggattatcttcactcagatctttggggcccatcaagaaccatatctagaggaggagcaaggtatttcttgacctttattgatgattttttaggacatgtatggctttttatcttgagaaataaatatgaatcacttaacaagtttaaagagctgaaagttatgcttgaaacttaaactgagaggaaaattaagaaggtgaggacagacaatggattggagttctgaaaagaacaattcaatcagttttgcaaagaaaatggcattgggaggcatctaactgttccaagaaaccctcagcaaaatggacttgctaagagaatgaatagaacaatccttgaaatggttagatgtatggttatatatgtaggtctgcctaagaaattttgggcagaaactgctgtaacagcatgctatctaattaatagtagtccttcatatcagccattgagttcgaaactccactggaagtctggatggggggctctccaagttatgatcatctaaggatctttggttgtttggcatatgctcacattaaacaaggcaaacttgaacccagagataggaaatgcatcttccttgggtacccagaaggggtgaaaaggtacaaagtttggagcattgaagatggcaatcatcaaaaaaaatttattagcagagatgtggtgtttgatgtgaaaactatgtacaaagatttgatcagttcacaaaatggtgatgctgcagcaaaagctgggagtgctgcagcaaaggagaatgaagagaaatctcagtttgaggtggagatggaaccagatcaagaagctgcagagagaaatgaaaatgtagttgaagacgcaggccatgaagaagatgtggaagaggcttcagatcatgaacaagacactcttgattatcaattggtaagagacagaaaaagaagagcagtaaaagcccctgaactatgcagatgttgtgcctttttctctcagcatagatggcattgaaggtgaagaacttgcttcttatgaagaagctattcaatttgaagataagaaagagtgggataattctgtggaccaggaaatggattccttgagcaagaataaaacctggattatgatttaaagacatgttggacaaagagccataggctggaagtgggtttacaaacataaggaggggattccaagtattgcaagagcaaggttcaaggcaagattagttgccaaaggtttttcacaaagaaaggggatagactacaatgaaattttctcccctgttgtgaatcacactttaatcaggttgcttttgagcattgtggcaactgaagatcttgaactggaacagttagatgtaaaaacaaccttcttacatggacaattggatgaatagattctcatgaagcagcctagaggatatgaaatcaaaggaaaggaagaccatgtttgcctgctcaagagatccctatatggactaaaataaagcccgaggcaatggtacaagaggtttgatgactttgtactaagagcagggtttaagagaagtgcctatgacaattgtgtatatgtcaaaagcacaaaaggaattgtttatcttctcctatatgttgatgacatgatcattgccagcaagagcattggagaaataaacaaatttaagaagatgttgaaccaagaattcgaaatgaaagactttgggccagcaagaaagattctaggaatgaaaatcactagggacagatcagtaaggaggctaatgctgacacaaagtggttacatttctaagatcttaagtagatttggttttcaagatttcaaaccagtctgcaacccctatacacaacaatatatgctgtccaaatctcaagctccagcaatagatgaagatcacacatacatggagaacataccatacaccagtgtagtaggaagtatcatgtatttaatgttctacaccagaccagacctttgctactctgttagtatagtaagaaaatttatgggacagccagggaaggatcactggaaagtgctgaagtggatcataagatatctaaaaggtaccccaactacagggctcatctatggtgccaactgtaatggaaaagaagtaaggggctttgtagattctgactatgcaggagatatcgacactaggagatcccaatctggatatgtttttcaactgaatggatgtacaatcagttggaaatacaatctacaatctatagtggaattatctacaaccgaggtagagtatatagcttgcacagaagtgttaaagaagcactttggcttaaaggaattacagtagaacttggcatcaatcaaagagagatacatgttctatgtgatagccaaagtgctctccatcttagtagaaatcaagtgttccatgagagaacaaagcatattgatgtaaggatgcattttattcgagatataatctcaggtggaaagatcaaactactaaaagtccccactgaaaacaatgcaacatatgcttacaaaatctctgcctactactaagttcactaagtgtctcaaaattctgaatgtttcgagctacaacaagggctaaaaatctcaggattcttccctaggtatattacaggtcaaggtggagaattgttgtatttgttgtatccttgtaatatacagttaaagtagttaggtcataactgtcttgacagttatgacagctagtttcctgtccactttggacacctataatataaatacattgtatagtttgtaattcaagttagttattgagtagacattgtaaacttcctattcaaaagcaataaagaataaacattttgtctctctaattttagtctctctctctctctctctctctctctctctaagtttgtgacagtgtgagtgcaatgtgtttgaatggttaattggaattctagtttaagtgatgatcggagctgtatgtttccacaactaaattctaaaagaaaatagagaaaacatattaatgtatacgaggagaacttttatattaacgaaaatatgtaaacatatatgttagcaatcatttgtagtgaaaagataatagacgttttatagcaaatatttgtagagaactactaaaatattatatattaaatatctaaattaataatacaaattatgacatacctcagagattacacaatgtacgtgagcgacatatttgcagtggccacagtaataaactcgaagtcgtggatctctctcttcttcacaaatgtcacagtaatagtctccaaaagtatatcctcaatgcatgaatcaacaagatttaaacaatgcatatgactctcgtgctttatgactgaaggcaatggaccacataataaatggagtttgaagtcacaatccaaacatccaaatatggaggattcagttttactgaattccttggaattagacttcatgactaattgcttcatacaattgtcatggacattgcatcgatcatgtgtagtgtgtattttatctaaaaaacaaagaatatgtggatgatattcataactaatggttctttgtcttttaaaaccacattccaaacacaactgaaaattacaattgtgaggacaatcaaaatataagcctggtttggagtatccacaaacattgcatttaccaaactgccatttcatatgaagggagagatgagtgtgattattaggatggtgggagaattggatttgttgaggtaattggtgaatgcattgtttatgaaggaaatacttacacctaagacacccataataaaccccaaaatcatccgatgattcatgacatgcaaagcaactaacattcatatcatatgcatatgatgggttgacaagctgtagcaagtgaggatggctataatgttgaatgcaatgttggccttcattagaacatgttgttattatggaatttgatgacatctgggtgcactcaacatccatataaaaatgacattcatcacaaccaaacatgatccactttttaggcgcacgctggccacatgaatgacaatttgttttgacaccaggtagaagaaagagggggtggtgaggatgaaaatggtgattgatttgctttggtagctctttacatgatttatgcacgtaatagtcacacaaatcacaaacataataataaggatcatcagcttcactaaaagacaagcaacacatttcacaactattatttgtgatcttattatcatcttttaggagcatcatcatatgatttttgtaacataagtgttgagtctccattttcaatctatataactgaaacaataataaaaacacccattaatagctcaactatatacatatatggaacacttcnnaatgggtattacccattgatgagtactaaacaaatttaactataaannnnnnnnnnnaaaatattaaaccattaaattttaatctgatagcaaataataaaatagaaatttaaatttctatgcttaaattagctacttaattaaagaaaatatcaaaaaatataattagaagcaaacaattttatatagattagatatatatgaggaactgaatgaaaaactaaaagcttacctgaatcaaaacttcaccaccaaacttggaaataaaaaatataaataaagaagagcttaattttgatttgtttatataaagaagagagagtacactaattttgtttttaattttgcttgagttatttcttttactcagatttatttgtagtccatttgtagttttgtattatcttttataggtgagaaaaaaagaataaagtaaataaattctttccttgctacaataatttataatttataaaagatttatcttctatgataatttcttgtgattttagtataacttaaaatgaatgataaagggacaaaatcatatccctacattaatatttagattcaattaaattaaaaattaatttcattttttttagtattaataaacagaatttttttaagattatatcagcaagaaatgtttgtttatttcttttcagacattaataaattgtaatgattatttagaaaaaagactaagaaattgaaacatatcatatataaattattatttccttgcaatatatgttttaaaatataaaaatacattaatagtattaaaatgaagttatccctttaggttttttcatctttttttttaaacaaccaaacaaaacctcttctctatctctaaccaaagatatatacaagatattttttttaacagatgtatacaatatattagaacttctcttttatttattcacattatcgcaataaatgaaattaatcaattttacaatttgtaaggaattcaaaatcagaagaagaaattagagtattgtgtttaaaaaaataaaaactaaagttagagcatcttttgttttctatttttaccttcacacttttaatagaaaattctttccttgcatataatataattccttgcagaagtcgttaaaaagaaaaacaattccttgtataaggaaatagaaatgtgtggggaaaaaatattatttgcttgcaatagtgacaaagcataaaaagtgacaaaaaaaaaatcatcataaatcagttagttgtaatctttaggctaattagaatttttgtcccacaaacattcatatataccaaatcgtgcgtcttaacttttaggttgttaaaatttttttctgaactactgagaatttttagattcaagatatcatgacctgatcgcggcgtgacagatatgtaatatccataactcgagtggtcaaactttgacccttgtaggaaaataatacttatcaatgatcttttaatttattttgcaaaatacttatttaaaaataatggattaactcttatatctataaaaaaatattaataataaaatcaagactactcatcaatataaaagaacaataatattcctacagttatgtagtcaccgaataaataaatttagtgagtcaataaaatataaaaataatatcaagcatctatcattcttcatttctaactagtacatagctaatttaagtcatccaaaccatttatttaagtttaaatacagaatcaattttcagtgaaaaatttgataaataaaataagactaaactaataacgactctcttccacaacggtaccatcctcatttgcttgaaatcgtatacacataattttaatatgtaatgtaaaggtaaatttgtggtgaggaaaaggaatgtgaagagataaagagagattgtttgtatagtaatgttggactgacttggacacaatagttaattacatgcatgcatgtatgtccaatatatctaactatcactttctttctttttaagttgtcaatattggtttggaggaaaaaatgtaaatatatatatctattctatataaagtgtgtctatataactaaaattcttggtttatgagaaatttatgggtgactttttatttttatt

SEQ ID NO: 23533 - DNA, 1599 bp, Cannabis sativa
aggattgaacactgctcagctccagaattcgcaagtgaatcttcctaagtcctatcctgttacttttactcactcgttatcgataaagcttgatgaacacaacttcctaccatggagacatcaagttcttacatccattaaaggtagtcgtcttcatgaattccttgatcctactcaaattcttcctaagtttttaactcgtgatgatgaacgtactaacaatatcaaccctgcttttgaggattgggatcaacaagacaaccttctggtgtcttggcttctctcttctatgactgagaaaacaaccaatcggatgatcggttatgacaccacaactcagatctaggaagctttgcatgagtactacactgcactcaacgctgctaacatcagtctatacaaaactcagcttcgaaacacaaagatgcttggctcattgaatgattacctaatcaagatcaagaatattgttgatcttcttgctactattggccacaaacaaacacctcaagatcacattgaagccattttcaatggtcttccaccagaatatgatgtgtttgttacatctgtcactacaagaaaggaatcctactctgtagctgagatcgaggctcttcttatggctcagtctgcaagaattgataaaaatgccaagaatcttgacattagcaaaggagaagctcacttgtctcacacaagatatccaaacaataatccttacatgcgtactcttcctactggtcctcaaatgcaaagatatggttttggtcgaagtggtccttatttttatggcaattccaatcagcaaggaggcaatacccataaccagtacaacagaaatggccctacttcaggcagaggacaacccacccctcccaacactgttggtcgtggtcccccctttactagaggacaaaacagtagctggaatcaaaaaccacagtgccaactgtgtcacaagatggggcatactgtaaagcagtgcttttatagatttgacaagtcttttactggtccggaatgcttccaacaattcacaccagcagctaatgttgcagatatgcaggcctgctgtgccacaaatgaaaccgtgtgtgatgaaagttggtaccccgattcaggagccacacaccatatcactccagacaatgctaatcttgggactgccttgacatataatggacaagaacagatctttattggcaatggtacttgcctcaacatagaacacattggtaatgcctctttcttatctccttctttgtctaaacctctgcatctcaataacttactgcatgtcccctctattacaaagaactaacttagtgtttctaagtttgctcttgacaatggagttttctttgagtttcacccctttacttgtgctgtcaaggattagaccaagaagatcttgttggctgggaagcttgacaaaggtccttacaagtttgagtctccccaactcagtcatctgtccaaccaagctccctcatcatcatctgcaacctcttcccaaatccagtgttacaatagtcatatgtctgtttccaatttcttgtattctctttggcacagtaggcttggccaccctactgc

SEQ ID NO: 23534 - DNA, 7948 bp, Cannabis sativa
actatatcaaaaatatgtttatacaaaaatatttaactcaaactcaactttttatttttttatttttcttgttaaaaaactttttttaattttttttttaccgatggaacaatctcagttcatatgataaaaaaatgagagatttttttaattagataaaaaaattaaacataaaaactcaaaattttctaattttacccaggtaatactatatatttataaatattttaaagtaaatgggtatttctatttataaaaaaacttaaatacttataaattaaattatgtttcaattaattattataataaccgcgtgagacgtggttacgttaactagtataacataaatttaatttacactacaataaataacatattttttattactctactgccaaatcgtttgtattaatttaaagtttttcaactttttatttatttatttaagaccttttatataatttcaataaaaattaataattttaataacttttcaagttaatttgtactaaatatattgaagcacaattaatattagagcacttaatattactcagtttttttttttttgccaaatatatatccgatgtatattggtccatcttaccatcaaaaattgctaaactaaaagaatacttctgaatattattattcttttaaagaaacaaataacaaaaatttctgaacttgaatgggagaagaaaggagtggaaactggaaactgcttacaagcactgaaaggaaaaaagaaaagaaacaaataaaggaatttggaaactgttatttgttttgtgttatcaagtaaatgtacaagtaaacaacatttcacagctgattcttggttgagttgtagatattgaagatataggagagtatgcttcaaccccaatgaactacttttcaagcaccattctttttgtttttccttgtgttttgatagtgagcatcaatgagatcagtagcaatgagttttcaagtcagtcaagctcagtcaactgtgctcttctctctgcagctcttctccttacaaatattccccaccttaaagcagctttgagcttaagccacccaacaacagctttaccagaactcttttcgcgctcctgcccaaatggctgatccatctgaggattatattgtactccataactatagcaactctgatcagcatgaccaaaaactccagtccccattccaactccaatattaaatgtcttcagaagtctctgcatatcatcaccctccagcatctccgaactcctgagccggatttcctcagccactatgtcctccaatccctgcccatcccttggccgcaaccagtctcctgggaaatacgaacacccaactgcggcactagtactacccgacatgtaatccatgttgctgggcaatactgtttgatggttgttgttgttgttgttgtttaatgccatgagtgcagtttgatcagacctcgcaaagtgaaattcgatcggctgaggatttgatggttgattgttttcgggttggaactggtggctgcattcagggactaactgttgcctgttctgagtggtttcactaaggtgagctgaggcatagttgtggctagccacaggtggtagtgctgctaccttaccttttctggtattggtttgtgagtttaggacctttccatcatattctataacttcatgccaattttcataagcactcttcactagagaatccactgaaacctgcaatacggaatccaactaaataagagaccttgtaaagataagcatacttactccaatgacataaaagagatcattcatcttatattcctccatctcaatgtgtcattcatttctatttatgattcttagccatttaatataaaagcttcttatctatgtagattctgtatataaatattgctaacaggcaacaataatatcaaaaacatatgatgtgtcatattattattggtgcaattcaatattaaataaaaatggcctctgtttttgaggtcattttgcactttggcctaatttcgataacacggcctctggttatattttccagttggtcgaaaaatttcaacagggtggtcgaaagtaagtttagacagctggttgaatttttaggctgaggtctttttgtaaagaattaccaaaacttagccaaaagtgcaaaatgacttaaaaaaaaaaaagatgtcattttgcatgaactgtaaacaaggtaaataaaattaattatttgctaaagaaatgaaggtaaaaagtagaaagcaatttggagagttttaagatcaaaccttctggttgttgttaagagattcaagagggagaaactgcccatcagaaacaaggcccctgagctcataaatatgattgaaaacaactccagtgcattgagttttgtcagtgtagtaaacatagagtttcccacctaggacacatgtcttggcatgctccacagtattttcccacattctgttggacattccacttccaaggatctggattgtgaatgataatggtaaagaaaatgcacccaagaaagatgtcagaactatttaaggtagtttaatatgtcccaaaaagaaggtgattaggaaactaagatccttacacttcttaatctctgagtatccttaactaaaagacgaaggaagtcttcgacagttacaatatcagcaccgatcagtttcctatgcagagcgccatccttcgctattctatctaatctccaaacttcatcatggagaactggtggataatgtttcttgtacactgcaaattattgaattaacagacttattaaacacaagcccttagagggtattactcgagaaagagtaaggagaacttggattgtattaaaaaatacaagaggaaaaaaacataaaagaatgaatgagttgcatcatttgccaatttcagtgggattaagttatcaagatgacttacattctcctctatgatctttgacagcaaaagggtcggttttagcttcacgaattcgagtgccctcacaatatcctggggaaaccttaacaccaagcctgaatttcctgctccttatccaactagaattgtcagtgaaagtaaggtctccaatggtacctacaccttccttgagggtcacatgtacatctcctgtaagaagtggtcttttcccttcacgttcctttacctgatagttttcaaagtgctccactgtccaatcatcattagcctcctcactaaaatcgccttcaagcacgacaatattcagctttgcaccagattctggccctgtttgcacaacactgcctgtggtcatgtccatcagcacaacatggattgctgctccttgctcgccaccaacctttgctcccgtgaatatatgaggtggcatccttgttttgaactgaagttgcagagctcttccttgtggagcaagtattcttggcggaggtgacctgtaacaattgaaatcaaaagagttcatttcacaaatatctcaatgctcatcactacaaatatatcaataccatcccagtttccaatcatatcctatcattaccttagtaaaataaaatcatctttacatcaaaataatacaaaacttcaacaacagactcaactaactaaacttccatcacactactgaatagagcaacattgaaccaaataggcttgtctgtggaagttaagaggaatttaccttccagccaatttagcaggacccaactttgtcaaagcgcgctcgatctcttcactgacctatttttcaagaacattgcagaagaagcataagagttaaaaagacttaataaacttactaacaacaacttcatagaaaactgaaaattgaacattatgacttcattaagggaaagcagaagtataatttattataatgctgctcatcaaaatattatagaaagcaactgaataaaaatatgatgagacttgagcaagctgctacaactacaatgtgactcacaattctgcggagtagaggctccaaagatgagcatagtctttgcaggctatccaccttcaaagcttccacaattacactgcatatgaaataaataactgtataaacaataaggtggactccaaaattgacactatcccatccccttatattgtaaaaatggaactgaaaaaaccactttaaagtgaaactaatgaagccccagatacaatcaacagatataaattgagttagtccttaattagaaaattagtagataactatgttctattggttaaatcttgttccccttttagattggcagactagtagaacttgtgaggtataaatatatacacaaatccaaacacagtgccattacacttacactactgccatatcaaaactcactaattttagtaaaataacataatatctagaagaaaaactgagacttgtgaagttccaataattcttaaaatcaatagtagaaccaaagcttggtgtaaatgctcaaataattggtcaaaactaaaaagttgataaaaaaaaaaacaaaaaataataaaatttaaagagtaccctttaatggaaaacgaataaatccaatgaaattaatgaaactaagagacaaacctggcgagagcaggcaacctgcgttttttggagtcaggtaactggtcatcttctgggtcatcctcatcaataccctcttcgtaagctctcttctcaacccttgtggtcctcgaactatccattttgagaaaccttttaactaaatcccaaatcaagaaaaaccaatccaaagaaaggaatgttctaaaaatcccacaaataaactctcttagaagcttcaaagaagaacaccacaccacaccacaagaaaaagaagaaaataaataaagtagtagtttttatgaaacttagtcacaaagactgtgaacccaaaagacaaaagtgtgtttttaaggaaaatttggatctgggtggtgttgtaatgaagatctgtttaaggagttttggatagatctaaagttgatttatttaatacatattttgacgtaggacaatatgaataatatatatttatatatattattatcaatgtgggaagtgacataataatatcatattgtatatattatagtatagtgtatataattcaacgtcacagctgggtttggtgtgtcatgctcgtgcaagagtgcatgaacgtccaaaccttattatttacaaccgcgtttggtgctgttctcttctctctttttactcttatttattttttattttttattttttatttttataaaatatataaatgagtgtgtttttattcattctgttttttgggtttttgagaaacgcgttactgaaatatttggtgtttgttcttttttgtggttttgggttagggaagaaaactttgaggaagtggtcaacgcttgcaatgagtataacatcaacacaatatcaaagtctatctaagacaatttcagcgttgttgaaattaaggtttgaactttattttggaagctgatgttcacactagtagctagggcttttcaattcaataaggctatagttattttattgagtaaaaatttagtatatttaaagaaaactcttgaacagtccgtgcttatttgacttttccttttcatttacaaacaatgatacattagtgttatttttgtaaatttctcataattaaattatatatattagctacaatagtattatttgtagttttaaagtgttaaacatagcatcttatcttagaacttcatgttgcttagtgaaagagaaatcagttgtagagaacagaaaaaacacttctttttaatagttggaagatcagattattttgtacataatttcctatattattttactttttaagtggaattcaattttaatttctaattctttttgttcaatgcggtactcaagtagaatcctagaaaaaagagacaaatatctttacaaacaaacaaccgacaaatgccaaataaaacgaggtaaaataaacccacattttggaatgactcacttgatgcatattgcagtgcaaaccccaccaagaacaaatgaccaattgattggattgtacagcacatttttgactaatcaagtacaaggtctctcaagcaaaaatggttagtacgaagaaatgcagacagtagcacatgatgatataatgtcaactataataactatatagaacacactacagaaaacttaaaccagtgcaaaaaaagtgttttcacaactttgaaagatgatcacaagcacatgaagtacttgttgtagtaagtagtgcactaaaacataatcacaatcatatctttatagtaaatatagatccataacattccttttacagagtaaaaatccgaccatacatgctatttgtgaacaattcaactaaatttgtgggacaaaagagagagagaaggaaattgaagcttagcttagcaaggtaagaagaatccaagcaattggcttggctgcaagtgcatgtataaaatattgaactgaaaaatttgtagtgaaatttgaaggaaacttattctccttcccaacccatttggcgagcacgccgttcccatgttgaagttacctttctctccttggtgagcaatgcttcggaacgctctctggccccctcgcaggtttcagttgcagtattgcatttttctgcttccttttggtattgagaagctatccttttcgcttcagcaaatgtgacgttcatgtgccggttgtgttcctcggcaacagcctcttgcagtttcaactcctcagtcagaaggtccacaaattgcttctccatttcctgctttagttccgggtcattacttccgcaatctgcacaagcataatgagtatgaaacttgagttaacagttgaaagctcaggagctttacactaagaaatattcaactagtttttcaaatccacaaggaatcataacaagtactctacctgagattgagagattagctaaacctgcaaaacaaccaaggtgacattagtcagtagagtactaagaaatctcttaatacaaaatgaacgcactgctaactaaaataatttctaatgaccaatcacagaaagtcaatgaaaaggataactaatccaaatgttctagcacataatttaggagccaatatatactatacaattatttttttcactacaagccaaccaggaatttcttgtgcagttaaagaatatgttgaacatatatgagtacatatgcataattgaggggttagagaaacttgataaaaaaaattctaggatagcttgaaaagaagaagaatcttgaagttgtaagatccaatggaagtacatgaatgcatgtatgccagtggaatcttgaaggagtaaaatccaattaaaatcttggtctaaacgaggaataataactttacaactgagttcatatgggtaaacaagttcacaagcctcaaggattcatacacttataagggaaagcaaacaagatccaactacaagttaaaaggtcatttcatatcaaacaaagcatgaacattttgttatccatgcacacaaaaacaaaaagtaagagaactttcaaaacaagggaagggaccctaaaaccagagtggaattcctcataaatgagctaaattcatcttgaatttatgtcaattggtttcatatatccaaaaattcagaatcaacaatacccagagaaagataaaatgtctcaatcagaaaaaaggtatccttaatttcacttcatttagctcttaacaagataaaatagaatgattcagcgaaaccccaagtaggtttttgttttcttttatataaacatccgtacataaacaaaaaaactctgaatccaactgatcaaaacctcaaatcgatgaaatgggcaccattcattctgattcaaaagcacataaaagtacaaaaaccaatgcgatctaaagcaatcaagacaaaagaattgaagaaaaagctgaataaaacaaaa

SEQ ID NO: 23535 - DNA, 5348 bp, Cannabis sativa
ctttttaaaggttttttaagttggacagcagaaaaacaaatataaaattacaatttgggctttttttagggctcaaatagcccatttaactttcaaaatttgaggcgcacgcctcttacacctcagcgcctcacccctcgattcagcgcctcacccattaaggcgtacacctctcttctcctcagcaaggcgcacgccttggtgcaatctttaaacgcctcaaaaacgcctttttaaacgttgtaactatgttaaacatacatataaaaaaattaaatattgtttagacacattacaataaatcttatattattatgaattgaaagtagctatgaaatatgtttttttcaataaatttgaaggtatatttgtttaaagggaaaaaaaataatgctaaatattaaagtttgagattgaagtgcaaatgaatgtgtataggttagggatttttatcacgaaaccttaactttttaacaaaaaagattggatggaaaagtaaaaaggactaatgatgctaaccttttaaggggttggggatttgaatggaaaaaatttgaggttggatacctaagtgcaaaaggtgagttagaatatggatttttgctgcaaataagccatattttactattttagtttatcaatgatctctgtattttgatggaatattgcaagtaatgatctttgtaagcactaatggtttgctatttacaggacaatatggctcaagctcttgatatctgtcttcggcttcttgaaaacagtcgatccactgacagcgtgcataggtaagttttttttattagtttgtcagttaatatattataccagtacagctttttttatcatctagaattctattttaatttgtaagttttccagtactgctgcagctaccttcagacaagcagtggccttgatttttgatcatgtagtttctgccgaatctcttccttctggcaagtttggttctggaggttacatttctcgagctagttcagtcactagtgaagttactcgcagcatcaatcttttagagtatgtagttttcctagacattactgatcagttgcttttggtattatatgtgtcgaggatgtgtttctgatctgcatttgtaattttttgttcatctaagtagataagtagaaaagttctgcacattgatagggtatcatatttttctcgtaacatttcatggtcttggtcgtataatcgctttacacatgaacaggtcattggagcatgactctagagggtcaccgttgatgagagaaaatctaaccaaagctggaaagcttgggcttcgtttgcttgaagacctgacagctctttctgcatctggatctgtatgtattgtttatgaagttttactgtatatagagtggaatatcaactagatttctatgtggaacttgtacatggtcttttggaaagttttccattatgtcttatgtcattttccatataaagttaactgcagttatgtcagaaaactgaaacttttttgtctttttcttctaggcaatttggttacatgtcaattctcttcaacgctccttcgtacttgatatactcgagtaagaagttattttccttgtagcttatgctcctctaattcatctttaaatcttaataaacatttctattggccaagttgtgttgtattttgtattttctttttgaactatattagattattttgtaatttgtcaaaaacgtccctcagaggtatttatgtatatacatagctgataaagctaattaatattataagctatccctttagggttccaaggttgtagtcaaattgcccactgcctacgtgacttaagcacattgtggtgtgaggcagattgtgtctgacaatgaacacatcattgtttttttctctttttgaaatgagacagaggtcacttgtcttagactgacctcctcccaaaattaataatggacacatcattgttaatagactgtcattgtgattttgacccttacctgctgctgagtgtgctgatacaaaattggtgagctcatgaaaccttcaattgaccgagcgtggctaaggtacacgactcatatagaatgaaataccattcccttccctgttttgtctgataataccaaattggtgatactcacctatatcaccttgctctaactcaccaattacacaattacccccaccagtagtaaaagacaattcttcccctgagcagcagtgttcttgccttggctagcataagtgtagggcacccgagtcctaacaagattgaacatgtgttgaaagtcttggatccataagcaacagcataatattatgttctggaaattttaggccattttagtttttgtattttaaataagatttttcttccacttgtctgtaatcaagaggtccttatgttaactcacgtttgatgtttatcatgcaggttcatcttgtccagttatgtggctgtatttaaaattcttcttccatatcagcaggtgatttaatttaagtatatgttttttttttaatatttttaaaaaaatttctttgtcaaaaatacaaagaaaagagatcgaatttgaccaagtgtctgaatacagttttgaatacaataatgtcccgtataaattagtatgatgattttctgaaccaaattaagtgatattatatgtgaagtggtgcatgtgtatatggtttggggtgggattttgaggtgaagtaggaaaggttgatgtgatttttaattttaatgtaattcattctattcaggctgtgtccagaaatactgatttctgtagaggcacatggattgtaaataggctcttcctttgggtggattccttttactttaaacttgtaatcttcctaaagtatgcactattttattcttaccaaaataaagggagaaaaaaggggaaaaaagcacagggattccctataccttttaaaggaaaataggctcaggttcacttggttgttatgccttttgatctcttcatgcaacattgtatgtttggactgaaatttttttattgaatttctaacaggttttgcgtcaccagatatgttcgcttttaatgacttcactccgtcttgatgctgaggtaattggttttgttccttaaatgtgtgattgctacaagtctttttgtccatcatgtgcaattttttttgagtgtggctaagttagggacagttttcactgttcattattgctcccctaaactttttcaatgctcaatcagcctgagggagaagcaggagagccttcttacagacgtttggttttgcgatcagttgctcatattatcaggctatacagttcatcccttatcacagaatgtgaggtgtgtgttttattattttaccacatggattctaaccctctctaattttacactaaaaacgtcatgtcttatgaggtgaaaggaacataatgtctccggggttttccaaatgcaggttttcctcagtatgttgttgaaggcaactattcttgacctgccattatggcatcgcattcttgttcttgaagtgctgagggtaattctagaactggaacacactccttttttatgtagtatatgtgacatagaagattatggtagagccttgttaagctgtttgaataattagaaatgtggaactttgacagggtttttgtttggaggcacgaactttgcggattctcttccaaaactttgatatgtaagatcacttgtaccagtcttcttttttcgtttaggatattttattatgtagctgtatttgttagaattttcatcagcatgtctttttcccagcttatgtttggctttttttttacatgaaatgtttgtcatcaacaagttttgtttccttattatgagcagtcagatttataaagaaatattatcgtgcctaatttatggtatctgctatataggcatcctaagaacaccaatattgttgagggcatggtcaaggctctggctagagttgtttcaagtgtacaggtaagatatgtttatgtatatattttataatattttttatattaatcctagctggaaaaactcatactaatggtgtttagttttaaagttggtgcttttttttttgctcacattaaaaaattatcatcatgaatatcttaacttcgaggtcatttctttttttatttttttttaaaaaggaaaaagagaccacttgtcttagactggcttccccccgatataaattgcaagcctcacttaaggcggccatagtaaacaaaacatgaagcaaaaataaaaacgaaaaaaactgtagaaaaaattgtgacagcagtcacaaaatcctaggattattacaacaacacaccccaatccctgcttacgtctaaaaaggagagatcctcgaaatgtttagttctgaagatcaaagtggcagtccagaatttgattctttcctaaacatcctccgcagacctttccagtccaccaaaaattctgctatttctctctgtccacaccgcccataacagtgccataatggcagtcctccccaatttaactttccttttgttccccatcagtttgcttattaggacagcggaaaccaagccaggtaagacccaatccaagcaaaattctttgaacaataacgaccatattttccgcgtatatatgcattctaggaataaatgctcaatcgattcataactagacttgcaacaaacacaccattatggcactgttatgggcggtgtggactttgcttgacttgaagaatctttgacatgtaattgatgagattttaatcgaatggtaattaatttgcatactgtaatttacttgacttgaagaaactttgacatgtagggtcaagagactagtgaggagagcctggcagctgttgcagggatgttcagtagcaaagctaaaggtaatcacctccttggctaagataatatagataaataggtttttttaaatgtgtgtttgtgtcgaaatcttggcaccttgggtttgaggattggttgtcaggagtactgtatatctagcatatgttatactgtttttcttttgatttatattggaaatttaaggcgatgtaattatcatacttgtgtttgtaactagtttaagatgtactcctagaattatagggggattcaactattgtatttttgatttttgaataacagtgaccatgttccttctgcaggaattgagtggagccttgataacgatgcgtcaaatactgcagtcttagttgctagcgaagctcatgctataactctggctgttgagggtttattaggagttgtctttacagtggctgcattaacggatgaagcaatggatgttggtgaggtattttttatttatttttt

SEQ ID NO: 23536 - DNA, 1866 bp, Cannabis sativa
ggcataaaacccaacagcttctatagtgagataaattatctagttgttctccttcatttatagataaaggtctgcctactgtcattggtgtgggacttggttttatattggctatgtcatatttttctaataatttttctatgtatttaccctgtgataagagaagcctgttgtatctttcaatagctcaattcttagaaaatagtgcaggtgcccgaagtctttcaagtgaacattggattcagtttgttgatgaagagttctatttctttggcatcattccctatacttatgatattatccacgtaaattaatattataatcacaaagttttaattctttatcaagaacatggatgaatctacctttgaattcttaaaattccattctatcaaggtgttctttaattggtcgtgccatgatcatggtgcttggcacaggccatagatcgatttgttgagcttgcgaacatgacaaggcttggtggaatcttggaaacccgatggcatcatgaatacattctctgcaagaatgccattaagaaatacattattgatatcgagttgactaatatcccaattatgatctgctgtaatagttaacaccacacgaactgttgaggctttaattacagggctaaatgtctctcaaaaatcaactcctagacgttgatgaaatcctttcgccacaagaagtgctttgtatctttcaaatgtaccatccagattatattttcttataaacccatttacatccgacaatattgtgagtaaccataattaaagtgataagaatcaaagtgcgattatagtggagagccacaatctcttctcccatagtcatattccacccctcatgctgaagtgcattctctattgaataaggttgatgaagtgagacataaaacttagcatgaccaaggtacacttttggtttcaagattcttgcttatgcctgtgtgattattggatgagaagggtgaattaaagtctaagaattattattaggaggagtggagagtggtgaggtagtatttgatgtgtcctaaggtgcaataattggtgattaatgtagagatgatatattctattcaaaaataaaaggacttactagtcgtggtgcaggcgattgagatagtggtttgtagtgtgagcaggtgttggtgctgtcaaatttgcattatgattagatatatctggtgcgactgaatgaggtgaatgtgacacactgggtaaaatgaactaggattgaggagtgtcaagagtgaatatttgttcatggtgatagagtgaataaggggactggcagtggcaacctagaccataagcggaaggctaaagcttctagagcaccaagaagtaatagaaactttcatgggaatagaggtggccgtcaatgtcgcgggtcttcattagaacttacccggagtgtcctaaatgcaaaaagcaccatcaggttgagtgtcgagccaaaacgtgttcccagtgcagtatggtgggccattttatcacagactgtctaaaatttaggaaagaataataaaagaagaacaacaatcgaaatctagggtggttgttcactatgactcaagttgacgctgatcctagtccatcagtggtgacaggtcagttgtctataaattcttgttcttatttagtattaattgatttgggagctattcattcttatgtatcaagtagagtaatagagagttttccttaactgtttgatgtgtatgcttcggggtttaataccttattaccctctggagacctaattgtatctactcgatggattaggtctttgtctttttagactgacggttatgagttaaccaccaaactaattgagctacaattatctgat

SEQ ID NO: 23537 - DNA, 2219 bp, Cannabis sativa
tctctctttgttgaattatcaagcttattaaggatatatcttcatcaaaaaaagaaaagcttattaaggattaattaaaggataaaaatatcagaaaaagaagagatatcaatcttaattggtacattttttcctttctgaagactattatctataaaaggctttgaagaaacataaaatatttttctaaaagttaatttgttgtcttgctgaaaaaaaaagtagcatgaatattatttaatttccaattgattgttcctttctctctctcattcattccaattgtccttgtgaattttttattttttatttttaaaaaataaatctagcatggaaaaagaaggaaaaccattgttgttgaaaagggagtattttccttccttttctctctagtggaaaaggattcattttctttttgaattaatcccaaacatctttgaaagattcatacaagtgcaatatatatgggttaataaaaagagaacatatacaaatgaagatatataccacgacgaatatggtgttttcacctttaaagattggttctgaataataattcttaacaattgatggtttattcttcataatatccataatttgaaacaaaatttaaaacattaataaatgagaattatggaattaaagagagagtgtgtgagagagagagatggaatctcaatatttgaaatctgagttttacataattttgacaatagcaaaattaaacacataaacgtatatactgaaagatgatttaacatcaagaattaaccatatatataattatagctaaaaataatataaatatggagattttaataaatccactattcgatgtacatctagttgctgatgatcccatacaaaaatttccttttacttctctcccatcccatagtatctgcaatctctatttacacttaacacccccaaaaaaaaaggaagagaaggaaaaaaaaaacacaaaaagaagtgaaaactcagagaattaatccttctttgccttatgcatcagatttttttttcttttttgagactaattaagaaggagtttgtatttaatcatgccagcataaaagcatgacaacacacctcctaatgatgtaaagtcttgctctttgttccctaagggctcctccaagtcctctgcttgataatcttctcttggatcctcccatggtggctgaactagtcatcttcattgttattttgaaagaatatagtagtactttgttgcttgtggatatataatgtaaagttttgagtagtgaggagctattgcaattgcaaatgcaaatgataagtttgttattgagaattaagaaagaaggagtttatatagaagagggggttgaggtgaggttgaggagtgtggtcctgactaatattggtctagtaaagagcatacgatggggcatgaaagggcgtgaagtgcccccaaacccaccagacaaagccccattttgggcccacttcccacttggggaatccatactccaacacataacaaaatgataaaaacaatccaaccaagtctctctctatctctcttatacatacttaataggatatatagtcttatatggatcctatcttcatgtaggaattacccaccgccataatgggtcggccattattttaatattacaaaacagaaagtttcttattcagccaaaataaataaaaagattataaaagttgtgtgtgcttacatatagttagttagtatgtgtaaatttgcctttaattaatttcgtgaaggaatattttcttctgtgatactttaatacttacttaaaatagaaccttgaatatagtttctcttgtttgatagagatgggccaaaaaaaagagaaaagaaaagaaaaaactaatagaaattaagtggttttctttgttggtttcctttgatattttgttgttggatccacctccataggcaataatcaagccctggtttagttgaatcctacataagcaagcatattattaacgaccatagagttaaagcaagtttaaagtatatcatcacgagctcatcttatcatcttattgactctaaaaaatagttaaccaatgtggttgtggggacaaagggtatatcatttgatggtgaagttttctttattattatttcttttgttctttgattaagaatagtaataataagttctgatgttaaagtaattgaatgttatgttagtgtttgttaacaattt

SEQ ID NO: 23538 - DNA, 1561 bp, Cannabis sativa
aaaaaaaatattactaacgacattgtcagcattgataattttatcaatgccaacaattttatcattaatagagttaggaccgtcaaacaccatctatttccccattggtatgattttatccgctttgggcctaagccctcatggttttatttttgggacattcccaaaaggtctcattctaatggagataatgaacatccttatatacccaagatccttagcatttctagccaatgtgagactttagttgtacacccaacaattctcccatcaaacaaaggaccatcttgcctcccctcagaagattacagatctaaacctgaatccctcgattccaacactcaagatccccttgagtaagctagataaatctcttaaccaactagatttgaaatcccttcaaatacatgatccctcaatttcaacactcaagatccccttgagtaagctagatgaatcccttcaccagctagattcaaaatcccttcgaatcagatctgaacctccgactgctctagcagcaagtgtcaccttcgttgtttggcaatctgaggactcattcacatggttaattttggaatctgactctaataccacttgttaggaccgtctaacaccatctatttccctattgttatgatattgtccactttgggattaagccctcacgattttatttttgaggacctttccaaaaggcctcattccaatagagattgttttcatccttatatacccaagatccttcctatttctagccaatgtaggactttaattgtagtcccaacaaatagtccatgtcaccactagctaattcattattttaccaacaaaaatagatttttatcaatgatgactcttaaatgtcgttggtgatactcttatttttattaagaacttaatggcgctagtgatagtgcttttattgaagtccatgattcttgtagtgaaagactggtcttgtgagttctgaagagaatcacaagaactgattctggtttaagcaaccactcaaaatcgacattgaggtatggaagaaaaggagaagcttattgttgaggtcccaaagctaaatgaagtgaagacatatgcaacactagatgaatcatagagtttagagatagctaaagattataagcggtaggaccgatgcgagctaggatgggaaaggaacacaaaaatcgtggagacatcgatcttcttgttaggtcaggtcatttgtctacagtgtgttgtcagtaagggcaaagcttcatttaaacttggtcacctactttgaaatgaacattgcgggaaaaatcaaaagattttttaatggagcttaaacttaaaaaaaaactcacttaagcttaagaaatatctaagagtggtgagaaattctaacctatatggattagaggtggtgctgcctcttatgagcattaggagtattctctagaaagtccatgaattaatattttttacatggccattaacagtgcaagatcgagatataagatctcaagtgagcattagtaagggtgtgtgttatcaccgatttttactaaagaaatagttgctc

SEQ ID NO: 23539 - DNA, 4931 bp, Cannabis sativa
gaggtatcttcttcgttgggagctattactttctgtgcattctctggcgctttcttaaatcctatcctagatcgtaccctagtcttcaactttttgctctagtgataatttccacaaacgacgccaactgttgatgctaaaaatttgctcaacaataaatttttatttcaactttgaattctttacgccatgattgatataatcttagtaaataactctcctagtttacacaattcccctatgtatcaatgattcctttcttcgtatccaactttcgaatgaaaagtatgttggagatgtattctggtagagttttgaattgtctggtgtgatcaagaatctatccctattttttaatgatgggtctcctgtttataagcaagaatggttgatggattatgctcctcctctgctctgagagatttacgtgagtttgctctactcctcttcattcgtgctctctccttcctaatttgcttcttcagactctactatcttagcttctcgagctctactccactctctgagttttgagtcatcattctacattcccttttaatgatagatgcattttgtattattcctgccaaatcatcttattagtcattcgttgtttaaaatagtaaaattactttaataccctcaagattatttttatcccttacatatatatatatcaggataaacttaacaacaacataaacactattttttgaagctcatgagactggactttgattgatttatcatctatcatttgatacttcagatagtggctaactgcatatttctttaatctagccacctcattatcatatttgttaatgatactgatatttttttagcgaatttgtcagaattataatagtcatacaaattattagaaaaactattttaaataaaattcttacaaaggaaatcattctctacacaagaatttcttttcttaacttgctattcatatttcttgacttcattatttttctcggtagtatgaggagtctcagacacaataggtacatacgcatatttattcatagagaaaatatatgtataattatcttctgtcattaacagttaacatgcaaaccctcaaaacgaaaaatcttgttaatatcaaagatagaaccaaaaatgtcatcagtagtagtcatgagagaacgaatgtcttaaaattgttataaacgttattatcgaatgacattttgggttgagtcacaaactagactcctctctttaaggcgttcacgacacttccgaatattgtaatcgtaatgaatttaattaaacatgttttcttaatttaaataaataaaataataataatttttttataaaaaataatgtgaactcaaatcggaatgacgacggcggtggcacgctcgtatgagttcttacccatttccacaaaattgagtatccattattgggccaacacaagtgccaaagttgcattttgtatataccattataaataatgttcatatcccttataaatgcacatatcactcataagactccatatcaagcaccaaaaaaaatcttatttttgtaaaaaaaaaaatcattaactttgttaaaagttccaacaaaaatgtaatcacataaatacccgacttgttcttaaatacttgctcctctaaaatctactgatatgtctaaatatttgtatttaacatgttatttgtatttgctcatcatcatttttataaaaatgtaacatgaagtgttttttttttccctaaatatttgtaacatgaagttgaacatgatgaaacaatttatatcataccattgcttattatgtttaattatagctgaacattccatgttacatcagtgtaaagctacttatacatttgtttctaaaaatgtcatactaagtctcaggccagtttcttagtctgcataacttggccttggcactagtactattgccattaaacagaacataatattatatcgatagatttcagggcctcaaagttgcagcagctacatatatatatatatatatatatgtatgtatatatactagagaggaacatctgatgggtattcatttggatatcttttgacagctaacctcagcaacttctcttgctcaacaaggttggagggaggaacatcatagacatctgtaaaaagatctgcaactgctggtttctccactttctcagccacttgaattgcttgtaacatctacacaaccaaacaccataaagggtcaaagttttcaaaagctattaatctaaacaattttactcctaatataaaatcttttatcctaggcctcattgagctagttctttaaatgatggtttacttcaaactttcttaggttcataattgagtaataaatgagtatatgattgtttctggaagtcatttcagtcttggttctaccagtatctcttacttacctgttttctcacattgtgtctatgctccgattcagcctcagcattccaccaaccattactttcgatccattgtctaaaccgagtaacagggtcacgtgacaatctccaccattcaatctcttccgctgatctgtacttggttgaatcgtcagatgttgagtggtgtcccactcgataggttagtgcctgtaaatggaaaccaaataaagtgagaagcttcttaatttcaaaatttgcctcctaaaaatgccaaatttcatcaattgtggccttacctcaattaagactggtctgtgttcacgaattgccatgttacgtgcagcatgaacagcgctgtacactgcaagcgcatcattaccatctactcgaatacttcggattccatatgcctggcccttaacaacaacgccatcacctatacatcaatgaaagacataccaccgacataatacattagaaagaaacaaatgttattgcttagatattaacaaacattttgtaatagttggcaaattagtagagcaaagggaaaataaaagaaaaattacttcgaaattgatcttctgttggtgtacttatagcccaaccattatttcggcagatgaatacaaccggtgcctccctaactgccgcaaagtttaaagccgcatgaaagtcaccctacattgcttcaactgttagaaaaccatgtaaaaacgaatgagttcattatcttgatggaaataggatgttacctcacttgtcccgccatcaccaaaataagttacagcgcaagcatcttttttgtccatctttaatgaatatgcagcaccaacggcctgaggaatttgtgtactgcaaaacagatggaaagatatgatggtgcactttaaatgttttacataatttactttacagagtacattctcaaaatcatacgcgatcggtgatgagatggtgaagtaattgagcttgttagatccatagtgtataggcatttgcctgcctttcccgtaatcagctttgttaccaaaacactgatttgcaaattcttgcagggtgaaaccacgccataatagaactcctggttcccgatactgcatccgtaataaggaaaattctagcattattctcagccctaccatacttaaatgttaaacaaaataggtaaatcaaaatatatgaaagtatgcagtaacctgaggaaagataaggtcgtcaagagttagtgctgcagcagatgcaatgttgatggcttcttctccaattgtggttagataaaaggaaattctcccttgtctttgagcttcatagaaaatattatccatcacttgaagtgtgaccatttcactgtacattttcagagctacttctttatttacctatttaaatcaataggtaatcggtcacaactctgacacttatcctcattatactcaaaatttatagaccaatttaagtttgatcatgtgaagttctgaggtacctgtacataagtgctgcctaaaataatctgcccattgttatcaaggaccctatagcagggtaccctctcttcaggagattcagatatgaacttcaattcgggagtgaatgcaatttttcctcctgagaaatccaagacctgtcacacacaatagaaaccttagaaagcacaaaacatttgagcataattcattataggtatcagctatgaagagctgtcatgttcttgcatctactattaatttaatgagttaaccatgtcttgttgctcagaagtaaatagttctgtctcctttttttatttctcttctcagaccaaaattacattcatagcaagataacaaaccagctatagcagttagacaacaaaccaaggataatagcagatgcaagttcaaatgaactacctaaatgctagcctaattttcttttataaggaagaaaacaatgaacacattagcctctagtaagttctttcactaaacccaaattagaaacttcataatttcttgtgtggtcccaaaacagaggaaccatcaatagtttaataacttcatcatctatattaacagagcaatttctttaatacaaagattgagtatacatcagaataattgtttccaattccaaacaaaggcatttctgttaaaaaagattgcctgtgtgaaatgatacacaaaatgaattgtcaacacatagatatgttatataagcaaggagatccaatcttttattcactggaaatagtatgctctgacacaagatgttcatagaaattttttacttttattattgtttatatcttcatagcggcttatagatacatattgactttgactctgccagcctatttgtgtatagcacatgtatattcatttatcatcctttgcacaaaactctggatcaatatataaaactatgaaagaaaggccacaatattctaagccacataacataaaaagttgaatttcaaacattctgtcccaatcatagtgataagatcaacaataaataaaaatgtgttgaggtttgaacacttaaaat

SEQ ID NO: 23540 - DNA, 7308 bp, Cannabis sativa
ccagagagaggaagaatatactagggttggccaatgtagccaagttttagagatatggcttgtatccccttgcatttggagttgtaggggccgagggcccatcaggtggtgtagatggagcctcagctactaaggaggtcaacccaggtggtgggcatgctcctgacatggataatgatgtgcctctatctcgaatagccaaggatttagaaaagtgagagatgcccctccgctagcacttggctcatgggggagggcaccgtggaagatgctactctgtggatccggcctagaggccagagttctgttgggccaactcgccccttacctccatctaaaggcaagggcaatgcggctgctcctgattcagtttattcctcttttgaggatgatggtgtttgatagttgattgcactatcttttatattcttgtcttgcattgaatattttataacttgtattctaactttgttactttcttcctataaatatttcttccagattttgaggtttagctggtggaccttcagatgagcctttaggtcgctcgagggctaaggtggcccagaccacccattctagtgacgttgcgtggtcatcccttcttcttcctcctcctaggcctatgctagttgggtagcccatgattgttgaccctccatcaaggagggatcgaccttcgggcaagggcacccagaagcctagtcgaggagcaggtttagccatggggctgagatccatggaggcagtctgtaggcgtctggacacagcctttcctattgtggataatgagctttaagagcttggtgatggcgagtcaaagaggttttcttcttcagcctttaagagttggccccggtaagttacacatttaattttgctcttttttatgttattgtagactggataaccataggggctattgtatgaagctggccggccattattgtgtctttgaaaggctaggcagccttggtagcaccatagaggggctggccgaccagcgttgtcttctggcactaatcttgaccttattttgttttttaggcctttatgaagcttagcttttggcatggcaacttctgggggtcctcgagtgctctccatgagcaggggaagaccttagaggctgagctcctagcaaaaggtaaggttgtaactgacttggatgctcttgtccaacagaattgggacatgattttgggtttagagctcatgctcaatactaatcatcaagagaatacatcgctcactactgacaactctagagttcaagctgcgagttcatttacgagttcaagctgtgtaaccctatagttgatctttcttacatgggagatgcttctttctttgtgagcaaactaactcatggcaaagcactatatgagagcaggttagaagtagaccagaccactatctagccagaaacatcgtcatcggggtagttcgatgaggaaatggtcggtccacccactgagaaggtggctggccaggactttgaccaggtgtccagccagcttacaaaggctatggccagcccacacttcagtgattcagactctcaagcttctgattcagccccacttgcacctacacacatgtagcttcaatttattagtatttcaactttatgatttcattagtatagacattttatttcatgttctgtatggcatactggccttttagttttgaacactacttattttcagccttagggctttcatgttcgtactttttgcctataggccctctatttttgaatattactattatttagccctgaagctttttattatggatgtgtgaccgacctaggtatcttcttattgcctttacatgtaagtatcaagatttacttttttatgccaagctgaagtatgcatgcacttgacttagaggcaggtttagtagcttttactaagcgtaaaaatttctctgcataagttctctgtgctagttgatgcagtgtacggtgtgggtgcccccaagtgagcacgtagacttacggtctcttggtcacttataattcaccaagtttcatagaccttgcgtgagaattttcttcgggtgctacctgttgtatgcatgtggaactgaaaaataataactttaagaagttaatctcgttagtaagtggtttagacacacatatttgaatataaacaatattttttattcattaattggtctttgtaactgtgcaacttacataaattgaatctacaagcctacataataaaaattcacttctagatatcaaatggatacctctgcttgacatgcaaagtagaggccatcgttgaataacgatgggacgccacgcctaaaggctgtgggtactagctctttttagtctaatgatgagttagtagaactactactattaaatagcattctgtaagttggtcactggtagtacttgcgaatgtgctctccattgtaatatcttggtaggagaacgagttccatgttctcgttgtaccttcccaacttgtagactcccttactagttatctctataacttgataggggccttcccagctgggtccgaacactcatactattggatctttggtgtttaggaatactcttaagggcaccaggtctcctatgaaaaaaattttgtccttgaattggttgttgaagtgcctagcgaccttttgttggtaggcctgcagctttaggttggcttgatctcttctttcttctatttcatcaagggatgctgccagtaagatgttgtttgtatcctagtcataggttgtcctcctgtgagacagtggcaccaattctacaagcagcatcacctcatagccatgagctagagcaaatagattttgcccagtgctcgtcttctcggtagtctgatgcgaccatatgacctctgggagcagtttaggccaattgccttttgcctcttcaaggcacttctttaaggtgtccttgagggtcttgttgacagcttttacctgcccattttcttgaggatgggacacggtaaagaagcttctgatgataccatgtttgttacgtaaactagtgaacatgtcactatcaaactgatttccattgtttgacacaatcttctgtggaagtctaaatcgacatatgattttcttgacaacaaagttaaggaattttttggaggtgattgttgtcaagggttcagcttctgcccacttgttaaagtagtttacaatgactatgatgaactacacccatccttttccctttgggagttcaccaatcaggtctatcccctacactgcgaagggccaaggagactgcatcattgtgagcttattgggtggagctttagggatttttgagaatcgctagcacttctcaccttttttgacataattcatcgaatcctcgatcattgttggccaaaagtacccatgtcagagtatcttcttggataggctttgcccccgacatgattgtggcagatgccttcatgcaggtctatcatcaaccgcacagcttcagccttggtgacaaaccttaagagcagctaggattagatacttaacaacctttcttctcatcttttttgcctcattcatgttttcaagaaaggctccaatttggaggtaaggtgcaataggtgtcatccatgttggactgtcatccaacatgtcgacttcttcagggatggtaatgcttggttccttcaggaacagtattggcaccaggtttgccttgtcactaatggtgctacttgccaaacaggcaggtgcatctactgtggcattctattctctggggatctgccttatagtatagcctttgagataacgtaaaaattcttagatcttgcttaagtaggccatcattccttcacctcgagttttgtattcacctagggcttgattcacgactagttgagagtcgatgaatatgtctaggtggtcagcccgtacttcatgcgccagcttgaggccaacgatcaaggcttcatattcagcctcgttgcttgaggctttgaagcaaaattttattactccgtgcagttgttgcccctaggtgttataagggcaattcctacaccgaacaattggtcagtgcaacttcgatcaacatgaagttttcatgttgattcttcaggtttttgctgctgctcttgctcttgcttcttctctgcctctttcttttctcctaaatcttgagagattttaagagaggtgtttgtacatttggccacgaagtctacaagggcttgaccctttatagccattcttggttgacatatgatgtcaaaatagccaagttcaacggcccacttgagtagtcaaccaaatgctttaggtttttataaaacctactacaatggttggtcggtgtccacctttattgggtgtgcttggaagtatgtcctcatctttctgtaagccaagagcaagctgtaggttagcttctccatgagtgggtaccaactttcagtgtcgatcagtctcttgctgatggagcatataaggtgttgtacaccgtcttattctcttgttagaatttcattcacaacatgttttgtgaatgttatttacacgcctaactcttcattgtctaggggttttgacaacataggtggttgcgccaattgttttttagctcctagaatgccttttcacattcctttgtccactcaaattttttgttgcctcttagaatattgaagaagggcacccacttgtttgtaggcttggacacaaatatgcttagtgcaacaatgcgtcctgtcaggctttgtacttccttgatggtataggcgacttcatctccaaaagggcttggatcttatctaggtttgcttctattcccctggcattgactatgaatccaacaaattttcttgagcctagtttgaaaaaaacacttgagggggttaagcttcatgttgtacttgaggaggaccctgacacattcgtctaggtcttccacatgccccaaacctttttggacttgaccagcatgtcatccatatgcacctccatgttgaggccaataagatcgttgaacattttgttcacaagcctctagtaggtggcccctacatttttcagcccaaaggggatgactttgtagcattacaggcctaagtctatcatggagcttgtatgctccagatctggcatatgcatcttaatctggttgtaacttgagtacatgtccattaaacttagaatttcatggccaactgtggcgtccacctattggtcaattcttggaagtagaaagcagccctttggacatgctttgttaaggttggtgaagtcaatgcacactctccactctttgtttggtttggtaccaacacagggttggatactcaaagtggatagaatactccgtttataaagtcatgggcctatagcctcttgacttcatctctaagcgcttgggcacactctttgtccaacaacctccatttttgctgtacagttcaaaagtttagatcaatgttgagggtatgggtcatcacggaagggtcgattctgaccatgtctccatgtgaccttgcaaagaggtttaggtttgcccttaaaaattctattagcattgattttatttctggtgctaaacccttcccaatcttcagtcttctagctagagaaatggaatcaacctccactccctccagctcttctataggtccaaagcgatatgtaggatccctaaagtgaggatctatgtttgcatccccactttgggttggacttcattgccctttgttggactattctttagagctcttagcgggcatcttatctttcttggctttggttaggaccaagttgtaacaatgatgggttgactattggtctcttctcaaacatcctatcccatgccttgttgggaatttcaagtagaggtggtagatggatgtcaccgccttcaagtcatacagggttggtcgacctatcatggtgttgaaagctgagggaatgttgattacgacgagctgcaccattagatttttggtagttggaatttcttcaatagtgagtgccaatctgatatacccaatgggtgcaataccttggccaaagaagtcatacatcactgagtgcagggtgccaaatcagttagttggagccccatattttcatatgttgatttgaaaagaatgttggaggaggttccattgtccaccatgcttctttgcacagtcatattcttgatttggatagtaatgactaggggtcattgtgcgggaaattgacttgagctgcatctctttctatgaaagagattgtgggctctccaaccattggctgcttggagctcctttcctcgatgatcaggatgttacttttaggctcgtgatggaatgtctgagcatagcattccctagctttggtagtcttgcctgaaatatggggtctgccgataatgacccccaagtgacccgccactggaggtggcataggatctccattctgggcaccttatgcctgagtctggtcattttgcacataacgatgcagatgggggattgttcttccttattaggaattcaatctccctattcaagttttgacactcgttggtgtcatggacgaagtcattgtgcaaccgacaaaactttgacatgtccatcttgctcaactcccttttaatgggagggggcttcttgtatgggacagttccctgagtgtccatgaagatggcctcaggtttctccgtcaggagggtgaagtaaataaacttctcctccttgtctttctagtttcgtggcatgggataagtgttatacttcccctctctgcgactgtttcttccaaagctattattgttgcccttgccccagtgttcttacgactagatgtttgggcagagttgctagtgcctacttgtgcgccttgaaattcatggggttgtaggatgcccttcgatttcctattactgatttgttctgtctgggcttgtaggacaacttcctctagcttgataaagccgtcagctctgtcgaggaactccttcatgttgttggaaaagatcctcctgatatctttccaaaagtcactcagtggaaggatgcccctcaatacaaccgtatatcagccttcttttgtaaggctattgaccttggttgtaacgccctaaataattaagcatgctacccaagttacttacaaaaccctaatcccctaaacgagattactaatcaaaaaggcacataatttaaacttctgtaattaacaaaaaaaaaaaaactcgtaataatttaaactttacaacagttgggatcccaaaaatatttacaaactttattacaagtctttttctttcagccggcctaa

SEQ ID NO: 23541 - DNA, 3771 bp, Cannabis sativa
ttgacatttttaggccagaggcagttgagatggccatttccgatgatgccaaagatgcgactattgctgaactcgcaaatggtacaaggaaggtcgtagattattccaacgcccttgccatttaatctttttatttcttttatcaaacttcttttaagcggtacatgggtactcgtgttttgtatttggcaataccttaagacaacttatttttccatatttatgaacagcgtatccctttgggaatactccttctattaagtactttttatcgttacatttgatgtgtgtttttaattgcaacttaatgcctcaaaaagacttaaccttgcataactcgttatcgaattttgcccatgcgattactactcacagcttggtttgatgaaaattttctaagtgtaaacatgcaaaaataaagatacttcaaaaattttaaaaactctaaaaactgagaattcattagataatcaatagtacaatatatggttacaccccctagacttaggatatttatgaaataaattaactaagtatatgcatgcaagtactattgataataatattttaaatattctccattccgagctctatccaaaattgagtcgttgaggtcggataatcggtaagtggtgttaccaaatttttcagcgatgaggtaaggaccttcccaattgtcaccgaatacgccatgagcagagttgtgtgtattgggcatgactttttgcaataccagatctcctgctcgtagacttctttctttaatttttgagttgaaatagaaagttgtacgctattgataggccgcatttcttatttgggcctgatcgcgcatttcttctaaaaaaaattgagttggatcaactaattttcaatattagactcaacattgaaaatatctcttcttaatgacctagatcaaacctcgactggtaccatggcttcacatccataagagatcgagaaggggctttcaccagtcgttgagcaagcagctgtgttgtatgaccatagaacttgcggatgcttttctggccacatgccttttctttcttcgagtttaccttttatggtatgtttgatgatttagctgactacttttgtctgtccattactctgaggatatgcgaccaccaaaaagctttttgaatccctaaatcattgcaaaaattttgcatttccttacaatcaaattgctttctgctatcagagattaatttgtagggaaatccaaacctataaacaatagctcaatagacaaactcgcgtaacttcacagttgttatatcgctagagcttcagcttcagcccacgttgtaaagtagtctactgcgaccactgaatatttcactccttcttttcctttggtaactctctaattaaatctatgccccagactataaatggctagggactagtgatagaatttaactggcttggtggtctgttgacataggtcacaattcgttggcatttatcacatttcttggcaaaactggtcgcatctgctcacaaggttggccagtaataaccttgtcgcattatcttcaaggctagggaattaccaccggtgtggttaccacaaataccaccatgtacttctcaaagtatgtagtcgcattcatttccatcgatacatttaagcaatggttggctgaaactcctgcgatacaacttattgtcataaattacatatcgagcagctcgatattgtaattttttagcctcaagtttatcttcagggagttttcccgttgttaaataagtaacgattggggtcatccaagtgacttgttcagttacgtcgacctgcatgatctcttcgcgattaatcgtcggatgagccaacacatcaccaggaattacatcaagtaattttgcttctcttgttgaggccaaacgggccaaagcatctgcatgagaattataagcacgaggtattcaactaacaataaattttttgaatttagacaacaactcacaagtataggagagatatttcgccaagcatcctcccctgaccaaatattctccattggcctgacaaaccacaatttgggaattgctgaatgcttcgaggtactcgactttcatttcaagagcgagctttaaacctgtgactagagcttcatactcggcttcattgtttgaggcaaggaattcaaaccttaaggcagcgtgcactttgaattttttaggacttatcaatattatttcatcgcctgaaccttcattatttgatgccccatcagcatataaagtccatccttctcctgatggaacttcaggatcaacccactcttttgtaatgattgccaccccgtcatttggaaattcgagaatgaaatcaacaagggcctggcctttgattgtcgctcgttgtttgtattttatgttgaattggcttcactcaatcgaccatttaaccagtcgccctagcgcttttggttttgccaatacttgttgtaagggataatttgttagtacttcaataccgtgtgcttgaaaatatggtcgcaacattcgagaagcaactgccagtgcaaatgttagttgctccatttatggatagtgagtttcagcatccagtagcatttacttacatagtaaaccagatgttgtctaccttggtctttgcggattaacaccgagctaatcccgcaatcgaacactgccaggtagattgataacacttctccaggcatcggcttggatagttttgggggttgccccaggtgtgtttttagtgcctaaaaagcctctttgcatttatcagtccaccgaaactttttattacgttttagaatttgaaagaattccttacatttgtcagaggaacgagatacaagacgatctaatgcagcgactttacctaataggctctggaccacttttggtttggtgggagatcgcatctccaccagtgcctttatttatgctgggttggcctcgattcctcgttggtttgccatgaaaccaagaaattttcctgagcttactctgaaaatgcactttagaggattaagtcgcattttatagtgtcataagatcctaaacatggaatctaggtgagcgacatgttcctctgcgtgttgagattttacgagcatatcatcaacatacacttccatggtctttctaagtaaatctcgatcagtaatgaaggaggtgtgctcctgatcaggcttatacatcgggatttaattatatctcgagtatgcatccataaaactaagaagttcatgaccagtttaggtaaaatgactcccttatgaagtcgcatgccaacagacggtccacttcttctttgagtgcttgctacctcgcagcgtccattttgcggtgcttttttcgtactcctcacacttcagggtcaatgttcaactggtgacacatgacctctggcgatattctgaccatgtttaaatgtttccatgcaaaaacatccagaatcaataggtacctcgattgtttcttccatagcttgtgcagtattaatatagtcgaggatcttgggatccaaattaggtttttccacgtgcggtatctcctcaatactaaaaacttcatgtcaaggaggaggatcttcgagcaaatatataatatttactgattttttttcttttctacgagtttcaatgttgtattataacattcccttgagtttgactagactcctcgcactgatcctacacctacgggggcagggaatttcatagtgagatggtaaattgacgtgactatcttcatttctttcaagatggagcaact

SEQ ID NO: 23542 - DNA, 2295 bp, Cannabis sativa
tttgaggtaaacttcggatctctatctgatataatggacttcggagccccatgtaacctcactatttccttcacgtataactctgcatattgatccactataaaagttgttttcacagacaaaaaatgttcagacttagtaaattatctaccacaatccaaatagagtcgtacatccccgtggttctaggtaacccaaccacgaaatccatagtaatatcttcccatttccactcaggaagaatcaaaggctgcaacaaccctgcaggctgttggtgttcaaccttaatctggtgacgagtcaagcatcgagatacaaattctaccacatctttcttcatcccgcaccaccagtagaaggatttaaatcctgatacatcttggtagtgccaggatgtaatgaataaggagtggtatgagcttcctcgagaatctcatttctaagttctacactaattggaacacaaactgtagttctatacaacagcatcgcattacttgacattgtaaaatctttagcttgaccagctaaaacctcttctcggatctttacgagttatagattagttaactgagcagctttaattctatctaatagatcaaattgcaatgtcaaattattaagtttgcctacaataaactcaatacctgatttgaccatataatctactaagtggagtgaaattttgatcatactagtcaattgcccgagaccctttctactaagggcatcgaccaccacattggcctttccaagatggtaaaggatttcacagtcataatccttaaccaactccaactaatgtctctacctcatattcaaatctttttggataaagaaatatttgaggcttttgtgattggtaaaaatctcacatttttctccgtagagataatgtcgcaaaatcttcaaagcaaaactattgtggcaagttataaatcgtgagttgggtatcgttgttcatattcctttcactattgggaggcataagcgatgacccgatcaacatgcatcaaaacacatcccagaccatgtctggatgcatcacagtaaaccacaaacttctctttatcagatggtagggctaacaccagagctgtaattaatctctgtttcaactcctgaaagcttgcttcacacttatctgtccacaggaactgctgattctttttgataagttcagttaagggtattgagatcttagaaattccctcgacaaattgatggtaataaccagccaaactcagaaaaattctgaattctgtaactgtctttggtctcaggcaattcctgacggattcaatcttccctggatccaccttgatcccatccttactgataatttgtccaagaaaagacacatgtgatagccaaaaatcacactttttgaacttggcatacaagcatgtggaggtacaatgcattttttgctactcataatcatgaattggtaaccgttgaatcaatttcatttctacgcccacaccatgtggttccggatgtagtggctcaacaagtgatcaacatgaacaaatgtggtatatatcaagactatatcatttaaatcacatcttgccacgcaagtttgtgggtatgaaattttaatttttaaaagagagatgtataaaataaagttcacaaactaatatgagtgaagaatttttggcaagggatggggagggtacgtcgggttacctggactatcttcggggtaaggatccacaactatatgtggaggataaaattatttctttcttttaaaattgtatttttctatctctcaccctatttagatcattcataggtcttaaataggtccaaaatcaactcctaatcaacttatggtaaaaaaaaacgtgtctaaaatataaaaatgacaatatttgtatagaatcaggtgatagaacaccattttgtaggcaatgcatcaacaattcacaaagttttgactacttcgaccttgcttaaaaaaacatgtataactttcatgactaaacttcaaataagatgatttaacatgttttgaaaagcttagaacgagctctttaaatttggatatcacaagctcttcgaaaagattattgaagatattgtcaaaaattagctaaaaaattaagagtaaatgaatgcataaaatacaccttcatctatatatcaattaaatatagagaaggaataaaggttctaaatgacatgtttacttaaatggaatgggaataaatggtatggtattgattctcatacaattgtttactaaattttggaaagggaaaaactagtgggacccacacaaat

SEQ ID NO: 23543 - DNA, 4764 bp, Cannabis sativa
gaacagacaaagttgaccagatacattctcaagaaatttaaccatcttaccctagacctcaaacactttaaaactccataaatgtaaaatatacttatgtgatgaaaggaagagcttgggattgttaaagaccttgggaaaggaattcagacattgtgcgatagttatagcgatggcatgataatagaaatctctttaaggcatgtgattctggaccaaatcttacaagctcgagctataagtctgtcaatctttgcctaaaaatctaacagtcttgatgggtcttaaggaggattcgtcaggtctggggtggtgctcttgggttttctcatgttaaattcaaagtaaaaggcaaaagcactcgccaagatagtggatcattcaccaaaagttatttttgtctcttttctcttctgaaaaagtttgaattaaaaatgaaaagtgggtaaaagtggtgaatggaaattttacgctctatttataagagtagagtagatgatccatgcaccccttaaatggatagcccatattacatcctagaaaatataaattgaatccaacagttcgggagtggaaagatcaacattaaatgtcgaacaacgggttaatgtagtttcaatgatttttattttccttgaaacacacgttgacatgattcagtcgtcatcacttgatcaaggtgccacgtgatttttcaacgtccataaagctcacggactaagtagctaaggctaagtgcaatccacccgttagaaacaaaaggttcacaagatgtccataagtaaaagcatagaagctagagtcagtgtattgtatgtatttatgctgttagtgggctaggttacacgcaaaccctagtcggtcttgggtatatccatacccggaccttagcctataaatactacattatcccttcaagtaaagggttgaaaaatacattactcaaatactacagaaaaaatttaggattcttaagtttgtcaagaaaattgatgtaatacttcaaggcttcttagcccaatacaattgactcatgaacaagggtttcgttactatacgaaccatgtaagaatctctttctctatttcatttacttgattgattttcttagttcttattttattatatataatgagtttttaaaaatctctaaacaatttataattcaaaattgtgataatttttttattgagtatattgaagctgataatatgtaaataacaatgaaaataaatattcttaaaaaaatatttaagttactatcaatattatgcttgaaattatttctaaatatcaatatcaatacagaatcgtattaagtttatataaaagattacacagtttgatttggtttgaaccataagtaagaattttaaaattatgagcgaactagagaattataaacgatctaaattgactaaactattgacactggattcctttggtctggtttcaaatagcttggttaggattgattggagtttggaaccacatattgcggattgtatgagcaaccctagaagggggaaataggatgggcaataggtgagcaacctcaggtttctctctctcgctctctctctatctatttcccgtggcctctctctctcacaatttttttctctcttcccctctattcagattcgttttttttttttacaagtttctatgttcgaaaattgatggagcctcatcgtcagtggtcccaagtcttgtctctctctaatcatcctcacttatatcttagatcgttgtcctcaaccctctccaatcgtccctttcatcaatagatgtaaataattaaattaataacatttagagattattaaaagtcttattgtaatcgaatttgggaattattgacactagatttctatattttgttgtttatttagttttgttaatttaaatctagactcttttttgtagtttattttttcagttcaaaattataaatgggtaggtgagatcttgattttttttaagagcgtttttttcaaggaaaaaaagaataacatgtacatttaaataagttcgattctttatcgaatcataaaacctcactagtcggcggttttatagggttgcctatcaatagtaaccctttaaaactgaatggaaaaatgccagcaaccatttaaaatgctttggaatgttcattggcgactgtttgtaactgatgcttaaattatttcattttgcgtcggtggtatagattttggtcttacgaaccaatgataataatttacccaactttttaaaacagtcctaaactctttttcatagtagtgcaataaaaaataaatgaaaaatgtttataatttaatgcaataattaaatttaataataatatattaaaaaatataaaaataaatttaaatagacaaccctataaaccgactaggtgacaaatttagatgaacttttactatgtgacaaattaaattaatttttgccataccattaaagcaatttttttacaaaataagctatatttcaacaataaataaccaattttgaattttcacggagatactcttacaaaacaaaattcaatatatagcaatcaaatatttaatgaaatctagattatatagctggaggtatagctggctatgtctcctctatgttaattaagtgataatttaatttctgttctaggatcgatcttctcaacgtgttataagtatataacagtagctgtctcacaaattagtccattgatgagaagcctatagtatgtagtatatatagggcgcacaaaagaataaaatatgtagttaatagctaactagggctatgtagtattatagtatggtttatatatagggtacaaaaagaataagtgtatacatacatataggccgggtccaaaaggaatcgctggaccttctctaggtttaattaggttcttcagaagcaataaaactcatattattagctactctcttaaatttatgactaatattatcgccaaacctatagctatacatatacatatatatatatatatatatatatatgatcagtgcgtgtgtgtgtttaatattatttgatagatacctacgtatgtgtggtcatgaatttcaaattgtacatataggcgtatggatgttgctgtacactttttttttgtttaattaacttgaagcacgcaattttgatattaattttaatcaacaacataattttcttcaaaatcaagtgtgtataggctatgtattatttttgataaacaagtagagatcactatgtattgtttctcataaatttggagcttcagtaattaatataaggggcacatcggccgagtttgttagtataagctcgggtgtgacctgtgtgagaaggtacatataaaaatgcaccccgttcatgagcaatattcaccatagtcattacagctagttactatataatgcaaattttattaaggctaaacttaacgctataatcttatattggttgagacttgagatttaaaataacctctttctctctagatctctaaagattactaaatttctttaagaaactcaccaagtattgcttgatttgtatagtttcaaagtttatacatcccacttccaacaaatttaggaaacactaattggaataggcatttcaggcaataataaaaaatcaattgtgttaaacctttttaactactttaaattagttacatttttctatatcgtaattctgtactttgatattttacttatgttagcttctatacgttaaattatagatccagctcaaattacacaaatccaatattacttccaaataatatatcaaaccaagaaaattataatatggttaaccttttcaagatcaataggagattcaaagacagtaagtgtggttggcgcgctatgatttaataattttcctcgtagtggtataatggcaatgagagacagaagtcatttacaatacaaagacattttgattataaatataattagttgaacattttgatatatacttaaatgttgaattattaataatttatattgaataatttatatacaaatatatataaaataaaataaaaaatccgttattcatatatgatgctgtcatgacttgcactgtatagagaattaagatcattggccatgaataaaaatattcagccacacattaaagttatgaaatctttcatcaacggttgctatagtacgattcattgattctcgttatttgaaacaacaaatcttgattcagattgctaatctaggaagatatatctaagtgaaagtattgtatatagtagagattatattgacatggactgatatgtaaataaattgtctttatcaaacatgtcatttactataaagatctaattcatatcacaatgatgatcaattagtagatcggcatggattctgagtaatcatgaactcatgtttatgttgtgagtttctttgattcactcgttaatatttcttagaaaagatgatccttacaacttctattttaggaagctaataatgtgaatgactgggaacttaatgtataatcattatgcaatcctgacttttctaatgaaacaaattttggttccttttaagtgttaattctagaattaaaaatttttgcaaaaaattaaattggatttaaattatactttcaattagtggtactaaaggataaagaagtaattagaaaggtaaaatggtaatttaacaaaaactaattacgatctgacacaaggagggctaatcactaaaattaattatatcaatggacact

SEQ ID NO: 23544 - DNA, 1722 bp, Cannabis sativa
agtagcaacgaagcagcacaatttatgataatatacaatattttgctgaaatatatacttgttattgccaatggactttttatttcagtgcagaacactaacaaataataagaatactaataatggtaattttagataaataaaacaaaattcatattttttaccaatccaaacccaagtttcttgaattgaaaagcttctcgatgtacagaataacatggtcagacgctataatgtagctttgcattttaatctttgcagaggcatctgaaaaacaaaaaaaaacaatcaaaagatattgtgttaataattttgtcaaagtggacgaaacaatagtcgatagtaaaacacccttataaaattatcatcttacacgagtttttcgagaattgttatttttataacacattcctccaagtaccaaaaagaatgagcttcactagatttatgttctatcagtattataagtccaactcaacctaactacgatccaatatacgatccgaaaagaaaaacttataactgcccaaactcacaatcatataaaccaatggtccatccccagttccctacttaacccaatcatataatttcttttaaatcaaccagattcattccagattatgctacctatgtcaaattctaagttacaaaatcatagaatgctaagtacctgaacatatgtatgtaatgatacaagtataaattgtttcaagagaatcaagacttactatcttcgttaagtttcttcatcagttgctctctagtaggtaggcaatacatccctgcagcaacagcttgtcttatagcccaaccgtggtggggagcaaatacttttgcatacgccttggaagcaggatccttaagagaattgcttctgccacatgaagatcagtagctattactttatgcataataagcatcaaaaagcaacaaataactgtgttttcaagctcatagctggagccccactgcacgccaactattttatgtgtgtgcagataactttatagggtacagcatttggcaaatagttgtgaaaggaataaactaaggcatagacatgtaatcttagtccataagtagagaattcgtgagctaatttagttttatgagattttcattcataaagcatctcattcagttccaatgatagcatatactttagctgtttagcaaatgtagaaacaatagaaatgatgaaaagtatatcagaaatctttgaatttgttcataataagtttgtcactgaaattaaaatcacaatttcacttgctactttcagaacacaaaaaaccttagtttctgcaactacacttgaaagaaaagttgagcaatgtaacatatcaagtttatgaagagctgtgtaacatatcaacacaatacacaaatccaagttcattgcttgattcttatgcctccaaaattattttctaaggtgctaagattctgtaaaagtgtctgaatcagacattgttccaaacatcaatagtgcgagttatcttcttaataatttcagctaaacaatttaatgtgtactttctctgaattccatcaaattctagtcgtttctaaataactgaaagttttcatctcaataaactaaaaccaccttgaaaatccttattcaagattgcagagaactacttaaaggaagttgcccattcctcaaaagactttgaagtattcattgaattttatttttatcaaatcatcataata

SEQ ID NO: 23545 - DNA, 2055 bp, Cannabis sativa
cacctttcctacagtcacaaaaactggttgacacatttccaaacgattacatatgcaactctcccactgctcatcctcttgctgaatttctcaactatgaaagatttgataaatcttttcaaaatgttgtgtttcaagcgtatatagagttggaacctaaaaattacaaacaagcctctcaattcacacaatggctcaatgccatgaataaagaattttttgctcttaaaaagaataaaacctagattgttgtgtcccttccttcagggtttcatcccactggaaaaaaatgggtttacaaaataaaatacaactccaagggttaaattgagagattcaaggcacgcttagtggccaaaggatacactcaacaacatggcatcgacgatgcagaaacatttgcccctgctgcaaaattcaacaccctaaaactcttccttgccttagctgccatccataattggtctctccaccaaatggatattgataatgcctttctacatggggacttagatgaagaggtatacatgtttcttcctaaaggatatgtgcatgagggggagcttcttcccaatccggtttgcaaactacataaaagtctatatggcctctagacaatggtttgccaaactaagcaccactttaactcaacatggcttctttcaatctgcctatgatcactctctcttcattcgatcatcccccaacaagtttcttgctcttctagtctacgtcgatcacattctaattgccagtaacaatactaaagatgttgctgcattcaaaacttttctaaactcaaaatttcaactaaaagaccttggttccccacgattctttcttggccttgaacttgctcggtccaaatttgggatttccatgtctcaaaggccatttacaattcaaattctaatcgaaactggtctcctaggatcaaaagtcgtttccacacctatggaagctaatctcttccttagcaaagatgttagtccacctaaatttgatcccgcatcctatggaagcctaattggcaagcttattttcttaacaataacaagacctgacatctcgtatgctttcaatcggcttagccaattcattagtgatcctaggcaaccacacattaaggttgcccatcgtatccttcaatatctcaaaggtactcctggccaaggactttttcttcactctaatcacaactctcaattacatgcgtagcaattactccatttaaaggcatactccgatgctgattggggcacttgccctgacacaataaggtcccttactggcttctacatcttcctaggccaaaaccttatatcttggaaatcaaagaaacaaacaactgtatcaaaatcctttgctgaggcagagtacagatctttagccaatacaacctgcgagatactttggcttattcacatcttgtctgactttggaatcaaacacatacaaccaaccactctttaccgcgacaaccaagctgccattcacatctccgagaatgtcgtcttccatgagcgtactaaacttatcgacatcgattgacacatcgttcgtgagcaaatcacaaaacaacacatcaaactttctcatattccttcacgacacaacatagcagacatcatgacgaaagctctctttccaactcagttcaactacttattgtccaagatgagtgttgccaatctctacacctcatcttgagggagagtattagagggtattagttgtctgttacacagtcggttatgttagttactaggttgttagtcttggttgttaggtctaatattttctctgttcttggttgtaactaactcagtttgagttagatgtatatatatacctattattctctcataacatatcaataataaagcttttcatattgttcactttgcaataaggtgttgattattttttgagatcaaagacctaataatgattgtttattagagtttctcttcctaaattattttttggggtagaatttttttcaaaaatactgtgtaagttttataatgtgtaatgtgttaagtttttactatt

SEQ ID NO: 23546 - DNA, 3527 bp, Cannabis sativa
ctcaactcaactcatgaatattagacaacctcaaggttattatgagtacttttgtttttacataatcacacataatgtagttttcatttttttttttattatttgatgcattgatcgagaaatgggaaatgttttggtgaaaatgaaaatattgtggtatatggtactaaattaatgttggtgggtgggggaatgttttttcatgcatatggtttgttattctttttgttgaaaagaaaagaaaagaagatagagcatcattgagtttattgagttgagttgagtgtgcaaatgcatatattctatatatatatcttgaactaataaacgcatatatgtacgcatatataattaactacacaaatatcaacctactatatgtaagaactttggtcctgattcactaattcatatttatatcatgtatactttgcgatgatggatagatagtgttagataaagttgttatgtaaataaagtttgttaattttctaatctcttttgtgatttctccgaagaggtattcttgggagttttctgtagttgaccatattaattacaagttgttctgaacacattttcttgagtgtccactaaattagtgtactcagtaaattttggttcatattctttccttgactttttcgaagcttcactatggttctggttcctcccgcccctcttactttgggaatggctcacattttgttctagaacttctgtttgttgcttcgattgaccaagaacattattgagtttggtttgtgccgctccatactcataaaaatgggtttagataagtgcctgcacaaatgcagaagatccatagacaaccaaagaatattgagttttgggaatagggacttgtggggtgaagcctaagccagacacgaaagcgaaaggagatggacccagagggactccaaatgcttgtaggtaagtgtcttctagatcggcgatgccttgagctctggacataaactcggacaaattctaagccctttttctttgcatctctccccataacaaggaaccgattgtgagttcggattgtaggactatgagtttcatgttgtcgctcaacattgtcttggctactacctccattatccgttggatgaagttcttcaggctttcccctgcttgctactttacattactgattgacccaacttccatgtcataatcccggacagttatgaactgtttctgaaaagtaaattgcaactctttccaactgtaaattgatcagggagctaacctcttccaccaatcctcaacggatttggtaagagttaaggaaaagtacaaacacttggcattatcacttactcttgccacctgcatcatcttgttatattttgacaggtgggttttagagtctgtacgatcatcgtacaattcgatctgtggcatcttaaaattcttcaggagtggggcttctgcaatcctcttgacacagagttacgggtcttcatcttctaaatctgtgagggccccactctacttctgaaaaaatttggtcaaagcaacaattttctcttctaacctctttgggtcactatctagaaggttgcgtccgcgagccttatcattcaaatagttcctaaggtcatttctttgtagccttgccttttctcctttagctttttcgtacttagcgttaaaatgccttcggaggtccacggtggaccaactatcatcatagtattgttccccggtcccactaacatggttaacaaaatcgttggcgtagttattcctccccctaggcctgagtactttcacacaaagccctttttgcacaacttggccctgtggagcagaagagcatccaagcctggaggcatcagtggccttctgtgtccacaagggctagttggctggattcatattttttctatgaggtaaggagctattgagttttgaggatcacctacctttcccttccccttgtcctttgtaagagctggggtttcagcattggtaaggttttctctgttaacaacttccactgaggcatcttcttcaaaatcctcctataaatctccgaacttttcttgaaggcgagtcatcatcctctccatctttttagaaaaattctcctagcaggctagcttttcctggatcacatgtagctcattagacactcgaactagatctagatcttgttcatagtaatacccatcattataattctcgtctatgtattcatcgtcgtcatcgatctccctccttgtctttagcgtcaaggtcttccccgtcgacttgcttacgacgctagtctagatcatcccctctattgtcggcttcagatgtatcccctcttcgtgcattgctcagttgggcgtgcttcggagagagagggtttacatcatccatgacaacgtttaggttcacttgaggagttttctttgaacgtcttctttgagcaggaatctcttgttgagaaggtgagaccacaaactcaagtgtcttaataattaaaacaatacaacttatgctttaaatataataatttactatatttttttttgaagtagtgattagaatcactcatgaactaagtagtgcccgtccattctgcctcgctcggcttgccgacctgctctgaagaattcatgagccagtaggtcgggcgaacgaggaccgtcgaagaagtgcctcgacacgttgtaatcattacttccctttatagcggcttctgtcattttcacataaatgttgtaataaatcttatctcccctatctctacttctgctaacgaacgctagaattgggatatcgagaaagagggtagaccgtagagggttcaacaaagaaaagcaagaaaacgtaagtcgaaccgggcggatctgaatatcggtgttttttatggattgtcatttcaagtattgttcccataagccttcttatgttaggatacaggtcaaataataagtattttttttttaggtggtctacaagttgctactcaatcgattagttatgaaataccattatctttgaagatccattagacatcgatgtcttattggaaccgttttttgaaacggaaagtgacttcacatctacgaattcttcacgaactgttcgttctccgggggacggtccctctgtggccctagaccaggataggtagcggcagcaagaggccacaatgatctgaacactttgtcgcatctcttcaatacggatacagtatcgatcatagcaatctcctttggtacttactggtacgtcaaaacccaattggtcataaacatcgtacgatgctgctcttcgcaaatcccagcatacccctgaaccttttaacaatgccaacaagcgtctattattgaattcatccggcccaatagtacccattttgagaacgtccagcgccaaagtcattaaatgggtaagtcgccaatccctaaaacagatatgtaatgtacttcatctgctgggttgggcattttaccagaggtttctattgtatcggccaatttcccctcttttgcaatcagtttcgctacagcacctgc

SEQ ID NO: 23547 - DNA, 2408 bp, Cannabis sativa
aagactgaaggtgattggtcagctcagctgtgctacagtactcttcactgatatttcattcattccttttagagaaatgttaaaggataccagtggtgtttagtactctcttatgtgttaatattgctattggtccaattaagtatcggatcccatataattcaatataataacttttagggagtatcgctagccaatcacaacgcgacatgtcgaaaaggtgctagacactacaggtgcctaataacaatgctcttccttttatttgcattaatcatttataccaaatttattgttattttatcttgtgtatgcgtattattaggtccattacaaaatatatgagatatatatctcttcttccctgtatcacgtatatctactggactatatatatatggagaaaatattgagggaccagttacttttttttggtccctctaagacatgacttgtctttctctttaatatacgcattacagtctcccaactatatatatgctcagctcatttggtgggattattatttgggttcaaaataattaaaattctccaattcttttcgttgacataaaaagaataaaaataaataaattctcaaattttttgtgtaattttttaatgttttggacatgtctttcttgtttttgtttaagcaacttatagagattaattagattggtttagcatgtttttaagttcgatgcatgataaatatttgaaaaaaaaaaaaaaagataattaataattatgttttgtattgtgatattattagcttagtattgctacactgctatgctgaggaaaagttagaagatccgaattggaatcctttcctcccaaatatcagaaaatataaatatgcttaatttggagttggaccatccacatagaatctaataatattaacctcttcttttctcaatgacagaaatattggacacgaatgggaattatggcagccggggaccaataaaattaaatacccttttgaattcatagcctcacgacttgaactgtcttaatcgctatatacaatatgattagagatcatccccatttctaataacctgcagttagtataatcatattgtatagtatctaaatatatttctaacaagtcgaactaattagtaaacacctgaaaacaacattaaccacttgtcacatggacacctggcaagagtggagagaaagagaaagagggatttaaactgaataaactaatgtttactacaaatgctaattctaaagtaccttgttgttagtgtgtgaaataagactaggatagtcgaattgatcaagatgtttgtggatggaattattattcgaattataagatctgagtatgtgtatatgtgtttgtgcatgcatgtgcatgtatttgtcattgttaaggtgatacaaattaaacgtcatatttagtcttaaaactaagtacaatgcaattaagaaaaaagattatgctcatgaatttattctctttacttttgataggcagtcgttgatttgtcttgttgccattcttttttttttttttagaataacttaaattttgaattaccaattaatcacctgtgagtagttggaggtctatattatgttggtaaactacttaggattagggtacgtacgtacgtgataaatttaaaccacattttatataaatatatatgagtaattattcaatgattataattttaatgtaactatgatcagtaaatttttttaacgtataataataggttattaataaataatttttttttagaaattaattaattataattaattgtataataaaaaattaattttcaacttaaatatttaatgaattttttttagcaattaatatttagaataaatagaatttatgcatcctaaactattaccatgttcagtttttaccctctaaaattttacacgttgttataaatccccctaatgttttcataataataaaaacaaaggaaatcttcaaagtgatgtgccatttatgaatagatttgccttctatccatcaactaaaagaaatttattgtatatttgggtttaattttataattattttttttttttattttatctcgacaaaggaaatctattagtgtaaatgtaaataaagggagaaagtattaagactgagaaacagtaagaaattttgggaggtggggggtaattctagctttttgtttggtttttttttttttcactattattacaaaatcactattcttgttagttctcaaaatgtttttttttttttttttttttgagcaccattacttatacttataaaattaagtgagtgtttaaaactgtcggctatagtgaactattcccgacaattttagacattcgtatacttttctgacggcttaaaaaagttacaaaccaaaaaagaaacg

SEQ ID NO: 23548 - DNA, 3947 bp, Cannabis sativa
tttttttaattagattactattaagtactttttttaattaatggcatcatgcatgtacttactttaatttttttttctttaaaaaaagtgacaattaaaatttaaatctatattttaactttgaaagaaatataacaccataaaattggatttataaaattaataacaccataaaatagtagcaattaaaggtatattattgttttatgttttaaccgtgtacatacaaaattacgtactatgttgcatgtacaataaattttaaatataccaataatttggttgtcccacgcacttaaattgaaacttgaaagtgtgtacactatttgtttatatatggaaatgagaatacgaacatatgaaagaaaaaaggacaaaacattagtaatatgcttctaaagtagtcaaaaagtacgtatgatacctaatttgtttattattattattattattattttttggaagaacgccatgttcgttagaaggaaaacgagataggaatcacaaggaaaattctctctccttgataggaaatggcaaacttgctatcttacattttttgctaagtcatctactacaacactaaatttacgattaataaagaaaaatgaacaatgccgaaacttcttaattaaatctaaagtcatcaaggaaacattcaaaagagactaattcagagcacaacttctcttctgaagagtttgcactatcacttgagagtcaaacaagatagagatccatttacttgttctgtaaagcccacttcagagcaaataaaacaacctttaatatctgcttccaaggatgaggcaacagaagaattagttaaacaataggtccacgagtcctcaggagaaattatcataacagaagcagctcccatgatcccctcgctccaggaggtatcaatgaacaatgccatttttgaccctaatctgctcacatctatgccagaagcatttttcaaaattctatctgcactagaaccaggcagatttatcatctcctcaaaagagttatgcacttttctcaacatcactgccatctcgatgttctccctagagatgtatgctctacatcctcacagaccaaatgtcagagaagatacaacccattgagataatggctttcattctacaatttttggggacagaggaaatcaggatttctgtaaattaagttagagaagttcctagtatggattcactcgaaatcggcgaagccctagcaaactacaaagcccttgccacactgtattctttgaacaaatgcatacaagtctcctcacttgaactacacaaacaacagtatttttccagagcaaaaggcaatctacacttggttggtatagctttgtttagaattatccataataaaacaaagattcttggatgaacatccacatgccagatccatttccacaagtctctttgagcttcaaacctgaaagcttgatccaagcaataggcattcttagtaaggaaatacagagaagataatttttgtaatgttcagctcaatgagcatcaatttattaatttctttttatagtacaatacaggatcattctagaattatacacctcagcaatcagaataacagaaaagggaatattctttaaaaggtaataacaaaaacgtgattaaattagagtatgcaatgattgctcaatgatgagctgtcagtcgaatgaaggacgaggcaggaccacaacggttgaaccagaaaagcagaggaaatgtactgaaggctagccactggttctttcatttttctcaacattcttcacagacaacttctcattgctattatccttccatataatctaatcatgatgtagagagagaattctaagaatatctagaatttaataccctaattcctctccaaacacctgaataacaagcttctcatgccaatcgttgcctctagaaagatctgccattgatttgaatgtaaaaacccttcatacttaaaacttttcataagcctactgaaactcaaataatctaacaaacgtatccaaggttgtttctaaacatctatatcactaccatctgctgccaatgaaactgaaccttttaaaatgatacctctaacatccaatgaattcttccacatatacgagttattactcttagagttcactgttcagaaactctcagtagagcaatacttattgagaagacagcaaacccaaggcctggtctcatgttgagcaacagaccacaccagtttttccaaaagggcttgattcatgtcttcaagcctcctgatacctaggccaccaaaagatcttagttgacaaatttggtctcaggtcttaaagccatcaaatgatcctttcattcgttacctatccaccagtacttcctcaacatttcatctaaattacgttgttggtggacatacaataaaccgacatggaagatgtgaaagatttaatcaaggtaaggcaatccgcataagataatagcttcaacttctacccctcaagccgttttatcatgttggttttcaggatgttatagtcttccttcttccttctcttgaacacaaacgagttgcctagacttgagaaacttcaagggctaagagcaaatctttcctttttattgttatttagattttttgagaataagacactagacttagctttgctgcagacttgtctagaccatgtctcatacacctcaaggcatctaagcagtttcttggcttcccccacatttgccctagtaaataagatggtgtcatcaatgaacatcaaatgcgaaatagctagagctgctctagcaatttggacaccatggatcaagtttaacctctcatctctacataagagtttagacagctcttcttgagcttgaagaaacagaagtgaaccttattttttgattatgtgaatataaaatttatatatattgatatatcattttaggatgggaacctaaatttggaaaactttctttggaaaaattggcaaataataatatatgaattctcattgattacggttgatataaatatattatgtacacacgtcaaacaagtaattaaaagtacacatttaaattaattaatagcttagtagattatagtaagagtgtaaatggattgggtcaaatctgaactgcctatgatccaacccgatacaaatcatgtaatgatctaccccgctagatccgaaacctgaatctcatccgatccaacccaacttatttggatcacatcagatccaacctgacttatctttcttttttttttttctttttttgaagaattttaattttattcaggtcccaagtcttaggtttgggtccgggtccaaggtctcgggtcatactgtgttcaacaaaatttacaaaccgcccaacctaaataaaccgcccaaatcaaacagaataaatcgacaaaaaatacagcccaaaatatacaataaaaatccaaaccacccaataattatattgggtggtttacaaattattctaaaccacccaattaacccgaataaaccgaattaaatcgatttatatattttttaataaatgtatataagatattacataaattacatttattagttaaactgttttgtatttaaagtttagacattttagtgtttaacttaatttttagactttatagttaataatttttattgtatttagatattaaagtaaaaatttaaaatctacaccatattattacttttttattattttattcaattattttatgttaactcaattatatttatctaatattaaagttcttaagattaattaacactatattattttttagcttaaaatataaataatatattctatttttttaaaaatttaattatttgaatactagaaactaacaataacaataattataaaaagtaaagatcgattttgtcattgggcgggttgaaccttttctaatttttaattggg

SEQ ID NO: 23549 - DNA, 3428 bp, Cannabis sativa
  modified_base (1234)..(1234): a, c, t, g, unknown or other
  modified_base (3384)..(3392): a, c, t, g, unknown or other
ttctaaataaatttttgaataatttatgatgctgaaattaaaatttcaaatatatagttaatattgtatgcgtataataaaaaataagttcgagtgtaattgaatatttaagcattatttttggcactgtaaattattttaatttttttttttaaaaaaataagtagagtgtacatgtgctataattataatttctatatataaaatgcataaaatagagacgtctttaccagtaaaaataaaaataataaattaattagtagagagatacgtactctaaaatatctttccagtaagattcatttgtttggtcgttatccatgagtttttcccaagcttcagaaacagtagaattgggagatgacgatgaatggccaccaaatgacgtcgtcttacctgaatagtatttatcgctcttattctccatgagatcatagttactagtactattagtactagtactactattatttaataatggtagttccgaaactagtccaggaagttgatcaaaaatctcatcatcatcaggttgatttgatgatgatgagttattcttctcacgatcatgagcttgatcactgcggtcatagccaatgttggtccctacttctgtacattccaaagagttgggatttacaagagtagggagtacatgagtagtagtactgctttcgagatggtaacaatctttcgatgcttgagaatgagtattattgagaatgacattactattgtaattttgaggaatagtagtagaactagggtttataaattgcatgaggttttgcaacaattggactttggccatgtattgatgatctggctgtaagaatttgagggaatttattggattattattattattattattattattgaagatgaggttggtgattaagtttgattgggcaagcatttgatgagaaagattgagaaagtgatttaggtcagttcttggtttatgagtttgtggatcaatacccatttgaagaagcttcttccttagataagtgttccaaaaattcttgatttcattatcagttcttcctggaagatgtgatgcaatccttgaccatctacaccaaaataattttgtttcaataaattattagatgatacttttttttttctaaaaaaaataatgaaaataatacagaaactataccataaaaagtacatatcgaatctttataaaaatgatctatataccatttttttaattttttttttnaaatttacgatttgagttgttccgataatttttatgtgagttgctatgtggaatttggttgcaatttaaattgttatgtgtatttccgtcgtaataataataaaaaaaactgcattaaagtgtaaaattgaaaatcccccactataattaaaagattttattttctcttgaattgataattaagagcattatattttcagaaaaaataattaaacatttttttaatacaaataaaaataaaacttgaatgtaatataattttgtgaaatttagatcaattgcaaatatataaagaaaatattttaaaaaatgtatgtaataacaaatttatggaaaatattttctttcatactatttttatttttgttggtacaatccatgttctaggctaaaaaagaatttaagtgaataatactaataattaattcttatatatatatatatatatataaattaaaagaaaagaatatattaataagaaaatgacttacttgtttccaagagcagaatgaagattgatgatgattctctcttcatcttcagaaaatttacctcttttaatatcaggtctaaggtaattattccaccttaatctacaactcttaccacatctaatcaacccagcaagttttggtaaagatttccagcttccatggtgaccattcctttcaatataatcaattaatttcttgtcttcctcaggagtccatggcccttttttcaacccaatattaatcccatcacaacatggtgatctccccataattatatatacaattatatatatatatatgtatatagttttcagagagattattttctcttaattttcccaaaaaaaattgagacacaaatgatggttttataggtggtaataagagggttatgaccattaatttattcaaatattatacaatatatatatatttttttttataaatttactttgtattaaaatattgtgttactgagatttatatttgatgttggggaagtcaccacggcattggattaattgtgattaattttcaataaagaaaataattaattttataaattatggtttattgtatgtatataattaataattacaaatgaatggtaccaaaaatcatatcttggattaggtagcgtaggtgtcattaatatttggtgagtgagatatgtggtaaatatggttgaattaattaatttcaatatttatatttataaatatgaatgaaaatttatgaatgatcaatctcttaaagccacacattattgagtcttaattatatattttataaggataaataaaattaaccacttgaagttgcgtgggatttaaggttatgttatgagagggattatttaaatataggaaaaaataaggaaattaatgatgaatataaagagacaaaaagaaagaacaagatcatgatattataaaacattgtactatatatatatagaaaaacataataaaacattgtactaataataattggataaagcttatgattttttttatgtatatatatttatatgttattttaatttcatgcatgtaatatgaggcatgatggtgtggcaaaatagagcatttttcaaagtgattaactttaagataaaatcaatgataactaatattttgcatttggagcatattttataagactagtagtactatttattattatgtcctatagttgaatttgtttactctctttaaatgtccaaataatttgtttacgattactatttattattagctaggttatttttatgcattttcatagtccattttagtattttagcagtttttatttattttcgtacaagtttacgcttgttttctttttatttcaagttttcatggtcaaatacatcatatgggttgaaatgagagaaaataagatgagcttgatggatttagcatgaatttcggagttgtaataagatacaatggtgaaaaattctaagttttagatgctcaacacactctgtttgtaatcgtaaataaagtttgaagctttaagctaatttttgactatgatccattcactttcaggaaaatgttttgaatgaaagttttagatcgttcttttacattttcaaaacatcttgaatcgtctaataattttgagttatatctgttggaaatattttannnnnnnnnagatttactaccatatatgtttcattaacatcctaa

SEQ ID NO: 23550 - DNA, 3482 bp, Cannabis sativa
aacagcaatgcagaccatgtaagctggtgggagctgacagcacttgcttcacatgtgcacccatcagtttctaaaatggcgacaacccttcttttctcagggactaacattgtgtacaatggaaatccacttaatgatctctcactcactgcttttctggacaagttcatggaaaagaaacccaagtcaagtacatggcatggtggttcacagattgaacctgccaagaaggttagctgtacaaagaagattttgcttatttcttactttattacatttccttgttgccgagctcgtaaatatgttattcttaaataatgtcttcgttttccagcttgaaatgaacgaccatttgattgggtcagatattctatcgttggctgaagatgatgttccaccagaagatcttgtcttccacaagttttacatgaacaaaatgagttcttcaaagaggccaaaaaagaagaagaagaaaagaggagcagatgacgatgatgcagaagcgttgtttgatgttgatggtggcggaggcaatgacgaaagtgataatgaagagattgacaacatgttggactctactgatctttctggagatttgaacgtgggggattatgactatgatgatcttgaccaaattgctgaagaagatgatgaagacttggttggtaatgtcagcgatgaggatccagacatgctctcagacgttgctgagggagaggattttgatattgacgatgttgctatggagaatggaagtgatgatgatgaagatgacgatgatattattgaaattggtgatgtagatgatagtgagaatgatgatgatggttttgatcaaagaatcaaaactaagggaaaacgaaagcctggcaaatctggagcatcaccttttgctagttatgaagagtacgagcatctactgaatgaggatggtacgtctctcgaggacaagggacctttaaaaaagaaggcaaagaagtcttccaagtcgcgaaagaagagaaaatcatcatcagagtaaactcggatgactcattttgcttggaaatcttatgatttcccctcaattttgtactgtagcattaaagattgtttatttaagcatttgatatgtacactaatgaatgatataagcctgaaggtataccaatttctatttattcatcgtaaatcctaagccatgggtccagatagaaagatacagcagctactgaattttaaggtttattagtcaaaagtgtacaatttggccagtaatggaataacacactatcaaattccaacacaaagtctgttttgttatggggtttggatgttccaatttaacagttttaaattgtgttgataacattggcaacattaaaatgaaggcgcaaataggaaaggggtgcacatttttagtctgctcaatttgttgaattactttacaagcttaataaaagactctgtttcaaaaaaaaaaaaaaaaaaaacaaaggcttaataaatgacttatattacatctgtgttaatattgagacatcatggtacatttaatttaggtatatattgcaaggtaggtatatagattgcaaggtatttttacatcatgataataatgaaactcgcctacgatattctgctagagcccacaatgggtaaatgtttctgtatgctgcataatgtagcatacaatttttcatgaagactccagttatttcttgttgtggaaaatcaccagtttccatttgagaattgattattaattttgctgccttgtgaagaggagttggatctcgttcttgttgtccagcatgaattagacccatcatggcccatgcagtatgcaccaaatttgatcgatttccttcgagagctacatatgcctacataattatcaccataaatgaacataattactttattatttattatatgtctaagtaaccaagacagaaaaaagaccattacaaatttaactacatggattatttagacctttcaaaagaattagtttttaccttatttgggcatgaaagataactctcaccccaaccgccatcctctctctgtgttctaagtagaaattccacacctttacgtatagttgcattattattgtaactctttccagcagctgataatcctcctagagcaaaccatgtcccatatgtgaagcaaactccccaattcccatacctataaaatcaaatcattagctaagatgtatcttatgctgcccaatatcatatataactgtaaattaacaatattatatatatatatatatatatatatatatgtgtacgtaaaattaccatgaaccgtcaggcatctgtatgtcttcaaggaattgagtagcttttattataaatttttcaatatcctttttcctatgtcctggatacagtttcttgaataaaaccagagcttggattgctgatgaagtgcattctacatattcgtgctcgatcacaatgtccgcaaaaaattcggtgggattaagtatctgaatttaaaattgttattagattttattttaaaagaaattacattgatttattaaagtcatccttaattacctccaaccaatcttgtgctcctgctggctcccaagctgctaaaccaccattcttactctgccaataataaatcaaaattatatgattgaattaatcttatgaattactaatatacactcaattgttaaatgtaaatgaaatcaagattttgattgaataagacatgaataaaatgatccaaactttcatgattactactttatgttcttttttccttgttggtttgaaacataccctcacaagtctaatatatttcattagaagtacaaaaagaaataaaaaaagaagaagaagaaaatatatagctgctcttacctgtaaagagagtagtacattaacagcgtcataaaatctttcatgttctattctttggcctacaatttctggtggcatcattgagaataataggcagcactgtatacatttggaaaaaaataagcctaattagataaatactatatgtataattgaaataaataaatatacatatataaagtagaaaaaaattatagtgcatccaaaacataagtataccgatgagaattaagatttcttgtttaaagtggtgtttttgagttaaactaatctaaatttcaaacgttaattaattttttatttattaaaaaaattaaatctttaattgagtcaacaaaacaaaagtatttagcatatttaatatatattaattgatttatcagaattaaattggtttaactcagtataggacaacaatttttaacagggaatgttgattctactgatgaacccatataaattaagaataaatcgaaaaataaagttaaaaaaatctgttgtatgaatacttcttttatattatatacatttgaaatagtccgttcatattttatatgaatttttcaaaattagattttgtaagatgtccttaataaatactataca

SEQ ID NO: 23551 - DNA, 2117 bp, Cannabis sativa
aacaactatattaatattataattcatcagatacaattatcatagagattttctcttcctttgagaatggcggaagttaataatgaaggcgcgaagatgagaagaggatgtttgtgtggaaaagacgattttctccctgaggagtcgtttaagagctggggcaattacgtaaaagcactgaaagagactccgaatcggttaaaggatcgggtggtgacccgatccatagacgaaacagaggtggtggagatgaaaagtcggagcgagaacgagatgaagaagacactgaattggtgggacctgatgtggttagggatgggaggagtgatcggcgccggaatattcgttttgacaggagttgaagccaaggaatcagctggccccgccatcgtcttatcctacgtcgtttcgggtctctccgccttgctttctgttttttgttacactgagtttgccgttgaaataccagtcgcaggtacgtgtacgaatttatgtttatctcatctcaatctattttttttattattattattattactttattaaaattattaaagatggggcaagtaatattttttttaattcttcttaggaatatatattttgggatactgaaatttacacacaaaaccttcaaatataactctaaatattatcttgtgagtttacagtgtctcactgggacactataaagcaaaaatttattctatcataaacaccaattataaaatccagtaacatttatgaaagaatctgaaccgtatactactgaaaaaaaaaaggtaataatacttacaaaaataatttcttcaaccaatatatatcatttttatctatcttctttgtattcaaaaaattaatgctattgcaaacattaatcttaatatttcgaataacacgaggaattaggggaagcttaagatttcagaaaacataatttagtgtaagttttagtattgtaaatggaatataaaaaaaaaaattaatccttaaattatactttttctgtgttaatttaacactaaatttaaggtgaatttatgtctaatgacaattaaataataatatttgaactgtgttaaaaaaaatgagttgtataaatcaatggaaaactttatagttgcacctttaaaatgatgatgctctctctatttattttagtattatttgaataatattactttttatattgtatattattttaaattttttcaaaaattttataaaatatcttaaataactataccatatgtactatcataaaataattaaactaaataactataaacacatctctcacaaattaaatttagttttagaagtaaatactttgtttaattacacaaattttaaattaaaaatacatgacggaaaaatttaataatacaagtttaattagtattttgtttataaaaaaacactaaataagtcacatttatgtgatatttcagagtttattacaaactaatttatatttatatttgtttttatttaattttgttttttgtttgtttttttttttttttttactttagcatgcctatttttgaaataattatattacttcgttttttttcttttcaaaaataaaacaatattaagagctccttaattaaactcttgttttctcaaagacgaccctacatttgactataaatagataacatttgaattcaaaattggtgtgaagtgggactttgtgtctatgtaagtgtgactggctcaggtctcattcaaggacgatgacttcataatatcatgtttcctttagttacggttagcatgatatattcttatattttctttataaatatttgacatatagatgtttttatttaaatactaaaaatatttatttcgtagtagacttccaaaacatctatctaatcatatctctttatcatttttaaagactttctctatgctattttaacttgtagaaattaaaaagtaaaaatattatgatggtacattttgtaatacttttttgaatgagtttttttattttttttttaattcgaaagtaaaaatattttaaaagaacatgttttttaactttttaattttaaaattaagaaagaagaaaaattttcaaaattttgaaaacaagaaaaaaa

SEQ ID NO: 23552 - DNA, 3009 bp, Cannabis sativa
atggtctaattatagtaatggataggtttcttttttctattagcaattttattgagcaaagtgattggttatgttatttggtaacttactagtttggaagtttaatctctaggtttatttttgcaactccttttaatttagtttatgaggaagttctttgtcaaagagagttttaataataagggtaaatagatactcaatattttatgtttgtaaacggcataaatttaatgtttatttttaacggcataagtactcaatgtttgtaaaactgtaatttttttctaattttttcagtacagtttccgttttgaatttattaaaaaaactatcgaagtaactgatactgcatgttgctttatatgtgtcatgtttaaggtaataacaaaatttgtactaataaaattagagaataattacagttttacaaatattggatacttatgctgctaaaagtaaacattgggtttataccacttacaaatttaaaactttaagtacttataccactatttgccctaataataattacaaggtattatgttattgttagtgcaattgaatattgagtcttatttattttattcaaataataattattttgcatttacttataatacttaggtctcgatacgatacgaacacaacccataaacacgaattatcaccctactccaaatgtgtagaaattaatagaaaaagaaggaaaagagactaatgacataaaagattgtgtcaattttaatgaaagctgtaaaaaaggaagtgagttattgatgtggtcctactcctactcatactaaagtgcatgctatacttaattaattaactattaagacctatgactgtaaattgatgataattgtcctctatactctctacttctcttgtttaattaatattttgaattgacatcttcatccacatgaaccatcatgtataaatgcacaatgcaaacatctcattctactactaatttgattaaataataagttttatatattttaatttaataattataataaaatatcgttaattatttaaaaaacactacacatagtaataataatgctctaagtaaatactaaacaatattctaaagcgctcaacaccctatatccactgcctttgagacagtaatgatagtcgaggattgtattccagccctctcagtttgttattttttttttcaaaatattatgtaattatccaaaattatatttagcactctccacaatttcaattttttaatatattaatttgagagaaataatttttatatatattatgataagattcaatacatttatatttaaatgaatgtaatttaaattatgttgaacatactatttaattataccaaaccaacaacaatattaatatgtcacttacccctaaagcctaataccaatgatgtagaacttaccaccaatgaaatttataatatatttttttcttttctttttattaaatatatatattaatattattaataataacaacgtaaatcaacaaaaattacaatattgttttttttggagaaaaatggcctcaaacaacacctaaagagcaaaactgtctaaagagacagaactaaaactatctaaggagacagaactaaaaatatacatatttttttaataatttttaaaaatattatttattgttataaaaaaaaataattttttttaagatccaaattaactcaggacgagccctaagcccacaaatactacatcaaaagcaaggtgaaattcacctaattttagtattaaatcacttttattcaacactactaaaagtgtactaattttaatattgagaaaaattaaaattactttgaaaaatggaatgagtatattgtcaaaagttttttaattattaaaagaaatagttatattctcatttttacattaatctcttatttaagtatgaagattgaagatacatgttaaatgaataatagtgaaaatatgtatacatattgtttttgtatttcttaaatttagtagaacttatcttgattatcatcaatgatgatgccaatccaaaaattgaccgggccaatagatatacaacaaaattatttatttttgtctaattatttttcatgtgtaatttttgaaaaataaaaaaatttagagggtaggcaaccctttcgtcctcttatctttatcattgattattataattattttttttaatattaaatttaagataattaaaattttgacatgtattaaattatgtttaagtttgacaatgtcaaaattttaagagtaaaaatcacaattaatatattcttttatatttcttatttgaggagataattttttattcattctaaatttacaaaagaaaaataagaaaaatttacgcaatgcattaaaactatatgaatatatttttacattttttttttactttttatacatttttaattatctgaatatatatctattttatttggataagaatgctttggaaaaaaaaagaatatggtgctcttttttaggggattttgttgctaattttttttatatatatatttatacatgattttttattattatttttggccgtaagaaaagtttgttgcgtactcaaattaattaattttctctaaaatgaaaaagttttcaaaaaaatattaatatatttcttttgacaccatatattaaatatttaataacattcaaattggttgctatattccttgaggaggttatttcatctacgtgtgactaaaaaaatgagattttgttgtgatttagtgacaaattatgacaacattaaaagtgattttagtggaataaaagaaaaaaaatacgattaaacaaaagttatttgatagtaattaaaagatgcatgtagtattatatatgtaagtactaatataagctagaaaaatttactcatatagcattatttatgttaacatagctatacaaatattagttcccaacaaaatctctttaaaagttgaaaaggaaaaaaagttcataataa

SEQ ID NO: 23553 - DNA, 2823 bp, Cannabis sativa
aaaacttgtattttaaagtgagacttgactagagcaacagaattcgaatatccattttggagaaaaatgtgacaaacactaaccaatggctttccagatggcagcaataaaatcttttcctttggatcacgtcgagcaacattgttccctccaacaactacacctggaaggtctcgaaaatttgccccctgataatttatacaaattgggagcaaacaaaaaggtaaaaagcttagaactgatgaagaataaatccatccatacaagtgcgtattcagcccacctttttctttggaatcttacaaactcgaatgtaatcatcttcagataaggggtaaggtcgatgatcataaagcgaacattttgtttctctggtggcatctaatgcagagccatccatctctataggaagaaaggcaagacatgaaaacagaaatcatctgaacaaatgtgcatgtgtaggctcaaaaagtttagatgctcattatcatatataacactcaaaaaatttaaaataatcaaattcagatgcttctacaaaataatgtaaatgtacaaaacaagcatgtaaatcagatctatgacatcaaaataatttgaactctcgtttgtatttgcattattcactgctgacaaaacaaacatataaactacattaacaaagaaatggttagaatttcaagaaaaccatgcttgtcatggtattgtccagaggagtgcttgccaaaatataatatataaagagtagataaaatccaaaaagatttatgtctccagaaaatacattacattctcaatcaggtctatcactagtatttaaaatcctagaaattagcaagtaaaaaaagccacgccagaaacaaagtatctccacactgaacagtaaaaaaaaaaatgctgacattacctagttttgtcgatcttatgtatctttggaattctgtttcaggaggcatatgatattcaattttttcacgagtttcatcgttcgtaacctacaacatttaaatttgttaagagttgagttatgattgtgataaagagcccagtcaaaccaaggtataagattttacaggaggaaggtcagagatggcatcttgaagaacaagagccttttgtagctcacgaggttggtcttcatcgtaagcaacagtattacgctgcacataaaggttgaagatatgttaaaaaagtgaaatgacaataccaagggaaagtaaatattccatgggaactcataatcagtacctcaaactcagacggaggccaatatctgatgatgacatcatgtgttggaagtggaaactgaggtaggttctgtaagaataaaagagaaataaataagagaagagaaacacataatcatatttcttgtcactccctgccctggagatgaaattactcatacagctaagaaggatttgatggagcttaatttctatgacatggacttacagctgacttttaatttataatatgcaaaatcttattctttaatgatctgtaactaggatttaccatacaaatcttttaacttttaccaataaatcaatacaataaaagagaaaattaacttttaaaattattacataaacagctactatatttcccaagtccagagatataattgaatggaaataattaacctcatgaggaagagcaccccacaggaagacacgcagccgaaattgtggaagaccataacagcctgcagcaattattccaagccttgcttggtaattcatgtgtaccaaacgactcaatgcatatcttccaagagaagccttgtcaaatctcaaaatgtctacaacattttccatcagcacatattttggttttaagaattttacaatgtccatgaatactattatttggcggtttctttcatcatccaaaggggaatcaacatttctaaagcgattataaccactaattccctggcaaggtgggccaccacaaataacatcaacaccagcctgaagtagttgatagtcaggattagtatgaaggaacaaaaagcaatatatattgtacaatcccagcttgtcaaatcagtcaggaaaaaaataccggaagtggcaagatcttccttttcatcccatcttttacaaattcctctaagctttcttggcagttactgaaaatatacacaagataataatgatgcgtttaagttaaacacaaatctttaatcatagcaggacatatagtgacactaccttaagtcttcagctggttcccatgtatcttcactggtactataccccttccaatgcacctaaaagaaacagctatcagtagaaagaattcgcaatgacaatatttaattaatataatttgagaatttagcatcgcgattacttagcagggaaaaaatctggaacaagcctatttacctctctcacaccaagcccaacaatggctttgctgaaagttttgtgagtcaatttatgaaagatgataagttgcataaagaattctaaattatttaaatgtcacatggtaagggtttcatatccagattgaggagagtctatcaccaatttaatacaggttactgcactgcgtgcggagaaacttagtggcatgagatgaagtaagccatcacatctttatataaataaaagatgataggatatcatcttattacagcctagatagccatagtggttgctcattttaaggcatcatataaagcatgaagcataaaacataagcaccaacacataaactaatacaaccaccaatctctaagaagcatagggatagagtattgcacatgcagtacaaaagcttgtgttatctagtttagttgcttttaaa

SEQ ID NO: 23554 - DNA, 2187 bp, Cannabis sativa
agagagaaatatatataatgagaaacacaatatattaactaataataataatgagcccaatcagagaaagagatcttatactctgaagttgtcagagaattacaatatatttattctttctccaaagatcactatagtacctagctagggtttccagtagtacttctatatatacaaacattataatttctagggttcttattgagagctaatttactttatatagcaaccaaaaaaagtgcatatatatatattatatatattaaattcatcagagcattttcattgatatatatgaatagcattataatatatatatattattattaatcatcaaaaattaatggaagaaataaaagtgacttcttcacaacaatcatctcatgatgataatcttgattatgatgcattctggaccattgattgaagctgatcatgatcatctgaataataatattccccccatattggctgcctgatcacattattattataattctgttgcatttgatcaaaacaagacatggaaaagttggaattattattattagtagtcatctcttgatcatgatcatcaaatctcccataactcatcatattattatgattatcatcataattaatatttgggatattaatattatcattagggttttgaattttatactccatatttgaccctgctcctcctgagtagtttgaagcactactaccactctgtgccatttgatcaaaccaaccatattgatgatgaccatgatgatcatatcgatgatcgttagtgttgtcgtcgtcttcttgagattcaacctttctgcaaaacttttcgttattagggttttctgttcttattcctattcctgttcccgatccatgagatgatgatgatgatgcttgtaattctttcaaggtagctaattgtgcttgtaaactaaccaccttccataagagaaaaactttattagtcattgaaattcaaatactaaattaggataagtaacacaattattatttagggtttcaaatatatatatagtattataaaatttaataaagtatatatatatatatcttttttatcagaatttgaatggacaaatgaaaaagggaattaattagttcaaaacttaagatatgttctcataattaaataaaacttcatccaaattaaaaggtttaatagtaattagggtttcaaatattaattacaaaatttaacacaatatatgtttttaatcagaggttgaatcaatcattagaagaaaattaaattaatcaaaaaaaaaaaaaaatacattctgataaaataaaacttcatcaaaattaaagattttatatagtactcaaagactgtatataaacatatatatataatacctgttgttgaagagcgaaaatatgagaaacacatccatagatgggatcttgaagcctagcttgagcttcataagagattgtaacggccgcctcacaccgatcagtcacggggaggtgagcaagaagcttagagacattactcgccccgaaaaccttatgaatagctgcaaaatgagttgctccttgttcatggcaaaaataaggtgcaaatatacaaccattaatgcattttcttctcaaaaatttacaagctccacaaggagatccaaaaccagtcatgatgattggattttttttttttttcctttaagagaatgattaagggtttttgtgtttaatttggtgattttgttctctttctctctttatctctttgtgctatgtgcgaagcattattattatctgatcaatttaatgaagagaggggaattattatataataagtattattgaataattaattacaacaggtccccttaatgggatacagattacattatttttattatttatttttttccttttataagcagacatatttcacccatctcaaaaaaaaaaaattaatttcaacacctttattatacgacaaaaaagctataaatacatcacaaaaaccaaacccattctatattgattattaatctaattaattaattacttgtatagttgataattaatttttgcatatatatattttcatacattaaaaaaaatgtacatatttttttagctatatatataaattaattgtgttcatgttcactttttattgttattattattattggactcttaaatacttgattt

SEQ ID NO: 23555 - DNA, 5131 bp, Cannabis sativa
  modified_base (1513)..(1515): a, c, t, g, unknown or other
tttaattattgatattgattcttttgtgcttcatctccatatctcatttattaaattattgttcatcttctaatctttcttctaaacttaatagtatcttttatataagttaagtcatgtttttcttatgtaagttaggttattaattattttggtatatttatcatattgtatgtcgtttactgcattctgtcaacagtggtattttgtcaatttatgattatataatatgatatgatgttaagttaagttagaggtgagattcaatttatttaagattatttaatttgtgctcataatatatatatatcttccagttgtaattaataatgtagaattgcaactgtgttttgaattaatatcggtattacaataagatttgcataactacatttctaccttaccaagctctttatctgatcacaccctttcactcatcattttattatttttacttcattctaatttctataattttctatttatactaatctttagtagtaatttgtctccctgtggatatgacatataacccgtttactaatgcgaccgcagtgtaactaattgggcgacgtcacctcttgagtccttagttgtgttgttgaagtctcagcctagttactcgtcattacattttaacgtacctctgcaaagtacaaccaaacccatttctcaaatccgattccttaaggtataatgcaatcgtaacattcattgcccgaatcttctcaaattctctatgaaattctatttttgaatacgtgtaggaaaatgtgtaaatatgattcatgaatatgttaatcttaaacttgtggttgacgttcatagtaatacgttggtagcatggaccgtggtgtgcatcagggaacacgagctccaaagcatgaacaatgctttgatgcctaactaacaggaatgctaagttatcaacatcactaatcgtttctttcaagtttctcataaaataggtccaagagttgtagttttcgctgtccagcgaaagctatcgaaaaatgtggctgcctgaatccagtgccattgcacacaatattttcctaccatgcctagtctttaagaaagactcatcaacacatacaataggtcgacaaaacctaaacccatgcctacaaggaccattgagaagtaacaatatatacttgaagcgaccatactctaccataaaatctgtgatagtacctaaatttctcaactttagcatgtgcaagtaaccaggtaattttgagtatgaagcttcaggtgtaccctgaactaggtgtagtgccttctctctggacttctaagccttttcataactcattgggatcccgaaattcttgtacatatctttccttatgtcagaggccaaatgaattgagccgtcagttacgaatttatccttaattaggtgggcaattattgaatttgatgcttgacgattatcttttctttaaacatcaagagaatatggatgtaaattttgaaatatagtcacctcaaacatgttagaaattannntcttcttcgctcttaatctctacctacaatttggatccttacgtgtaacgtaccaaacagtagtactaaacttctaacgaagtagtcgaaccctttctttattgcatacaagctaacaatcatctttaaatactctttatttctaaaaaaaaaaaactttcctagatgtaactcccgacgtggtgtgccacccataaatgtttaatgactattattctcgatgtcttctcttgtaaaaattttctctgtaaatttaccgtaacttgtcgaagtaaaaaatagattgctaaatcgaatatcattggtccttctagcatcattatgacctctaccgtcaatggtccctctagcatcactaggacctctaacatctgtggttcctctattagtagttccgtttggatgagtactactagtactaggtgtcaggcgatcttctctacgagaccttcttctctgagtcagttgccctgggtatttggaacaacagtggggtcagggttcaaagctacaacagtagggacctatgtatattaatcgtctcttacatcatcattgccttcaaaaaaaccattctgggtctgaaccatcaccaaaaccatcatgaatgggcatttgtgctacaatatcagctgtcggtatcatattgtttaattcaagtaacacatcggtcgccaacacctctagatttgtttctaaaatgaaattctcaacctcgctgtgagtatccttaataatacttgttgtgggactaggatcaatacaaatattattcttcaccaaagacacaaacaaaggagtaaattcatctggcttcttcgcaagcatagacaaaaataaccttacacgcttatcatttccaataatttcagggtgatacattatgcctttcatcatttcatgtacttgtaattcacttctaatttcaagtcatactacactttgtcaacatcgagttcttcgtacaaaagatcaaccaacacatgagtaagttacattcgtattaatctcgaatgttaaatttttggctcagttataaacccattctctatcctcaagttctgaaacacactattatacatagcgaatgcaaaaatagttgaacctgtcacagacattaaaaaaaacacaattaaaaatttagaacaaaaatctaacagaaaagtgataaaaaaaattctcagaaagctataaatctgccaagcatcagactccatcgggcctactatcgagcccatcatccctgaccataggtccacgatgaccatcagactagcatcaggcagatatcaggcccatcgactcttgcccttaggtctaagttgaccatcgaactagcattaggccgatattgggccaatcgggccatcatctttgtccttagatctaagaaccccatcagactagcatcgagcccctatcaaaccagaaaaaaaaatgcaaaaactagaaaaaatctaaaaaaaagtagacaagaaccatttcagttgaaaatagtaaaaataaataaataaaaaaaaacaactcatagatcaatcacgaaaacaacattataaactaaatataaaaaccaataacaaaaaaaaaattacttacctattgattgttgtctaagtttattcggtgctgcaagaatagaatctcacgccaaactccttaacttctaatactttgtattagtttggaaaagttaattgtatactaaaaataaatttttagtgagaatttgttagagagaatgagagtaaatgaggttttgagagaatgagtgaagtgagaaagagaggggacggctgagagggcgaagagtgtatacaagcgcattttaagtactcaacataatgcatatccattttctcaatatgtattaatattgatcaattttttttatttttttcttaatattgcgttaaaattcaaatttctcaattagaaggggacatttttttaaacccttttttatcccactctttattaataaacaatggaataaaaattatcaacgtacatattttaaagtaattaaaatttaaacatgccattacattaaaactcgtatgttttaatattttttggttttgattttttggaaaattagaaaagcaaacaagtttcttgttggtttgaggctttcaaggcttaacccgttgggcttaaaattaccgcatccttccttaaatgggccctgatcaacaaggcctatgtattcctcgcttcggctgtaacgaaggtcctcatctatctagtgttctttcttgtgttatattggtgccttaaagccttttaagaatttgcagtaattaaaattaattaaatataaaataagtatgtttgcttcttccagcttcaacctctccaaccccaatctacgtaccactctcgctgcttcgaattcgatcatccccgaatctccaaaaccccgaaccctctctctccatacccaactcgagactgctcacgaacccgactctgactcagataatcaggcccccaagttcaagggcagtcctcagctgaagcgatggtcaagggcccgtgccattcgctccggtcgaaaattggaccgctctactcatcgctcccaagctctccaattagatcggcaaattcagctcatagaaagcgccgagcttgagcctgcaaacgctgctggagctggagccgacgccgatacagacgcggcggcttcttcgtcgaaatcgatttacatgatctccgatggaactggatggacggcggaacattcagttggcgcagcgttggggcagttcgagcactgtttggtggaccgtgggtgtcctgttcagacccatttgttttccggggtacttttgtaatttcagaatttaaatatcttttagctgcaggattttttttagtatattttaaattaaatatatatatatatatattgctttaaatcaaaaaaaaaatatatataatgcttttttttttgttttttattttttttgaaagagagaaataaatttgcttaaaataatatatctacactttctgtgaataaaaaggatatacctatagttgttcaatttttttttttgaagtgaaaaaaataataatataactaatgaatattttaagataaaaattggattaaaatgatcttcgaggtgacaaaacgagaaataaccaagtttattgataaaataataatgtgctaaatacctacacatcccagaaaaaaaaatagaaaaccatctagaatatatatatattttttgaataatatatttttcttaaaattggatattaatttttttaatcctataaataaatacttatataaaaataaaatatagtacaatcttacatacaaaatttatttaatttgacaaaatgtagtgtgcaatattagtctaaaatcagattaaacattccaaaaaaaggaaaatattagtctaaaatctgattaatattttaattattataaatgacttgtcttaatttatatatttttaatgtcagattgatgatgtagagccgttaatggagattgtgaagcaagcagcgaaagagggtgctatggtgggatacactttggctgatccttccatggccgaagctgcaaagcaagcctgcaagttgtggggtctac

SEQ ID NO: 23556 - DNA, 1624 bp, Cannabis sativa
ttttccttaccaaaaaaaaaaaaaaaagcatgactagtaatgtaatgaatgatcttttgatccactatatggatggtaaattaaaattaataaaaaaataagaagaggaatttgcctagaaagccccttaaaggaacaaaatggataaagcaaatttcaagttaagagtagataaagtaattgactttttctttttattgctcaagagaaaaaggctacacagcatgtgcaaaagtaaattataattagtatatattgcttattaaaaaaaaaattaatataacaccataattttccaatttacaaacaaacatagctatatacctaatacaaagtattatgtcgtattttttccaaagtggactaaaaacactttgtatttttatttatttatttatttattattattacttgcatcttttaattttgctcacgttatttgaactttggttgcacaactataaaaatttgaaattttgactcaattatataggtttattgtaaaactaatatatatatgtttaattatcatgaatgaatgtagatgttaatgttatcacacgggcctatgatttatttaatgttttacaaagtatttttaatgtatgaataaattaataataacacaaaatataccataaaaattaatatcatacaaaaaaaatagaatcgattcaatcggatacaattaagaaactcaggccaccacacaagtcttttgtgtggtttcttatttaatataaagccaattttttcgaaaagtggtctgctataacttttagtctctgaaaattgaactaatttcttgttattgtattacgagagaactattaataaataaaattaaaaaaagcatattaaaaaattggagttccgcaagtaaaataaggttgtgtaacaatttatgcatataaaagccaaaaaaaaagtttttaatatatatttcatgtctgttttttttttcttttctttccttttttagaaaaaagaaatgttgtccgtgtgagttattgcacctttggtggaatttagaattctatggatatcgatagttgtaattgggatccccgagcctatataagttctaaataagatggaatatattgtggtatctcaataaattcgaataaaaagtaaacaaaaataaagaattttgggaccttaaaaaggaagaaccaaataatgtgggaccgttatgccctccaacatatttattttgtacgtacttcttctgtgtttgttgcctactaggagggaaaagtggattgaaatttgaaagaatcaagtaagaaaaaaaagacaacttattaaaaaaaatgaagataagggatggttggagagtttatattttttaaacacgagattgtgatcaagagaggaaaaggtaggagagtggggtataatctcaaatcatgtaattaggctgaattaatttaattataaaaattagatatgattatacttaaatttgattaggtttagaaaattatatgttaattggattagtcggtttttcattattttctcactcctcatttttttcatattattatttttcattgctttctctctcaccattctctctttcatcactttttctcttacctctctctctctctctctc

SEQ ID NO: 23557 - DNA, 2075 bp, Cannabis sativa
  modified_base (170)..(179): a, c, t, g, unknown or other
  modified_base (1999)..(2000): a, c, t, g, unknown or other
ctaacctaaccctaagtggtttcctataaataggtaggggtggctaagggaaaaagatgatgcagctcattccttcagtaaaatttttgagcctctcttcctatacctagccgaaacctctctctctgtctctctcttcaaaaccaaagcctatagtgaaagagtgagtnnnnnnnnnnatcaagtggtactcaatcatagtatgtaggactgtgaagaatccagtttcaagagaaggagattcagactcagattcttggtgatactctgtaaggttcccgatactttatatgtatttatttcatatcgttttagaagttcatattaaggatgttaataacatacttgttcggaaatctagatcctggtagaataaatccaacagattcctcatctcaggcgccaaccacagtacaggacgtcgatgactctactgaaccagcgaaaatcacaaaactagtggctgttcctgagggaatttcgcacatcaacgataaaaaggggctcgtcagagatggcagcgaagctccgccaagagagaattacagttttttggaattaaagaagctctctgtgccatcagatatgcctcccaattttgtcactgtcgatatttctgctggattcgatctgagtagatcacaatcgactctatttctatattcgacggcagcctgcagctcaccaacgtcagagaagagacccttggcttcatcgaacattgtggattttgtacccgtggtagtgaatggatttcgaagaacaccagcactggagaaagagatgatgatcctagctccatcggctaatactagcaccaacattgtttttgttgtttgtgattcgaaccagatctggcacggatctggtcgagttcttcgtctagaatttttgaacaataatagcgactacaaccagagattagtgaaaaagaaaaaagtggagtttccgggagaaacaaagagtgttgaagagggaaagagggtgctggttactgggggacggacggaggcgtggtcgcgctggattgctgaagaccatcggaggaaagtgaccattactcagatcttgtgttcacagtttgctgataaagtttttcatcacttaattgatggaaatgtatatatacattgatggggatatatatactagtacacatttgatggctctacaaatgaagctaaggagaatacaatgcatgtcaacgaaaatatctttcggtttcaagtgcattaaaaaaaaaaggcggtgcacagtatcgggagaagaaggtgatgctgccctaagacttttgggcttggacttgggctgagaatttagtagaaaattataaagaaatgggctgaatattaaaagaataattgggatgtaattagttttttattttttatatttgttcttatttttagttgtatttttatttttaccaccttgaggacaaggtgattttgaagggtgggaaagtgttagactatgaaaatgctataggggcttattagtaatttagaaatagtgtgaaagtctataaatatgtaattgtgtaactattgttggggatggattgagaaaatagatctttggttcaattgggatattggcactgtctcgaagagtgcactttggagatttgtccagtctcgaagaggactattatctaacaattattgtgcatgatgcactccaagaaaatgaggccctacttgtttagttggcagagagtttaagccacagcaaagaactccaagagcaagtgcaaaggcatggggaccaaactcctccaccaaaagagtcttctccccctaggagaagaagaggccgcccatcaaaagaacatgccaccatggcacaccaagggatccaattccatggtgaccctagaagtaccaatccactaaggagaggggaccaccaaattttgtcaaacattagagtacatgccagaaatgtttggaatattttacgaggatataatgaaataacatcctaaatatgaattctnnaaaacaatgaaataaacacataagtgtttaagaaaaccttacactggttgtagcaagatataatgactccttcca

SEQ ID NO: 23558 - DNA, 4489 bp, Cannabis sativa
taactaaattgaagaaacatcatcaaacatttatcatatccctaaattggaaatttaattaaaaaaactcatgttcacatccatacaaataaaacagaaattaacataaagacataaaagcgagaagaaagaactagttggtaatcttgctctgggtcgctacaattggctcctttgtctcattcttcaattttagggtttaatttctgagtattttacttctaaaatacgagacccttatatagaaaataatacaaatatcttcaagtgatgaaattacaaaactgcctaaagatctcgtctttagcacatagtcgcgaccataggctaatctcgaaaaacaagctttctgcccaaactccatagtcgcgaccacataattcatcacgactatggtctttggtggtcgtgactactgaagctaattgccagcttcaacttctttcagtaaaatatgcataactttcacataccaactccaaatgagttgattcaagaggcgttgtgaagaggaaaaatgaatttaaaacttccatgttataactttttccaaaatatgatcaaaacatagttgaatttagatttgaattttcagatttattttcttataaaattttctctattttatagatcgttattttctgaaatttgatcaatttatatattccaaatgtgaatcttgaaaccaacaaaaacaaacgtaattctattccaaaaataataataaagaatagtccatctccaatgtctagggtctaagaataaccagtttcatgtcaaaatgaatcactccagtttcaaggatgagatctcttgtttcttcatctctgaaactcaccaaagtgaaccctgagtgcattctagcaattctctcaacccccaggttgcctcaaattcttttcatgaatccttcaaaatctctaaacggagaattggctcccaacacaatgcacacaatcaaatttcgccagtgcaaagcttcagcttccacttcgtcaaaatccatcttagccacagtttgatccccaatatgcataggttcaataaattcaagtcgagtagaaggggttcttacttgattagctttgaatttactccaaacttcctttgctgaagcttgataatctgaagcttcaataagatagaacgaaaagataattttgttgaggtccttatactcattaggctttagcccagatcgacgacttaggtgttcctttcttcgcagagcacacattgccttcttcatggtctccattaggattttcaatcagatcatggaaaacctccaaaggatgttcgccatcattagcttggatcgaagggagagcacctgaaccttcttgtgtgatgaccttagcaagcttcgagacaattcatttattcttcgcaatgagaggaaatagatagtttcacttgtctttactcagtgatactttactacagaaaagaatcgagggttagggtactaaacggaaacttaaaaactattaaactcaaccgtcatcaaacttaaatattattattaaactctataatatattaagaactattaattaaaattagatatactactgaaataaaaaaaaattaaaatctcaaaaattactattagtgtatattattacaattacatataaataaaatattttactaaaaaattaatgtaaattattttaacaaaaaaaattatacatataaatggtatttatataattattaatatacaatatatgataaaattattaattaaaagattatataaagaataaaaaagaaaataactaagggccatgcaaaaaatcaataatcaaggtacgtaaatggctaaaatcaaagctgaaaccaataacatttcagccataaagatacaataaatatttcattcacgcaataaatccaaccataattctggcgagtaaatctatttaaatatagtaaatatacaaattaaataaaataaaaattaaaaaagaatctaaaagtataaaggccttatttattttaataaaagcaggttgtaaaaggtaaaaataaatcataattaacatcattaaacacggtctaatcaccaaaaatttgttacaagtgactaaaaacacacaaattaccacgaaaatcacgccaaaagtaactcacctcaaaacccaccagccgaaatatgaagaaactcacctcaacaatggcagcatccatcaaccttaagtctttaagaaatctaaacgaatttttaattattaaagaataatataacattaaattaaaaatgaaaaataaaacaaaatcgaaatagccaaaaacaccaacacatataatattatatgaaatgtaaaatcaattttaaaattatattctcaaataaataaataataaagagaacaaagaaacagaggtttgacttaacgaaatacacaaaccataaaaccttgcattgactttcaaatggtgaataagtcaataaaacttatgatgaagtaagcatattccacgacttttatcagaactagtaacggagacgctccatggagtgacaaattgatcctcggtggcgaaatcttcaccgtacatgtcttggaccccaccactgacggcctcaactgcagtcaaggcttccctcgtttccttcactacgctttccatcacaacggtgccgttttgatcacccgctcagttggtcgaggcaaccactttcagaagctgcatatctttttcgctttgaggaaaccaggttgtacagctccaaaacccctttttttaatacaaattatttccaccaaaaactagaaaataactgtattaccaacgccaacaactatttttatggtttaaattcaacaattaattaattattatttttatctactattttaaattaataagattatgtattaccatattatatatattttaattaaattatcatttttaattgtaatattatatcttaattatcttatttttcatttaaataatgttaaaatttgtaattaatctagatattatgaaaagatcctaaccattatgtttatttttaaatttggtttatttatggtattttattattttcaaattataatattagaaaatgataatagaaaaatctttatttttaaaatcctgaatattttactactttatcatgtttagttatttaaattattaaaatagtattaaaataaccatatgatagttaaattcaaattttaaataaataagttgtcttaacaacccattaattttgaaatttagtatattctggatgagagtgagggcttacggagactgcaaacttctcttacagacaaggtccaggaattgaccaagtctttggaagccgctcgggcatcactagaggtgaaaaataaatctttgcaggaagaaaggaaagctcatcggcttgataacattaggaacgaggcgtatgggtcttctatgaattttggaaggccaacccagccgctaattttagatatatggatgtcgaggaactagctgagaaattaaccttttgtgaagctcaagatgctcaggatagggtccaagtttttgcaaatgagtatgctagggcgtctactgagaatgtcgaggcggccaacttcaccatcttagaacaagacaataataacctctagcctgaatttcacaatccttcgatcctaatggacctttgaactcggtatctttatacctatttttttaatgcatatatttctaccttggtggccacttttgacataatatagctaaccaagctacttataatcttggtattattttttttattacagacaaatggttgtccgggtagcctttaatcccaggttgaatattaccttttatctgataaaacattgtcattgcacgtacttaattcccaaattttaaaattttcgtctaagtactttctgtgcgattttcccaatgttataccaagtataggctccgaaatccacgaaagtcgaacgtgccatgatagtactataagtcgttgaacaatccaccacaataaaagtacaatatttaaatgtgctatgaggagtgtcagggcacaaagtcattgggagcctaattttctaatgggaataaagaaattcccattgaaccccgtgagcagggaaccacttggaaactggtcttggtctgtgaggtcaatggccaagaaagcatctttaaagagaatattcactgaactcccaatatccaccaagattcgagcaactatcatgttggaaatgggagtctcaatgcattgtttgggcatcttcttcagtgaacgttatttgttggtctatgagatgaggcttttgtgctggtagatgtcctacttcccatacttcttcattatgatccagggctctggcatatagcgttttatctcatggcgggttgaacctatatgggggcctctgaagatcatagccactctcccgttcagcctaggtagatgtatgggaagatttccttggttagtgtgacagtcagtagtccc

SEQ ID NO: 23559 - DNA, 3325 bp, Cannabis sativa
agagagagagagagagaggtttgcctgaggtgagaggggggccagagatggtggcttaagttatatataaatcaacagtagaatgtgatatttaacggatttttttaaacgaaatgataaaaaccaaaacagaagtacaatttaggtaatttttcttttaaaaaatcgatttatgtggttaatattgtggacaatgtcccacatggaataaatggtagagaattgagctatatataagaacatgggctactccactcattgctaattggttttgagttggaaccccatgattctcaacatggtatcagagccatatcccttatgtccacttttgagttggaacccatgattctcaacagttaagtgttacaaatcgtataattcaaataattttaccgtcaatatcttaaagtatttgaggtgagataggggtttaaaaaatgtgggaccaaccaaacatgtgatagggcaggagggtccctctagaaaaccaaactaacaaacctataaacgagtgtcgaagaaattaacacatcagcagtccaaataagaagattttcatcaaaagataaggtcaccttccttctctcaccttcacactactcactgagtcaccacgagttgtgtctagtgacgctgcacctatggcctccctccaaaactccccctcaatcaattacaccctctttctcaactcttttccgcaggttcttacatcttcatcttcaccttttcttctttatttctcttctctttctttcttaatgtcattaatggtttgtgttcaaaatttgttgggctcagttgcagaagcacaacggtgctttttcttgctgcagaaggcggttttcacttctcgtcagggcccagcaagcaccttcatctttgactgtgtcttcttctcaaggtcattattcacctttttttttggtatcattaaattacattgctttactttgataatttgattgttctgcaagccggttctttaacgttttagtggaaggtttagacgattgaacattatagaagtcaaccaattttgttttgtgtttattactttgtaattttggtattcagttaaatactaattgaaattccctttgattattggtataattgaactttactctcctttaattagtacacaattgattgctaatgtatgttgccccattgatcaactaaacttcttgtgaaccatttgaatttagaaactgctttttttggcagaagggttatctctgaagttttgttttatttaaggattcagtggtagtaagaatgtgcattaatccaacaacttggtgaagctacatgtttagtttaagaataagaccaatagtgctttagaactatcaaattttataaagatttcactgcactctgccattatgaactagcaaatgatgaagttgcccatgattcttgtaggaatgtcttatccaaagagagctttttgagccatctcttctatttaagaaataattcaattatattctaagtatactgatgagacagtgacattgacattcatttactaatggtgataatgtgctatggaaacttcagctccatttgttctaacttttgttatgtcttcggcagatagacctgggagacgccatattattgcagcaggcattttcgcttcttgggtttcactggttaatcaaaactctgtatgtaagtaatgctacttgatttttggtaatagcacatgcttatagaatggtgttactctttttggtttccagatcttatttatcacaccatttgactcatactatttagccttgctttttgtttccttaaattctattgactgatatcctaagaagacacccttgatgtggctcagttgctgcagaaaataaaaagggatttctgcctgtcacagacaagaaagacggatacactttcctatatccatttgggtggcaggtgagcatgaaatgaattccttatctcttggtgagctataatatggttgatctagcctaactttatgtttgggaatgggcaggaagtaattatagatggtcaagacaaggtatttaaagatgtcattgagcctttagaaaatgttagtgtaaatttacttccaacaagcaagcaggacattcgagactttgggcctcctgaacaggtttgtatatgatttataaaaaattgcacgctagtatattgaggattgtgaaatgattataatttttgatgctatagctccttgatgtatttttgtttttgctgacaaagctcctcaactgtcagttttaatgatatcgtcactcatggctgaataaatgacaggttgcagaaactttaattaaaaaggttcttgctcctcccaaccagaaaacaaagctaattgaggcaaaagaggtatgtgattctttaatatgcttgtcttactaagaaatcacacttgtgctcgtcatttacattagaaattaatacatccatgatattctttggactagtgcaatatattgtaatatgattattatcaatcttcctctgttggtttgtacatctcatacactttctccatgctctcatactctgtcggttttagtttaattacatgttagttcacattttcaggtggttccttatagtttatatttcaatgttgcagcaagacgttgatgggaaagcatattacactttcgagttcattgcgaaagctccaaactatactcgccatgctctcagcacaatctctatcgccaatggtatgtatgaaagtgcaattgcagaaatagagcattcatatgaaatgtcattttacaatgcttgtgttgttcccttccacatattctcaagttgttaattttgctacttaaaattttctcattctaagtgagacaatgtgaaatgtaggtaaattctacactttaacgactggggccaatgaaaggaggtgggagaagatgaaagacaaattgcatactgtgatcgattctttcaagatctcaaatgtttaatatgggtttgagtttgaccacttcttccaaatccaaaaaaggaagaacggagttttgaattgtgaacagcaaattttaatttttctgatctgtcccttcacctttttactctgcttgttctttttcttcttccccattgtagatgaaatataaaggtaaaggaaagcattttcgcctttgctaaattatatatgaagggttatgaactatgtatttgttataagttataatttgcattgagaacaaaaatgtagaaaatgtcacacaacaaaaatacaccaaacaattatttctcttccaattcttttatgtataatttgtgggagaagcatctt

SEQ ID NO: 23560 - DNA, 3488 bp, Cannabis sativa
tacattaagccggagcatagaggcaggcagttgaggcaaggatgaacaatggtggactgaggatgttgtagtagtgattcttgtttgggcagtcctgtattcctgtaaataactactgacagaattctccaaattgaaatcagtgaaactggattgattaaaaatagctttgttcctattgttccaaatggcccaaagtaggcccaaaaaagtagaaaaagcagatttatcaagacaatcaaaacccctaagcataaattctttaatatcacagtttttattagtaagataaaattggcgaaaagaggagtttttccatattttacctgctctggaacattgaatgagagagtgagaattggaatcgagttgggagtgacaaatggaacaatgaggtgagggagtagaatggcggtgaaaaagattaagactggtagggaggatgtggtggaatgctttccaaacgaaatgtttaatttttggaggaatgttagaagaccagacagtggtccaccaacgtttaaaggtgaaagggtcagaagggccaggagtggagtagctggagttagctaagtggtaagcagagttgacggtgaaacaaccagaggggtgatgtttccagatgaggctatcggggctgtgaggatcaataggcactgagagaatggcagaacacatctcctcatcgaaataagttcttagtttgtctaaatcccaatgtcgattatcagtaagaaaaaaggaaactgtgtgagccggagggaggatcccaggtttgaaaaagactttattatgagagggaagccaattggattcagaaatattgatggaagtgccatccccaattttccaactgaggcctttgagaaggagttcccgaccccagagaatactacgccaacagaatgaaggcgagtgaccgattgcagcgtggagaaaatcatttcgcttgaagtacttggcttggaaaagccgagcaaccaaggagtccggaaagccttggcaagcatggcttggttatggtaaattatgttacgaaaacccaggcccccgaaaaacttggaagaacagaggctgtcccattttttccaatgaattttgttggaatggccaagggagccccaccagaacttagccattagtttgctaaagtgcttgcagagagaaacagggaggcggaaacaggacatagcataggaaggaatagcttgaataaccgacttcagaaggatctctttgccagctctagagaagaggttttggttccagactgacagcttggagctggctttttgcagcagatactggaaggaggaaactttagatctggaaaagcattggggaacgcccaggtatttgtcgatgaaaggcttgttatccaggtggagggtgttcctgaaagtaaggctgtcagagggaggtgtgttaggggagaaaaggatggaggatttattgaaattgacagactggccagtggctaggtggtacgtggagagaatgtctttaatttcagcagcggaagatgggttaacagtagtgaagagcaggctgtcgtcagcgaagagaaggtgagagatggagggggcggagcgagatatggaaataccatgaaaggagtgggaggattccttgtaattaattatgccagagaggccttcagcgacaaggaggaaaagatagggtgaaagagggtcaccttgtcggataccacgagaaggggagaaactttgagaaagagtgttattgatgcgaattcgaaaggagacagtagaaagacaatttaggattaaggagatgaaaggaggggggaaaccaaagtgttgaagaatatgccgaatataatcccattcgactttgtcgaaggccttttccatgtccaactttaaagcagcccaacctactttaccctgcttacgacagttgatagcgtggataacctcattagcgataagaatattgtcaaagataatacgatcgctgaggaacgcgccctgattatgagaaataaggtcaggaagaacaacacgaaggcggttggcaatagttttggaaacgactttgtaaaaggtggaacagaggctgataggtcgaaagtctttgacacgagaggcatttttaactttgggtatgagaaccagaatggtttcattaagcgggccaatgtcagcattggttgcaagagcagataaaacagcatgacaaagatcggtgccagcgaggtcccaattcttctgaaagaaattcggattaaagccgtcaggacctggggctttatcacccgcgagctgaaagagagcagatttaacttcatcaaaagtaaaaggggagccaagaaacgcaatctgagtggggttgagatgcttagtcagaccctgtgtggccatgttcatagcatcggaatttgtaccctgagaggtaaagagatccgtgtagaactgaacaaaagtggaggagatgtccttgaggttggtgatttgagagttatccgctccagagatggacttaatgtaattagtgcgtttcctggccgtagcccgattgtgaaagtaccgagtgtttttgtccccagctttaagccagttaacacgagagcgctgtttccaaaatatttcttgtttaagtaaaatggagtcaagggtacgttgaagatcgttagctttagtagcattggcctgagaaataacaggccctgccaaaagctgatccatctcagattgaaggcttttaatgtcatgggaaaattgatttttgtttcgactccaagaagacagagaaagggagcaattattttgcttggagatgaagttggagagagggttaggatggctggaaggggaaggatcagaaacccaggttctcctaaggaaatcagggaaatcatcctcaagtaaccagtggttgtcaaagcgaaaggtggggttacgggcaattaagcttgggtttccatcccacacaactttgagagctctatgatcagagccaaaaaaacccaagtgttgaagggaggccgagggaaataaattagtccatttgtggttgacaatggcccaatctaatcgctctaacgtggtaccatgcttccaagtaaaacggcttccagaaaaagaaagcggagaaagagagtatttccctatgaagttctgaaaagaaaccatagagtggggagggggtaaactgttagagttgcggtcattgaagccaagataatcattaaagtcccctattatgatccaaggtgctaaaggggcagcatcaaaaagacgattcaataaggtccaagagtgatttttatcagcaacataaggggaaccatagtaacaagacaaatgaaaacttatattattaatagtaattatacagtcgatatgattaagggagtgagacaaaatattaacatcaatattatccttccaaaacaaaagcaatcctccccctaaaccctccctaggaacttgaaaaacattatcaaaaaacgtcttagccttagc

SEQ ID NO: 23561 - DNA, 2976 bp, Cannabis sativa
aaaaaaacatgtatacatataatattatgtatataattttttttttttttttggaaatttgtatgtagtagacccttttttaaagggctgtagattttttttatatagtttggcattaaaaaatttgtttagtccaattgtcttttttaatggtgtaagttatagctatttaagattatttttaatttttcaaaaaatttcgaataatttacagtgttaaaaattaaatataagtatctacttatcaggtgtataaaaaaaattgtcgcacgtataataaaatgtatgaattttatttttgacattataaactactcaaaattttataaaaattacaagtatttttaagtaactattgtatataggatcataaaaaaataattaaaaagctcttctatataccaaaataaacatggagtctaccgaaatacacttttaggagagtgtactaatatttttatgtcttcgaatagaaaaaaaaaagtattagtatttaaatatatattatagtatccttaaaaaagtgtttctaaagatctttctccacatcataattatattatagttattaagggtcatttgtaaaattttagacaattttaaataatttataattctaaaaataaaatttaagtaattttattgtatttgtgactatttttctcataagtttgatacagtaattgtttgaattttatttttgataaattatttaaaatttaaaaaatttacaaataatcttacattcttacaaaataagggaaaacaaaaaaattaaacttttttttttatatatatctaataccaaaatatgtttttgagaaatgctaaaagaccttattactttaatattattatagtctattaaatatggagttttatataatttaaaataataaattttaaatagtatcgttagcctatcataaaatagcatgtctaaaagttacacaatactagtgcaataacaatgtttatcatttttgtattacataacaataataatatgtggtttaacgtgttcaaagaaaagtagtaataataataattattataaaagatgacgacaaaaaacgtcgattggaacggatcacaaaaataaaagcaaacaaaaaaaaaaagtcaatatagatgagttggtggaaccacgtgaatcacagtgtcattaattattatcgtgcattaatgtggtggaacccatatatttcgtatatcaatcaatcacatcaaattatttctcttcttttttcttttttgaaacagcatcaaattatttctcagtgtactattttatacttgtcttaagaaatgtgagtgattatccttatcaagaaaaaaaaaaaacaaatgagtgattatattcttgaggttggaaatatagataccttatcatatataataaatatgtaacatacggatttttccaaaatgttatacataccgttttctgtgatgtaaatttctggattattgtaatgttcttttaaatgcagcagaagcttcctgatgccctgtggatagatgaacagccaccccaatgcagtctgtaccacatcaccacaccaataattcaatattaaacattaatacttattttgtatattaaaaaatgtcattacgtccatttctcaaataaatgtactcccactattaatatgtctacatgatcaacatcttatatatatattatatattaaaaaatagatattattgctatggaggaaaaaaaacaaaaaagaaaaaaagatatagtgatcgataatgtaccggggtcccaattggaattccatttttgtcagctgcgtccgagattaaagaaacaagaaaactttgttaaaatgaaatatatatataaataatattaaataaataaaaaatatttttagtacgcataaagttgaagatgataaaatgtgtgcatggttaaaccataccagtgagagtagcttgtctatctccactataactttggttatgaatacttgttaaaggagcagcttctgcataattggaagtataataattcaatccaagaaaatctaaagaccctttcagcaacttcgattctgctggtgtgaatttggggagtctatttctcgctgctaatctcatacttaacggataatgaccaaaggttactggttgagcaaacctatacatataaaacatgtttaactaattaatgagtaaacataattatgaatatgaccattcaaattattgtatatatatgcttattatagataatgtctagctgaactctcaccatccaaaaaagaaatcaagagctctagaagctgccctttgatcagctgttgttttgtgttttggttcaaaccaatgagtaacaatggtaatcccaatttttcccttttgctgtgcctgcatcatatatatatatatatatatttatatattaagtttataatagttctttgattacgattaaaatatcttcattattgagtaattaaaataaaatttatcgatattaattacctgatatttttccctgtatatttttacaccattggcatgagcaagaagcaaatggtgggctgcaatgtagggttcagtggctgagttaccagcagtacaattcccggcgtgcttggaacatcggccaggggcaaatgtgccaaaattataagcattcatggtaaaactattgggctcatttatagtaacccaatattttactcgatctccaaatgtcttgaaacaaaaatttgcatagtctgagtagtccttcctattgatcaaatcatacatcatccatcgttattttttcaattgtttgaaggaagaccactataatcataattaaaggggaaaataaccattttattattatactcacactatcttagggctcaaccagccggcataatctttttcaagtgctaatggtgtgtcaaaatgaaataacgtcacaaatggcttgattcctgcattaaaatggaagaaaccttatat

SEQ ID NO: 23562 - DNA, 4241 bp, Cannabis sativa
atcactgaaatagtagaattgaatttaattagacaaaagtccttaaatctaacaatctcacttgttcaggaggaatttttaatgtctaaaaatgttcagaaggtatgatttggtacatatcaaaattttgggaaaaaaaaatcctaattaaccttatatttttatgcgtttttttaatttttttttttactgattttttattctacacttacataattatattctgtaactataatattcattttattactaatattattattctgcattaattaattaataagtaattatgaaataagaatcttcattttaaaatacatttttttattaaaacaaaaattattaatcaaacttaacacttgctacaacagctagcagcctagcacccgacacactaccacaactaaaaacactaacacattacatacaaaatcataaacctgtcgatctctttagatatttttttcttctatcaataagcaacaatctcccttttaagaccattttaatcaaatcatcaatataggaaatccttaacattttcccttcaataatataagtgttctgattccaccaaatgaagtaaactgttatcgcagagcagcacaagcaacctactacaagaaatgtaacttttgctagcacatttttgtacaggcaaaagtttggtattgtcttggcgaaatgaattttacttttgatgtgttggcaaatcaacattggtattagaacttttgccaccgcaaaatgaaaagtgctagcaaaaataacttttgccaacacgtaaatgcgctaataaaagttagatttttgccattacaaatgtgcgatggtaaaactttgacctttttgccagcgcaatttgtgagatgcgctgctaaaaattacttttacgagtgcagtagaaactgcgctgtcaaaagtgatatttctagtagtgactgctgcaacatcagaaagtaaacacgctgtctctttgcaaaaatccatgacagctagttcgagtaattatttggccaaatggccacaccaagccaagactgaataaccgccacaattttcttagagaattgaccctcaaagaaaagatgggcacacttggcaaagttgaaacgtaataggagtacttcttgtcctcaagtgatctctagttaataaatgattataagaggcttgccaaagaataaatttatgttttggtgtgaataacctacaccaaatcactttacaattatccacctttcaatgagtgagaaaaacattgtagagtttattactaacccaaaatctctccccattcccagcctccaaaattgcatttcgagaaaagtggtttttgagattgagaagcttgcgccaataccagctcacatatccttttctcccactaagtcttgttactttaagtagatggaatcaatctattttacccaaagagcatcttgctttgtggttaaagcccacacagatcgagaaattgaagctttattaattccacttggttccatcacgaaaccccaagcctccatatataacacttacgcttaaaaacaagatcccaagaagcaaggcattttgttagtattctctttcacaccccacagaaagtgcttgcaaagcttgtcgatcagttgccttgacaactttttgggtcggcgagcataaaaatgctcatccaataacaacagatgcctaacaacactgactaaatcaattgcactctaccagaaaatgagaggtgaagggtagcccaattatgaagcttcaatttaatctcttcatcaagaaaaggatcacaatcttctgccttctatttcgttggcctcattggaataccaagatacttaatagagaaataaccctttgcaaaatgtattgtatctcgaattccttgtttagtcattccatcaatcccaccaatgtaaacctatttggattggctttgaggccagattgcaactactaaatgtaaggcatcctgcattacttggatggattttgtagaccacttagaaagcaaagactaacaatcttcaaagatttacacattgggtggtacctggaatctaacattcgggcaataaacaataaaaactaggtaagatattccattaccaacacaaaaacaaatagagaaatcgggtcacgttgtcttaggcctttctttccttgatatctcccttctgctcgaccatttagcactaacgaatagcatgtcatcatcaaaccaatgaacctagagggagaaatataactctttagaagttctcctgaaaagtcccaatctatggtgtcataaacgttatgtaagccaatcttcatgagatatcttggtggtattccttttctattgtaaccatggagtagatcttgaagaataagcacgttttgagcaattgatcagttcttaatgaaggctttctgattcatgttaatgatcgagggtaaaactttaactaacctactacccatcatcttagagatacacttatagagggcattacaacaagaaattagcctataaccaatagcttgggatggtttttcagtcttggaaattaaagagaagagagtattattcagatgagaagatatcttccttatctcaaagaataacaaaacaacattggagatttcctcaaaaatattaatcaataacactttgaaactttttcaaccaaacccatcgagatctgagcttttcaatttatgaatattaaataaggccttctaacaccaaagctagtaaaagccttaatcaactaaacctatagatctgtactgagctggtcaaacaatccttcttgatactcagagaggccaaacttggactgcccataaagcctttgaagtggttcaaataatggtaaactacctcatcgtaatcatccaccaaggcaccatatgtctcaacaagagaggaaattcgatttgcttctttcctttctttaatgctagtattaaagaatgttgaatttccatatccaaacttcaaccaaatgatcttgctttttttcctcaaataattaagtttcaatcatcttagcacacgaactgaaggttgcctttatctctttctcttccttaactaaatccttaaaaagagtgtcatattgtaaatgttgttggatccattcaaaacgagatttagcataactataagctagttgaatatcccactatcttccatttaaaatcttgaagcactttcctcacccagttaagcataatcttagtttggaaaagacttgtaccatgagcagcttgattcaaattctctaacacttttttgcttaaagtcactttttgaaaaatttaaaagtcgaaaatcccaagttttttaatttttagacttctaataatacgaagacagtggtcagacattggatcaactcattagttaagacaagagacaaccaattacacggatcatcaagttcgagggaagcaataggaaaatcacctactctattcaccacatccaaaacaacattaaagtctcccataagaagctaaggtttaacatggaatggaagaaaagcaagaccctaccataagtcattttgctctataatagagttcaacccataaaccaaagtgagataaaaatcatcttggaacctagaatgtgtaaccaagcaatgcagatactgttcattcccaacaaaagtagttatatttacaaaattatgcaactagaaggaaagtaccttctacaattaatagaactagaatgaaaattcccaccacaaaagttggtcttcatcatatcatccactttgtctcctcgaatcttagtatctagtaaagttcctattcccactttattcaacttacaaagagtattaacttgaaggtcctcaaaaatttgaattgcaagctttggatttcttttgcacacacacaaatcgagattaagaaaccaaatcatagctaatagaaatttaaacattaaaaaaagaatgttaaggttacctttgtgctgccacgatagagcgaggagagggacggagcggaggagacggatggcgtggatcgtggtcgcgaaggagagagaaccaagaaatgaaaaaaaatttacaaataacttcaaaaaaatgagatttgatttttttttggtggatttatatattaagagatggaaatgaaatttcagatctaaattgcggtaaatttaagcatgagaattgcctacgatttaaaactgtgggcaattcccatttaaaaatacacgagatttt

SEQ ID NO: 23563 - DNA, 2014 bp, Cannabis sativa
aatctgtcatctcttaccgttataataattgttctaaacttttgcaatagtcgtggtactatcacagtggatcaacacagttggtataagtctttcccataaaggaatctcagcgagcagacttctcaacctacctgttccttcactagttttagctagtgctatcatttcaaactctatggtggattgtgctaaatagtttatttctttgatttccaaaaaatagctccaccagttatactaaaaatatagccactagttgctttggagttatctgataaagttttccagtcaacatcaatgtatccttcaagtacacctagctagaaacttataatgatgtaatctaaggttcatggttctcttttgatatttcatgaacttcttaatagcattccaatgctttatactagatttactggcaaacaacaatcccacgacatagacaatgactgtctagtacagtcagttgcatatcaaaggttactgattatgctagcataatctgactgtcttactccatctctaatgttcttaaattattttacacttgggtactcatatggggtacgacaggtttatagttaaagtaattatatttctttagaatcttctcaatgtagtgagattgatctagagaaattctcatattagacctagtaatctttattctaaggattacactcgcttctctgagatcttccatatcaaagttagaacacaacattgatttcacagtgttcacgacatgaatgttagcaccaaaaaatgagcaagtcatccatgtatatacaactttcattcacttcaaaaccattgaaatgactaaagtgtcaaatttctcatgctactgtttagatgtctgttttagaccgtacaaaatttatccaacttagaagttagaccttatgttcctcgccatggatcacgaaccctttctgttgatcctgtaaatttcctcttctagttcaccattgaggaacatattcttaacattcacatttggtgtacaattaagttgtgtatgacagctagtaaaattaaaactgttattttagtgataggtgaaaatgtgtcaaaaaactctacatagacatgattaaacaattgatgaattcgtagatgaaattaaaaaaggttgtcgaaaatactgcaactgttaaatcagttcctagctctatataccgtacgttaaacccttacttattatgttcattgttgactatggtatatgcatgcaccatttgtgggtgtgtaaatgtaatgcaaagagttatgcatcaaacagatcaaattacgaatcccttctgagagtcatttaattgatcacattactctttggtggcatgtgatgatatctattttcatctgtcttgtaggttccttggtacgtacttgcagatcctaaaataattttggaagttctaaactttttgctgactgatgatcaggtaaaatataaactaaaactcgttttttgaggctaaattgttgcatctgttatggcagcagtgctatgctcgaggccagttactttacctgctaaaatgtcaacgagtcagcttgtatgaaactatatctaatatctgatatgaagggtgaccattgaataaactcataatctctttagttttttttcttaacttgctcatgtgttttgtctcttcaatggtaatggctacacaaattagttcataagttgttaattgcaagaccacaaccttcaaaagctatattattatattttttttttgctaaattataatgaattggttgctttcttgtctaatagagtaatagggaaaaaaaaaaagagagaaaaaaaatcattctaaaatccttataatgtgatgctttgtttaaagatgtagtacttttttattttattattattgttcacactcaatgatatatactataatatatagtgcatgattactgtaatatttattataatatcaattgtggaatctatttgtattatataaccatatatgcttaccatgtcaatctt

SEQ ID NO: 23564 - DNA, 2273 bp, Cannabis sativa
tttattttactctggtttatttttttaacaaatttgatatctttctcattattttgccaaaaaggggaaaagcatatatatagttttaataagtttagatgaagcaaatcttaaccataccacttttggctaaacatgttatcaaacatctttttttattggaacaaatttaattagttataagagtattaaggattaaaatagtggtgttattattgtgattctctgtgtcttctctttataccttgttactgggtttgtgagaatgaatatataggccggtgtttataggtgtagctacataaaattgaatcttataattattattattgtctcaatgagaagacaacaatgataaaacatattaaatacatagagtatatattcacctcccaactttttgtaacattactctttcaaatattcttttggaatgtatataattgttgcttcattcgacccaattaaaaaataaatcattatatattattgtgatacttccatcttttactcatcacttccaacaatcagtggttgaattaacaccacagaatttaataactatagttccttttcaaaatataataataaaaaatgtactcataacctaactaactgattaatttgtattataagtccttaaattatatagattatagcatattatagtctccaaattttattttttagtaaattgattcccaaaatatacatataaattttggcaagtagtccttggactttatatttttggaaaattgagtccttaaacttttattttttggcaacattaattccctagtcttaaataatgatatttttttgttaattttcacttatatattttacatactttgttattttttttgagttataatttatttttaattttaatacttttgtaaaaggtattgtatattaatgtatttttctcaagtatttatatatacaaatattttttaaacaaaatattttaaaaatataatttattcatatgtatattttttttattaataaaaaatagtatgagcactaacggacccatattatgtctaggtcccctcacttgtttttatctttttattttttattatatatattagctcttatatattataaattcttatatttaagtcatcacaaatattattttttttttaaaattatttatattttattatttattaatgaatagtagtattataattttaatattttttttacatttaatatattacatttattaattatttcaattttaattttacgctagtgagcgccactgagcataagctaaaaacaaaattttaaatataatttagttaagtatagtttatatatagaaaatatatttaggattttttttttaatttttttttcttattatagcaagtttataaaaaaaaaatagtataaatatatatttttttaaaaaaaattgacaatatatatttaaataaaaatatttaaaatttatacaaataaaaaacaacaaaaaataccattatttagagtggggacataatgttgccaagaatataaaagttgagacctttggggactaattaacttgcaaaacttatatatttagggagatcaatttgcaaaaaaaaaaaaaaaaaacaaagagtttgggagccaacttaccaaaatttatataatttaaggatcagtggtataaataagtttatgataattcaaaaacattaaaaaattaagggataattgccgcaaaagtcttcaaaaacttagggttgatgcagattagtctccaacttcaaaaattggcggtaatagtcctcaaggtgacattttctgtaagcctattggtcccttttttaactaattcgttaaacccaaataaaatacctcatgtcaattttttattggtccaaataataattttaattaaaaaaaatttaaaataaaataaaaatcctaaaaaatatattttaaaactataaatatattatattttattttattatatattttcttttctttttcttgttcatcttcttcaaccagccacgaagttcaaactggagcaccactaccacgaccccaatcacatcccgactgccagcattcccagtcgaccccagccagccctagccacccccactctagcccaatgttgtcaaggaccactgacgaggaccaccaatgaggtggttgtgcggtcgtggacgactaatgccgaagatgaacaagtgtgaaatttcaaggcataacaaaaaatgaaacaaaatagagtgagagagagagagaga

SEQ ID NO: 23565 - DNA, 4725 bp, Cannabis sativa
ctatcagatgtgccccactacttttggaaaggagctggtgtgtaacatgttatatattgtggcatttttagtggactggtggttaatgcttgacatcagtcttttatcggatggtgggtggatgtgtgtgtggtggttagatgctatggatacttacattatttattttattttataaattctgtgttttttaaggaatctcttttatggttatgaaaatattaggactttggatatgatttgcatcatttaggatttcaataaaatggaagtatttttctgtttattggtctctctttttagatactttcagtcttcagatctctctctgttgtggaagttaagaagggtggaaactcttagaataaccttaataagacatattacgcatggtctatgtgaatagttgtgttgcttttgaactcacttgatgctaggatagcttttcttctctctactacattcatcttgtcttgtttgtttgctttgattgtttgccagctcatgttgaggcaggtactacatatcttgaggaatcacacccattttgatattttcttttttatttctccctcccaattataactatattatggcaaatgggttttatactctagtctaaattgacattctccgtaggctaacttaaggctcattagttacttctacaattctactatttaatagccataaagttctgaatattaataaagactagattctgggaactcgcagatatgctagagcagtcttcagatggtctttctggcaattgggccaggcacaggaatcgggtcttgggtcttaaatgtttcttccttaactttgtggaacctagtataaaagcttgcaacaaagattgagggttctatgttggagattttgaccggcggtgatgtcatgtaatgattttcgttatcctccgcgtttgacctcagttgcttaattatatttattctgttgcagaaatgctggtgaggaagtgatgggctttgcttaagagaagcacttcatcttctggtgcttgtggaaaaatgtcctcaagattggccttaatttacaatttacattaaactatgataattattaactggttctctgccttaaatttaaggttagaggaggtcatagtttttccaatcattgcatttttgaaatcctactttgccatgaatgctctctcatctgcctttaagccaagtttgaaactttgcagaggatccgcattcttttgtcattacatctagatgggattttgtagcagtcttgttaccgggggttccagaattttgtgcctgtgaacatcatcgttttacaattcatgtccctggcaaagtgcaaacacacagaccatctaagagactgtaccttttctgtgtgacatattattctgctacattttggcattgcatcaattgcgatgttcttttgagtgggcttgctgaattttactgaatattgaaatagactatcttctcaagtcctaggatctcaattttgtttttttatggttgtgattctttctttaaagtataataaacgtttaacaggttccagatatttccaactaggtcattatggcactgccatccatacaacacactatggtgctgtttacctttaagattgtgtttttttgtagaaggtacaggccactgtgatgcttttttcattaaatattttgttgcttgtagaaggtatataatcttcgtcattcttctgtttggaataggattatttagatgactttctaggaatgggtatcccccttttttttttttttaattgctgtatcttttacagtttgactattgttagaattcaagactttcatatcttttgttttagacattgttcatgttaactttacgcaattatctatctgcagggctgtttcatgtgggtttacagaggataaagcattttttttttttgagttttatcccttttataattttcctgtgaattgaggaatcttttgccacatttaatatggccaacacagaaggatcccacactgttcttggtcttttaaagttctgtgtttccttgtaatcattttaggactatattggtaactcaagattttcagcccattttttcgttttcattctcttgcagaagatataaagataaaaaagaggatcaggcagagccagaggttgacccagagagggatcagaggactgtatttgcttatcaggtagccattctttcacatgccttacactttgctaagtttgcttgctcttaaattctctttactgcactattacgtatgatgtaactttttgtatttctattatgaaacaaaattggcagatttgtctaaaggcagatgaaagagatgtatacgagtttttctcaagggctggcaaggttagtatgtttccagtctcattttgtattgaataatttaatagaatatgtttcataaagaacaagattctatactgataaatgtctttaaacaaaatgtctcatactagtttaaattataaatctcacatgatagatgtagtgataattttgatattattcttttcataagtcgggattgaattcttttcattgatatattacatgatagatgttgactattttgggattgttctttaaatgaatgtagcaactttttataggctttctgttgagtattattgttaagtgcagtagcatggtttacaaatatggacaacttctttatcatttgcaggttcgagatgtacgtctcatcatggaccggaattctaggcgatctaagggtgttgggtacgtttctcatgttttcataattgatctacatctatctaactttatatatgtttattttaagcataggtcatataagattgtcaattcttttttactcatcaataactgatacttattagcgacgtcttttgtttattctttaaagaacatgacctgagttgatggtatgtaggttaatacttgtccctattagcttgaattgattatggagttatttttaaagtaggattaatggggtagatagctcaattgatcaggcctatggtttgtccatgcaagttttgatgtttgagtcccttctgctcctaagtacttacatagaaattgcgatagtttcattttctcaaatattgtagggttagatgaggaatccagttctgaaaaagaaaaaaagaatcgggaatattgagatagtgtgtaatcaacaaggggtaatttattcaagtaaagcattttattatgtaaaattctattgagattgttggtattctgagttcattcttgttttgtaggtatattgagttttatgatgtgatgtcagtgcctatggccattgctctatctggtcagcctcttctaggtcaaccagttatggtgaagccatccgaagctgaaaagaatttggttcaatcaactgcagccgttgctgctggaccaggtggacttatagggccttactctggaggagctaggagactttatgttggcaatttacatacaagtataaaagaggaagatcttcgtcaggcatgtcttttttttgtgctcactgcttgcgaagttcaaactttaatctattatcaataaaataaaaaatgcttatgaactgcaattaatgtttttcccttcctttcttttatttactgatatattaatctttaatcaatttatgtgtttaaaatctttagtctatttattgtatacaggtttttggagcatttggtccagtggaacttgtacagttgcctcttgatgaaactggtctttgcaaaggttttggatttgtccaggtatgtgtaatcaattgggcaacttgtgagttgtttctgcattcccttcccctcctcctcttcatttgaatgtttagggacgacacatataacgagcatcaagttaccttctgttttcaagcttttataaaataatattatataattgagatttttacctgctactgtttctgagggtgggcgtcaagttgccttgtatgcttaattattcctttcaaatttgttggttgtttaactaatatcattatccagtttggacgtcttgaagatgcaagaaatgcactgagtttgaatggacaactggagattggtggtcgaatgcttaaggtaattttgcttattttgttactgcctaaagtatttatggaatatgtgacctgttttcaggtttctcccacttttttaattgtttatttcattgcatggaactgaattatgacttattgcattctatttccagtcagttatttccgtatgtctctcatattgtgcatgtcaacctctatgttttgaaaatgtccaaagattcatgaataagctgttgacttcacttctgtccatctgatccttttatctgagattaccgtattttatttttccttgtatgttctatgaattgcaatggtcttttttttttaagggtgttttgctagaaagaatcattctccctaatagatactatctgcctgatattcactcttttattctctttccttcattttattttttaggtatcagctgttactgatcaagttggaatgcaagaaattggtgggaacactggggattttgatgatgatgaaggcagtggaatggtaaggataaattttcttcacggttttgattaaaaaaacaaatgtcaatagctgagctttacatgtttcagcacacacgtttcacaagtgaagaaaggatttctgacttaattaaaaagtagctg

SEQ ID NO: 23566 - DNA, 3225 bp, Cannabis sativa
  modified_base (3168)..(3168): a, c, t, g, unknown or other
aaaatttataaagtccatcagtttgtctaaatgatagtgttgctcaatactactagaaagttattagacttataaaattcaaattcaaattttggtgttgttccagccatggatcaactactattgtcaccaaaaggtaacacatatattgtaaacaaaatagtatagaaattgaaaccctaagatatatacaatatataagtagcaaaactatctatattttttttaaatagagaagtttgatgctaaacacaaacttctagatctattgacaaaagataaagacatacactacacttgatacatatattaagactgagattaattgagatgcacttttattttatgttagtgcaagtgtgagtttgttgagattttatgccctaaataaaaccaatcttgatataatcttattgattgttcaatgaaatatatataaactatattatgttacttaattcacatgatacttttgtgattatagctttaatatataagttctattaaatcctgaacttatggataatcatgattataatgttgtctatacagtgaaaaataattatgatcatatgcttcaaacttctagtctcgtgatttatcaatgcactagatttacattgaagtgataatcaacgatatggtttacttgcacttggctaagtgaaatatcttttccaagacattagtaaagtaaagtaagatcagatgtattggctatacatcagattggatcaatattcagagtagaaaaatgatcgtaaatttaccataatatcttttctaagtgaataacacttagttgatcttagatcaatgagcttaatcctcagatggttaggttttggcttaactgtattgcacatgttctttgacttgctcgttacaagcttaccatcagggttagcccatacttatatcttgagaactcggtagtgcaattgagtgggattaataatcataaaaatagaatctatagcttatataactattaagaagtgaatgatgatttccttagagcttgactaaaagacataaatggaagaacacttattttagtaattatattagtttacttaaatatcatttataaaaagttaagtgttttaatgacaaaatacattaaagggtaaaataataattttgtccctactcgatgtagaccatctatctatagaggatcgttgattgtttaaatttaaacaatgaataatttatagcgtatctatcattggtgaatagagcattcaatgtaatcaagagtgcaattctaaatctatagtggagtcaggatggattaataagatagagaagttactataggtaaattttagaactactcattgagagcttgattatataggctcatggttcccacactacctgagtaatatcgtcttgtagactcaattaattgatttaattaatcaattaggattctaagtaaaactatgtgttatttatgaattttactaagcaaggacaaatttgagaagaaaataaaatttagaatttatttattgattaagagactttgaaatgtctaattaataaatatattaaatgataattttatttaatatttaattataattattaaatagataaaattaatatttaaacaactagaatatataaacaacaatttaaaaaaaaaaagataagtttcattaaaaaaaaaatatatactgacaaaattcaaactcatgggcttccatgttgggttagcccaaagtgggtttaaattaaacttaattttttttaatttcatttaattctaattataaccctagtgaaaccttataaataaaatatgatatcatttgatttaaaaaaaaaaaactcttgagtcacttttgtttgattaatagaatcaaagagagatctattatattttatagtaaatttcgagtttctcttattctatttctctttttttcgaatggtataagttttgactaattgctcacactttataaggtaatactcaggttagtaaagaatactgtgtagtcttttctcaagtactgaaggagaatttaggttcagttcttgatcataatctacaacagaaaggataaaaagttagagaactgaacaaaataagttaattaattctgttgcaaccaatacaaggatctctatatccctttatgtgatttacattattgttttgataattctatgtttaagatgttagattagtaataatcaacatactcgaataataaattaagatcctagtgaaatattttcaacaaatcatactataggtacaaacgttcgaattatgaatatacacatttcatacagttagtagacttatagtaactgagtgtatgggtactcagtaacaagttaaatattgtatttatatgtatgtttctcttatcgagtctgtcgacttacatatatgttattatgtgtaggtaagggaaaaataaaattgaacagtagtgagttgagagcttagtgaagattgtactatctgactgtccagatttgaagggttgcatctctcaagacaactgttgacacactttttgatactatctgattgtactatatgtcgtacgttagacgacacttttgatactttggaatgtaaaatgttttgtaactagatttaggaaccccgaattgtaaatgtttcttaaaatgtgtttatgtttagtaaagttttaattatcacgaaattttttattaaatgtattttttttttataaaatcctttaatttgcaaaggtcatcacaataattgaaaaaatatgataacgttccttaaatattagggcattacattaatagaaaacacatgttataatacatacggaaaaaaaaaccctttaatatatacttctcatcaaataatatacttaattattttacaatcaaagttttatcttagatgatgcttcttgagctgtaaatatgattcagcctgacttggcacaacccacattcttgtgcctccaaaagaagtgggtggggatgtgttggcccgtgtaagttagtgaatcaggtcgggtcgagctgtagtaaaagtaaagaagcccagcatgactcaaatgggctcgtgcccatgccttgaatgggctagcctgtgggccgacccatttgctaatataaactaggaaaatttgcatggtatactaacttttgtcattnttttacaaaaatactgtcagacagtattttttacttttttattgtatttttttataa

SEQ ID NO: 23567 - DNA, 3227 bp, Cannabis sativa
attaaattgcatcaataatgatatataactcataagagtgctaggtatcgtaagtgacctttagcatttctcgtaaatataatcctacattttatgagagatgctaaaagacactagtagtgtctaatatctttaatgtgttaatattactattaatgtaattaaatatcagattttatataatttaatttaataatatttttaaaaaatattactaaccatgtttagaagttgttaaatattattactacccaatagtaataatcaatttttatcactattcttagtattctatgaattttaaactccttttatatcaaatttgacctaaaaatttgacaattagtttgttcacttttctaaaaattgttaactccttttataccaaatttgaccttagaatttgacactttgtttattcacttttcaaaaaattagttccatgaatatgctaaattttactcttgctaagaattgtttagttagcaacaaaaaaaaaaacctttatgttttatcttttattcatataactcatttattttttatttttttaataatatcccttcaattttattagcaaatttgaaacatcaattaaatttcacctttcaatactaattaggattgtcacttatacacagatgtatatatatgacactaaaattttgaagctaataaaaacatgttatttatacacaagtgtacatagtaatgattcagttagtatttaaaagtcgaataacaatttaactagtacctcaaacttgtaaatagaagtaaaattaaagaagtattgccacaaaaaaattaaaaaaaaaaaatcagagaattaaacgcataaaattaaaacataagagactctcatatcattaattattaagagtaatactaaatgcaatcatagtatctagcactatcacaatatgttatttattttttatttttttgataacagaaacttcattgaaaaaccagcaaaacaagacagttaagtagcaacaaagggtgctacttccctttccagcagagaacagcaaacattatgggacgcagcccatgccgccaccttgtgagccaccccgttagccgaatgaggcagccaaaacacagacccataggccgcaaaagaaagtctattaaacaaatgcagaaagaaagtctatcacaatatgttattaatataattaaatatcaccacatttacaagactttcacttaataactactcaaaaatattatggctaaccatagttaaattactaatattttatattattttttcaataaatatattcataaaagttccttatcataattattaagacaaagcatatatctactttacattaaactactttggttaatattccggcttttaatatttattttgtgtcggtagaatctttttaactataattgtgccataaataaaatgctattatgtttggaaaatttaagtttttatgcttcaagtgacaccttatataaaaaatatctcatattttgtcattatcataaggaaaattactctatttatcaactcaacttccttctcttctttgtgtaatttctctttttctactatatctctctcatccaccatcaaccatctttatagataatcaccataaaatttatcaaaagatctatcatcatcactcatattttccaatattttacgtttttcatcttttttaattttatttctacccaaatgaccatttttatatgtaagttttatgtccataaatataaaaattaacacattttttcacatatatttgaaaatccaaaaagaactcttcacattggctatatttcgatgttaaattttggtgataaaaaaaaatacggaaaatatagaaaaaaaaaagtgcagagaacaaaaaattaaatattttttcaagtttaaaataaaaaaatttgttgaattaagtgtttaatacaattttttttccataaattttactaaaataatttcgttagcatctgagtattataagatgcatgccaatttaatgtaactcatttgatatcttcgtattcgagaatcaacaaattcaactccgcattgcacaaaaatttgggttttttttgtcatttctaattactcgataatttttacaagcagaaaaccctacacttaatttttcctaatttattttccacttctttttcccatcttttttttttgtctgcaccaaaatccaacttccaattccaaacacagccatcaagtttttctacaagcactctctacagttcacattaaacgatttttttttttttttgagataagtccacattaaaagtctcagagggtatttttgcaattaagttgtaagaaatagtgttgagttgtaaaaataaaggcccaacccaaaataaaggctcagcccaaataaaggcccaacccaataaaaccttaatctcagtgttctcctccatcttcgtctcgctcccaaatcttctcccgttcaccactcgacacttctcgttctccttctcctctcagatcggttcacggcaactacctcatacgccgactcaggtaatttctttgaaatctctactatttctttcctatctgaaatgatatatatgtgttgttttgtatcatcatcggactgtatttatagcaatcaataaaaaagtagtgatgataatttataggtttcaaggctttgaagagttttttttctgtgtttaatagagaattcgcttattttattcagttcatttttcttttttggcatcaaaattgatcctttatgttcattttataattaggatagcactattataccaaatatatatgttggtgtgattcaatttctgctatatgaatttagtatgcttaatgttttgtggtttttaacaaatcagattttgttatggtgtaacattgatttttaataggagagagaaagaaaaagtgcttaaataagctgtaattttattttgagaatctttagttagagattgtagtaagaaacaagttgagaaattatgttgtggatgtgatctttttattctcagattaatgtgtattcattgatattgcttgtgaagaaatgtggaaatcatactctcaatcatggctttttaaaatgttatattatttgaattgtactgcttttccagtttttatttgtgggtgaaccctgaaatctgaatgaggcatgttttagctacatgtatcgtttaggcagttcaacttattttat

SEQ ID NO: 23568 - DNA, 1926 bp, Cannabis sativa
gcatagtttaaaaattttgtcaagagtgaccaaactttcatgtcttttcaattttattacaagcattgtcaacttttgaaatgggtatgttagatttgaaagttatattctattagaagaaaagcatattctgttgacatccacaacaaattatgtcaacattttatggaattgtcagaataaattgtttcctaatactccacatttgaaaaagccaaaaaaaaaaagggatcatgttaattatggttaggaatgattattaattgtagtcttatttactataaacaaattaaaaatttacaaatttgttactacaatattgttttcttttttttttttgataatgataaaatcaccccattacatcaaaacattgatttaataacgttagtgaacaatgacacaaaaggtcacaaaactcataacaccccaagcccaaatgtagagttacacatatttattccttatataaaaagcaaacatgccttgtttgtacatagtcattccccattagtatatattatacacctcagccaattcaatttggtctagaaaaagaaaaaaaaaagttgttaagaccaattattccacataattgcagtgtgtcacatcttccttctctattaacaataataattagtgaaaataaatatttaaactaatagagaagagccacaaagtaaaaacaaacaaagagaaatagccatatttgagagacaacgagttgttgactcatcataattatttgtgtttatgagagattctaacatagaaaactagagcagaaacctatatgaatttattatttttcatccacaaaagacctttcatagtacagaaaaagagaaagaaaggcagatagatctatttgtgaatgaataattaggtatcggatatagatatttacgttgttgttgcgagctttacatcttcgccatcgagtaatccagagcatccaccaagaaatctgtcgtaaacataatgttcgataaggttaagtaagtaagaacatgtgaagactgatcttcactagttttctatgtatgtaaaatcagaatatctacctgcatcttccttgttgaagcagagaggaggtgtaattctgaatacatttccatgatatccgcctttgcctatcagaaccccgagatctaatcgaacgagaagagtgtgtattagaatagatttaacaacttggtgaggaggtaatgaaaataagcatacaaacctttcatttggtccatgatatgtaaagtttcagctttggcaggggttttcaagtgacgatcagtgactagttcaactccaagcattagtcctcttcccctaacgtctccaataactgcaaataacatttgcttagtgctacttattttggagattgatgattatgtgagtaatgatgtgtttgttaccttcatatttgtccttgagagcggtaagtctatctttgagataggacccaacaacaaatgcattctcctgaagcttttctttctcaatcaccttcaaaacagctagtcctgcagctgtgcatacagggtttccgccaaaagtgttgaagtaactgcgccgagttagaacctctgcaatctctggagttgttacaacagcaccaaggggaatgccattaccaatgccctgaatatgacacacaataaattagcaagtaaaaaccagtttctaatgcttaagcagtaatgaaaaggcgatgtaagggatttacctttgccattgttactatgtcgggcacaacaccttgggtctcaaatccccagaagtggctcccagtgcgaccaaacccggattggacttcatcagcaatacaaagcccgccggctttctttacgctactataagctgcaggcaagtaacctggtgccaattcaacaattcctcctactccctgttgttatatatgaataa

SEQ ID NO: 23569 - DNA, 2304 bp, Cannabis sativa
tataatttaatttaactaaatcttgaaaacaaagaatatcactacaatagaagcaaaaataatgttggtacctaaaaagcttcctacctatacaattatatatataattaaaaaaacatttaattcattataagaaattaacaattttgtggtattcactatattcttttggactttctaatgttatttgatttctttcaccaaatgtgaccaaatttagaaaactagtcctatgtatttattataatctattctacatgcaaagtaatgatatgattatattatcataatagctttctcaaactaagccttgaagaaaatggcaattatatttgaaatattttgaaaatttaaaaagaaatttgacaacattcaacactaaatctaataattgttgaactattttttttttctcttttttttgaaaattatatttctaactatgctatacatattatcattaatatatatttataagtaaggtagagataatctaccaaccaattttctacaattttctacctccaaattcaacatgttgacccataaatttaagaaagtagcaaagcattattattgaattataagtttagaacatatataaacacatttttttattattattattttaacaagttaagaaaataatcaagtttaatatatcataataaaaagattagaaatcaccatccatctaaaactagtctattatctacccaaaatgtacaaataactaatttatgtgtgatcatattaatagtaaaaaagtaattaatattagtgaaaaaaaagtaatagaaaataatattaattttatctcaaacttgaatactttaaaagtatactcatttgaacctgttaaattttcatcaactctgtaaaatttaatttgaatatagtaattaataaacattaaaactcgattagtaatctgtataatatttgcattgtattaaataacaatgaacattatatttaaataaaactttgtatagtataacaatattactatacataacaaaataacaatataaaacaacacacaccttataaacttgaaaaacacatggtgcttaacacccttataaaatgtaatatcattattagtgcaattcaatataattttactttaataagaaactatagagaattgttaactaatgtggtatagttcctctaaatgaaaaaatctccataagactgttcaagtattgaaaagttaattgtctccaggaagtaggctctcaaatagctaacttgtccctttagaaggagtctcgttgaatgatagttaccatctggaaagacattctcgaatgactatcatgtccactccaggtgtagtcttcaggaaagttaatcctccatcgaagaagaattttgaatggctagttgttcctcctggaaggggattctgaatagtcgactcaagttgtctcttttcctatttggaagctccttcagcatatgctgcgctcctttatccaaaaagtgtatgtctcatcgagaagcaccccatcttgtgctgacgtgaaaattttgtttcgaagaagttattaagtttgttatggcataactaatttaacaacttatcaattgcagccaccgatcttaggatttttatccttagcctatatgtaccaccaaaacttatcattttatgacacgctggattgacaagtttcgagaggaaatttcgagtttgagagagaaagagattaagaggtacagagaaaagagaacaattataaaaaacctaatcaatctcttctttttgctcaactataaagaaaatcacgtagtgcagattttttctccattctttcgatcattttgataatttggggaccatgtgtcaattatagaggttttatactttaatctaccttaattggatcatcaataatcacttcaagagttactagagtggactttgaactttcgatccaaacaaaaaaaaaaaaatactactaaagacaatccacacaataaaagataatcaatgtcactaaatttaactattctaaaaaaaacgtcataacatgaatgcgttatgaaaaagctatatcttctcacctaatatttcctcatactgcaacattatttttatttcttatcctcaatcccaaaatatattcatatcattacttaattaatatgtagaaaagaatcattcaattatattaatctatttaaataaataaataaaataattaagtaaatattgtcaactaattccaggtaaatttagatggctatacaccataatcacctactcttcttcctctacttcttcatatcata

SEQ ID NO: 23570 - DNA, 2289 bp, Cannabis sativa
aggtcctcagtcagcccgtgcggccaaccatcaacagcaagcattctttcttcacagtatgtgctacaccagcaagcaaactttaaaattactgtgtcacaccagcaaggcttggctcagcacgatgcttcaaatcacaatgtgaggcaagcaaatgggatactatggaagccactagatgtcaatattattaaaatgaatgtagatgcggtagtccacattaaagattaggtaatgggtactggagtagtggttcgaaactacaaaggggaagttattgttgcattatccaaaacagtccaaggttgttttagaagcgatgaaatagaagcaaagacactctttcatagtcttaattgggctaatcaacaacaaatcccaatcgcaaaagtgaaaacagatgcttccactttgatctcttctcatacagacttatcttattttttagatctaattgataatgttcgttatcttctatcttttttccctagagttactattactcttgctcgtaggcaagccaatagagctacccacggcttagtaaagtaggctataaagttagatgaagatatcttttcgatgaaagaaattccacattctaaaattattcaaaaaaaaaaaaaaagtttaaaacactaaaaagaataaaatataacaacaataataatgaaaaattcttaattaatacacattatttaaaaaaatatttctatatgattgtttgacacattatttactctttccaactgagaaaataaaatataaacttgatattatacaaatattacatgtaatttaaatgtagaataaaattcttgattctacataaaaaaaacatatattatatagatatataaatatatttttgattaagacttaattattcttatataaatatatatatactttttcaatagaacttaaaaaatatataactaattagaatttaaaagttacttttatttataactagtctaaatttttttgaatggagtattcttaaaagaaaaacatcctctaattttcttctttaatttcagttttaattagtattacatgtatatccatatacataaacaattgttgaaggtgaagatcactctattaatatcaatatgtttcgagtatacatcttgtttaagcaagaaattaatgtcctatcttttgattgtgttcgaagttccttaatatttactataaatacatacatatacatatacataattccatgataccaacctaaataattaaatgacaactaaaagtttaaatgtttaatattatataatgtgtaatgatgattcatgagtgtttaaagttagttataccgatctctcatagttatacatctagagagagaaaaagagattataactaacaatccctagctagctaataaatggatttatatatgtcaatatatataattatatagaatatatttaattatattattgtgtaattgttacaaaaccctaaacaataagatgaataatctcatgaaggggctgtttctacttattcacagatcatcacattatcttatttataaattgtatttcatgtaagaataatcccaatatagaggagaacatatatatatatgttatctatcaaacatttgttttcttatttctttctataatatttgataataataactaattaattaataaagtaaactttattaacagatattttttattttgttgaacacacacatatatattagcactgcaatattgcacaaatatacataatatatatactaatatatattgatgagtactattcatggttgtcaaaattcatccaaaggagaatgaactataaaaaaacgtatataattattttccattatatatggaatcccttaatactaatattaatacactttcatcagtatatacatatacacacatataatattgacagtgtagtttagttctaaattaatcattttccctacttaaaatcatatcattatattattataaataaatttcttcaaagagtttacttttcttttatttatataattaacctaatatatttttatatatatatataagaaagtagtgggctctctattttatttaaattatatacgtacacagggaaaaacataaaagcaacccctattacataatgtaagttccaacaataatataggaacaaattaactaaacaaaatataatgttaaaccaataattaaaattaatattcacacacagatcaattcaaactatacaacactctgacacaaagtacttaattcacacaca

SEQ ID NO: 23571 - DNA, 3181 bp, Cannabis sativa
gtttgattggcttacttcattttcatccattagaagattagctgtcttgagatctctgtggataatgttattctggtgcaaatagttcattcctttagagatatccattgctactttgagcagaaaaggaagcttaaattcagctttttgcttatgcaaaaaatcatataagcttcctttggacatgaactctgataacaaagcacaaaaactgtcattattagattggaaatttcttataaccacgataaaaaaaagaacaatgatttaccagtcacaatgcacaagttcggatgtcgtgtacatgctcctataaattgcacaacattcttgtgccgaattttcctaccaaagatcaaatccaaaggagcaattgtcagaaacgaaagctgattatcactatgttttattggttttctggttcaaaagatgtgcacaaacctcattatataaacttcctgtgtaaaatctcgcagcatctctgcgtttatacgctcgagtttgaggattttaacagcaacttcttgactacaatatgtgcctctgtacctaagaaagctcaacaagaaaaaaggatcagataagggactgtatgtaaccatcaagacaatgaacatgatcatagtactactacttacagatcaccatatgaacccgaaccaactttgtcctcaaccttaagcaacttggtatcaatttcccagacatctgtttcatcagttggaatgtctacagaggtaagacctggttcgattttaacttgtttatgttccctaatagaagaaaccggttggtgttttggcgaggattgatcctaaagaacatcaaagaaatattattgatgatgaacacatgaaatagtataatactaaaatgacaacaatatgaaaagttaccttgtattttgatattccctttgccaatgcagctcttagctcctcggtttcctaagatgttttcgaacattcatgcatcatcttatgttgtttcagaaaatgctaagcaatattatgattcagtaataaagcaaaattcatacctcatgaggccaaccttcaacaacaaaaacatctagagagtaaccatcacaagtcgaaaaggcgtgagcttcttgaatgttaagtccgatttcagcaagtaatgcagttaactgaaaattttattgaaaacaaatgacaaaaaaaaagtggagagaatcaagaatttatacacttgtgttatgcaagttaagttaattacctcactaaggagtttaggcttgtcaaccgttgagaaagtgatctcatgcaatgggctacaaagattggtagaaacagatttaacaagctagtaaacaacagtagaagctaaaccaaatctgttactaatcttaacccaattaaaaagtaatatcagaaaaataatgatgagtggagtaacctatggtttttataaacggttgaatgtgacaacacacattctatgtgggacactctaacaaccttatccttaactatagtaaattgcaaataggtcataattgaatagaaaccaacttggatttttgttttgatttttgggcttttgaatagaaaccaacttggaaagatacaaatactactgagtttttacagtaaatacctatgaaagacagtcctttcattcatggaagtatctccatcttcaacagcatgtgggtcatcggtgtgaattgcaagcgtttcaagattaggcgacgaaccaaaggtaggtggcaaatgaatcctggtgaatacatagttgaatgactagcagaaacattgtaaatatacaatggagagagcaaagtagtatcaacaacagttatacataatcaagccatacccttgtttgacaggatgataagaactttgtgcatcttccttaagtgaagcatctgaatgaacagaatccacagaattcccattcaatggttgatagacctaaatcaaaccaaaacaatagattacataaaaccattatatacttataagttacttcaaaaaattgtcaattactttgagttggaacccattttaactcaaatgaataatcccattttaagggtcaaaaataagagtgaatttgttttgagatgtaacaatgaatcttaacaaaaacaatcaaaacatagtcaaaaggtacctaattaagtgcatatagatatgaacgtaatgaatgataataaattagtccattcatttcaattggggaagaaaaacaacatatagaattagctcaaaaagagtaagagtaaaattggttttgagatgtaacaataaatcttaacaaaaactacatcaaatcataatcaaaaagtagctaattacctgaacaattcgaacatcaaaagcaggttgaataagagactcttctgctaatttaagcaatctcttatgagtaagaacatcttcagccctttccacattcacatccaaagcatatctaaacaaaaattaatcaatcaataaatcaaaaacatcaaaactttctaaaccccaaatgaaataaaaacaaaaacaaagaaccaaaccgagctggtaaacgattgaaatgaagccagaggtcttcatcaaagtcaggaacagaagcaagaacaggattgatctcttgaattcgacgaaggacatcgttatacatgtcaagcttctgtctttgagggtgagaagaagagaagagtggtctgctaccacagctctcagcttgttctggttctgctggttctggttcttcaatagccattgaagatgagaaaagaaggattgttatggaaaaagaagaagatgggtatgaagaagaagatctaaggagaaagaaagtgagaatcttaaaggggttctcttctcttctcttctcttcaccaacactgccacggttgagtgactcagtttcagagcctgcctgcggctttccgccaatgtttttataattaaaacagatttaatttcatagacaataaattattatataattatacatatgtatttataggtgtgtttacgtacacttgtatattattataatattatatttgtttatgataatcataattattattatcttactaaggtaatataatggattaggggttgtcatccgattcaattcaatctttttttcctcattcgatccaatctaattagtaattagatttggaaaatcatcatccgatccaatccaatta

SEQ ID NO: 23572 - DNA, 5399 bp, Cannabis sativa
atttaggtaaaattataaaactaaggtaggaaaaaaaataggggaaaatacagatttttctgccattaatggtgaatagtagaaatacagattcattcataagacattagacctcgcgctcattacaacaaatattcttaagaatagtagaaatgtcaatagaaccatataagttatgggtaaaagcccaattggccacattatgaaccataaaattacaggatctagccgaaaaacaaaataaacagaaagcaaaggaagcagcgatacttttacaaaataaagagtagtttttaatttcccatcggggatccaagtcgttgagagtgttgatcactatctttgaatcgctttccaccaggataaattggtgacctttctccttagcgacctcaagcgccaagcaaaccacaacagcttctccacacagggcactagagaagtctattttggccgtaaacacccaaattaacctgctcaggtaatctgtaacaaccactgctatgcacatatgctcccctccaaccctagcatcgcaattaattttgatccagtattgggggcgggttccaagcagcagggggtcggggaggatataggattaatggagtctctgtaatccgggggcgagttctagtcatgcgacatagttccagctcgctcctctaattctaactttgccatagttccttccatttctgattctgatgaacaggcgggtgttgctaggcaaccccacctagaaaaatgagtatgattagttggaatgctcgtggattatagaattcctgagcattccaaaatctctccctcttgatcaagcaacatcaacctcaaattctttttgtgatggacacgaagctagctgctaattctagtcatttgcttaaagctagattgtcttttgataatgtgtttgaggtccctagaaatggtttaggaggtggtttacttttcttttgaaatgatgttatgaatgggaatatcttatcttactcatttggccatattgactgtaatgtttttaagaaatctcataattattatcacctctcatgtttttatggttctccctatgttaatgaaaagtctaactcttgggttttgttggatcgcctttttgatacgcttcctttttccccatggcttattataggtgattttaataattacttgggttataatgatcgtaatactaacactttgcccctgccccacgcaatccacaattttcaacactttctttataaatacaatatgtttcctttgcattacttaggtaactgtttcacctggaaacatggcaacactttagagcgcttagattggggtattatcaatcagtcttggcttgatattttccccaatgcgactctttttcagcttcccatttatggatctgatcattgtgctcttaaactggtccacaatcctactccccatcttattcaaagtcacaaaaggttcttctttgaaaactattggattatggagttgggtttctcccaccttattaataacagttggctttctaatagggccactaataatgctccaaccaccgtcgactctttccttaataagtaagtaaactgcatttttttcatgaaatcttgggctaatgacaaagctgatcttaaaaagaaaattattgacagtctaaatgccattaatcaaatttactctcaactatccattatctctcatgacatcaagaaagctaataatcttcaatcttccattaacaccctcttgcttaaggaggaggtttattggaagcagcgctctacggttagtatgcttaaagttggtgataagagcaataaatattttcatactaaagcttcatctaagaaaagaaataacactatcaaaagtctcatccttgatgataatgtcacggtttacaaccatgctgatattaccaacaattttgtccagttctatttcgatcttttcacttccaatggggctgatttaaagtttattaacttgattctcaggggcaataccaaacgtattgatcaatgtcaatataactttcttgctaatcccttttctctcttagaagtcaaatctactctttaccaactttttgggataaggcttctggtcctgatggtattaacccaattttctatcacaagaaccagtccacttctcgtaaagacctttgttcagaagtgttgaatgtcttaaacaacggagctagcatggctttcatcaatgaaaatttcatcactcttattcccaaaaagaacaatgcggtcagggttagggattttaggcccattagcctttgttctaccatttacaaagttatggccaaatccattgctaacaggttgaaagaggttctccctgacttcatcactcataatcaaggagcgtttcttgccaatagaatcatctttgacaacattctgattgccaatgagatcattattgccatcaacaataggaaaaatggcaaagtgggtggggctgctcttaaattggatatggaaaaggcctttgacaaggtcgagtggggtttcattcatcaccttctaatttatcttggctttccaaataatataattacccttattatcaattgtatttctactgtttccatcagacattgttaacaattgtctttcccctcccattctccctactcgtggtatccggcaaggcgatcctctttcaccttatttgtttctccttgttgctgaaggtctttttgctgtcattcgttccaaatcccatgacaatcagtttagaggtatagctatatgtcacttagctccttcgattttccatcttttatttgctcacgatagtcttctttttactattgtcaataaccataattgtatttccattaaagctatgctcgacatatacaataaagctactagacaatctgtcaaccttgccaaatccactattctattttctcctaataccaagccccaagccaaggtctctttccttcaatctctccaaatagaagacaaacactttattgacaaatacttgggggttcctcaatgttttaaccgctctaaaaaatcctctcgccttttcattatttaaagagtcagcaataagctttcagcttggaaccaaaaagcgttctctagagctggtaaagacgttttacttaaaggtattatccaagctatcccttcgtatgttatgtcttgctacagaattcccctttctatttgtaaacattttgggaagctgatatccaattttcggttgggaaccttgggtaataataaacgcaaagttcattggaaaaattggccttcgatttacgaatctaaattttttgggggtctaggatttcttgacattgtccatcacaaccaggctatgcttgataaacaagcttggcaaatcttcactatccctaactcacttgtggcctacctgttaaaagcaaaagactttaggcataacgactttcttcaagcatatcttggacatgtcccatctttctcttggagaagtctcctttggagtagggaccttcttttaaaagggttaatttggaaggtggggaatggtaaatccattcaaatatcaagcccgaatcggattcctggcttcaaatctttcccattaaaaaataataatatccctcttggggatactgtttccttttttatcaaaaatcaaaatcataaggatatctcaaaacttggctcttactttgacaaggacattgtagattctttcctcaaaatcccaattactccttctatttaggaatgtctcattagggggcatagtccttcaggttctcttactgttaaatcttcatatcatttagccttttctaacaaccctaacccaagctcttcaaatcctaatgttttccaccagtggtcgaaaaatgtttggtccttaaaaatccctcccaaaataaaacacttcatttggagagcctttcataactttctcccttctaacctcaacctttattccaaaaaattcctccctgtgttttagccggcttgactccaacttgcactccttgtaaaagtgttcaagggctcgaaaatgttggaagagtatcagtttcttgaccttttacaataaaaataagcattttcacatcaaataatttcttttaagagggttagccactttttaaaaagacaaattggtagtttttcttggtattacttggagcatctggaacttttgcaacaaatctctattcgctaatgaggagactatatctttaaatatagaaccctatattttatctttttttacaggaatacatatcaacacaagacaacctctcctcccagccaattaaccaattccaagacgtggagggaactcagtcaagatctcctcctttattgcctacttcagcaacttacaagcttaatgtggattcaacaattagaagtcgaggcaacaagcatgggtatggttatgcaagactctcacaatcgaacaatagtaggtctttcccctatttttgctaaggcagaggctcttaaccgagctttgatttggtgtaaagctatccattttccaattatcttggtgattatagattgcttggacttagtatcaagaattcttaaaacaaaaaaatattactcagctctttcagatttggtttggaaaatcctcgactctttgtcacattttcctaatgtctcaatccatcacagcccaagaactcacaaccaattggctcataatctcgctcaagttgcattaggaacaaatgaagagtatatttggaacaattgtgttttaaatcttgtttaaatcccattacttggactcaattgcttcttctttgtgttacagttctgatcttctaaaaaaaaaaattatacagcaacaaatatgctatttccccatgtgtaatctttttaattcagaaacctgtaattgtatgtctaatattgtatttaactattttcaaaagtagtcatttctattcacccaaatccatctcacaaaaccagctattgtggcaaccaaaacttattttttaaactttgagatctttgatcaggagacctagtggagcaatccaggaagaggtttgttacttactctccaacccaatgattgctttagcttctctaaacatcgagagctgaaagtccattcaaaaaatagttggccaattgtttctggagcaattccacataataaactaaccaagtcaggatagagttgaagcgatgctaacttgtctatggaagttgattctctaaaccagcctacaactaacttaactaactatgacagtcagttacttcgggtattaggagttgttctttgctcctgtttttagtggtatgctaggcctataaatagctttccttttcactactttgagatagagaattgaagagagagagagagag

SEQ ID NO: 23573 - DNA, 1800 bp, Cannabis sativa
ctctgtgattgattttgataccgaggatgctatttgtactcgcactcgtgcccgttattcattaagaagtttctcacttgatgagcttgagacttttcttcaagaaacagatgatgaagatgaccttcaaaatgttgatgatgaagacgagtacaggaagtttcttgctgctgttttacaaggtggagacgttgatagccatttgactcatgaaaatgaaattgttgatgaggatgaggacaatgatgcagactttgagatagaacttgaagaagctttggagagtgaccttgatgaaaatacaaaggagaaaactgaaggggtctatgagaaaggaggacgaagaccagagactaggcagaataggcgccaaaaaagtaatgtacagtgcaagaaaaatcttgcaacaccgacaaagagaccattacgtccccttttgccaaatataccagtttcatcattctccactcaagataggaagatgccagaggcagcttcaagctgtctatcttttccagtacaagctggtcatgcaaatggattcactccacgccaaataggccaacttcattgtttaatccatgagcatgtacaactacttattcagattttttctctgtgtgttcttgattcttcccggcagcacgttgcagcccaagttcagaaaatgattgttgagatgcttcacaagcgcaatgaagtgctagcatggaaaacggaatcatatcctactacttgcttttctcctccgtacctcatttcctcagtgccatatgatggtcctaaatttttattgggcactttagaatcttcttctaatgatgttacaagctctccaaataatcgaacaacttcccaaggaatcatcctttcaagaggaaggtttgaatgtgcttctaatggtgagactggtagttctcaaaacttttgggtgccgtatataagtggtccagtagtatctgtcctggatgtagctccgcttagtattgttggaaaatttatgaatgacgtagaagcaggtatgtcatgaaggtctttagtgtgttttcatgtctttccccttccccatgcatattttgttcaggagtttaatcttttatatctttttcactggttttgaattgctttggtagctgtccatgaaaatcgacggcgacaagtggaaactagttgtgatagtcgttttgaaagagaagctctatttccacttcctgctttcccattagaaaatcaagttaattctgaattattgggtagaaccagcaccctgtctatcaatgcagtgtcatcttctcccagtcaacaaccacgcaagaagagtatggctgcgaatcttgttgaaaatacaaagaagcaatcaattgctttagttcctaaagacattgcaaagttatcacagagattcctaccgatgtttaatccagcattgtttccgcataaaccaccctctgcagctgtatcaaatcgagtgcttttcacggattcagaggatgagtaagcttcctttctttcctttgtaatgaatttcttatatttatcaagttttcttactgtttgagttgatttaacatattcccaacaaaaactcactttattgtgcaattgcctttataaaatataaagaggttcttcatttcatgacaagaatgtggaaaatattgcatgcttgtgctagagtagggttggccaaattataaatatactctagtgatgctcatcacattctttatcatttacattattattattaatttgataaacatttgagtatagttagattttctgttagggacaaatata

SEQ ID NO: 23574 - DNA, 5171 bp, Cannabis sativa
  modified_base (4615)..(4618): a, c, t, g, unknown or other
ttaaaattctgtgaaaccgtatttttgtaatttttttgtgtatttgtgaaattaacccaattatatttcaatccaaaacagttaaatataaatttattatattaaaaacatacgcaataagtattattataaaaacaacaaataagttttttttttttttggtaaggaaaaacaacacataagtttaattataagccacgtacatatgaatttttttagctaatttatatatatatatacatatatatataggatttttgttaggtgagagcaccacttttgctctcacctataagagcattttgttttggttttgattggtttaaaatgagggtgtatagaattaaaatgagctgtgaaatatgattaaaatgagactctaattgttatgctttattcaggagcaatgggaagcttgtgtatcgagtagcattgtcgacaaagtggcggctattcagggccctcttggtgtgtggggaaggagcttaactgataatttcaaggagagaattcaaagctctaaaaccagaattggtctccttaaaggccagttggatgttgattctcttactgagtataagaaggtgagacaacaacttgctgaaatttatcataaaaaagaaatcttttggaggcaaagatcgaagcaattttggcttagggagggtgaccaaaatacaagatactttcatgctgctactagctcaagaaaaaataatttcatccatgaattaaaggatgagaccggtgcttgggtccaatgggggtcaggtttgtctcaggttatgatagattatttcactgatatttttcactctatggggtcgagttgtgctgaagttcttgatgttatacaaccatccattcaataagaggacaatattactcttttacaaccagttttagaggaggaagttaggcatgctgtcttccaaatgcagacaagtcacctgggccggatggattgacgtctgctttttatcagaagtactggcatattatgggtaaagatgttgtgaagatggttcaggatttcttccaatctaagaccatgcctcggggcctaaatgctactaatctcgttctcatttcgaagaagtctccttctgttatgggtgacttgaggcctattgctctttgtaatgtatcgtataaaatcatttcgaaagtcatggctaatcggctcaaaagtttattatcgaatgtcatctcggagtttcaaagtgcgtttattcctggtaggctcattactgacaatgttcttatttcgtttgagatcttacattaccttagacgtaagcaacatgggaagaatggttgtatggctctaaaactagatatgagtaaagcatatgatagaattgaatggtctttcttacaagctattttattacggatgggttttacagaggcttgggttgatatgatcatggaatgtcttcgaactatttcatataacattgttcatggtggagaaagtttgggtcctattgtcccatctcgaggaaaccgtcagggagatccactgtcgacgtatctgtttattatttgtgtggaaggtctgtctgctcttattcggttgtaagaggagaggaagtggcttcatggttttcgggtggctaggggggctccttgtgtttcccatatgttgtttgctgatgacaactttctctattgtaaggcaatcagggaagaggctcagcgtgtccaggagtagcttaatacttttgaaagggcatcgggctagaaggtgaacctaggtaagtcttctattttcttcagttttaacaccgatgccaggactcgtgaatctattttgtctactcttcatatgagggcagcggattaccatagtttttatcttgggctgcctagtatggtgggaagaaataagagtgttaccttcgactttgtaaaagagaaggtgagaaagagaattcacaattgggatagtaagcttctgtctagagtaggtaaggaagtgcttatgaaattggttatccaatcgttactgacatgtgctatgagtgtttattttgatcccgttggaaatttgcgaagatgtggatcgacttatgggtaggttttggtggcacattaagtcttcacaaggtcaaggcattcattggaagagttgggataagctttgtctgcacaagcataaaggaggcttgggttttcgtaacctctgagattttaacttagctatgttaggcaagcaaggttggaggcttttgacgaatattagttccttagtggctccggtttttaaacccaggtatcacccccattcttcgttccttgatgttgagctaggtgctaatctaagctatgtttgacgaagtgttctagaggcaaaatttgtggttaagctgggtgcgagatggagagttggagcttgtttctctatacatgttcttaattaaccatggcttccgtgcaaggagaatccgtatgttatctctactcatgtggctcttcatgattgtagggtcaataatttattaaaagttgattctcttgaatgggatgaggaagttcttcaggatttatttgttcaaagggatgttgatttaattcatcgtattcctttgtcccctttttcggttgaggatacttggttttggatgtttaagacttatggggattattctgtcaaaagtgcttatcgcgccttgtaggtaagcaatggtaggtggaattctcaagacaattcaggtttttagagaaaattttggaacttgaaattgccacctaaggtgaagaattttctttggcggggtctcaccaattgtctccctactcttgtttctccttcggtctaaaatggttcatgtgagcggattgtatccgttgtgtaattgggaggatgagaccatttttcatctaatggtcagctgctctttcacaaagagctgcattgacagagggctgggagtttcggttggagggggagaagctgctgtttttggcagctggtttgataacttctgcaaggttcagcctgtggattgtattgagaagcttactatgattctatggggtatttggggagctcgtaatgacttggtttggagtaataaggctttgtcattggagagggtggtgaatgctgcaattacttaccttgattcttggaagaatgctcagttggaaaagagtgttgtatcgccaatttctagtctgaatacaactggttgtgagcaatggactaaatctcgttttggtgagataaaggttaattgcgatgctgttgtttttgatgatgataatagtctcggtttaggttggattgctcatgatcatgaaggattgttcatagatgctttggcggttagaacttatggtctgtctgttctgtttatggctgaagctatggctttaaaggaggctttgagttaggtgaaaggaaggtgggtggagggcggtgtgcctgctgatgtggttatggagtcggattcgctactgctggtgcaagccgtgcaacagaagaagctgatatcatctctggtggggctaattatctcggactgtattgctcttatgcaatccttttatttgtttcctatttcaattaattttgttaaacgttcctagaaccagacggctaattttttagctcgtttttctggttctattctgggctgtatttcccacgggggatgtgtccctgctggtttggaagctactttggtaactgatttgatttaataaaagtttaattttctggtttaaaaaaacagttattcacaaatcaaaataaaatcattttgctaagtttctaaaacaagtagttattattattttcttcttcttctttcatttcattatttccttaaatttagatattgtatataggaaaattttttaagtgagagcattacttatgctctcacatgtaagagcatttttttttagacttttcattggttgaatagggtagttgtatggtattaacatgtgttgttgagtagggtttgtttggcataaaaaaaaattatgttgatttcttaaatcctttttattattattcttgtttaatattcataaaaatgtaatattaagcctagatatttttaggctttgctaaacaactacatcttctcttataaatcttaaatttatttttttagttgaataaagtaatgaaattgaggagtttcttattttagaaaatctttctttcatttagtgtaaaaaaaataaagaagaagaagaagtgattaacaaatagatgagtagatacaataaatattaaacaaatggagtatattttctaatactccatatatcatttttttattaactgaatctatattcaaaatactttggataaaaaaaaaatgaatagatgttataaaaaaaatacttgtaaataagaaattgttaaaaaaatgaataaaaaattgctactcacattaaaaaaaattgttatatccattaaaagtaaaaataataagaataataattataaattaaattaaaattgttatgggcttgtttggtaggctatataaaagtcatattgtattaaataataaataatactatgtttagataaaacaatgtattatattaattgttacgacaaatttttttaatacaatgtaagttnnnntatttaatacataacaaattatctgtattaacttgtattataatatttacaaaaagatctagcgtcaaccccaatcttcgacccggatgaaaggttctagacctggacccagatcgggacccaaatcctagacttgaacatggaccccgaactggacccagacccaaatttgggacccaaaccggtctctggacccgaacaccggacccagacccaaacctggacctagacacgggacccgatacccgagacccgaacctcaacctggacccaagacctaagaccagacccggatcccaaacctggacttgaactcgaacctgaacccgaacctgaacccaaacataggaccccagacccggacccagacctcagacagggacccgaaccccgaaccctagacctcaaaccaaaacccaaaccccagacccagacccgactcgaaatcggtgttgggctcagtttattgaaaatatattctaactttacacaacctattaatgttaggatttataaaatactcaagaaatatatatattatcacaaatctaaa

SEQ ID NO: 23575 - DNA, 2809 bp, Cannabis sativa
tgataataatgtggaaatcattatgtttgttagtttctgacaacacaattttcagctggagttaatttcacttttgacattatcctttgcaacttttgtcgttgatttataaatttatattttactactgtaatggtgcaagaaaattaaggcctcgttcattgtctgtgaaaaaaatggatgggaaacacatttaagtgtaattatcacatgatcagctatcaatggttgggtgatattttagtcaaatcaaatcctattactaaaaaattgacaaattgcatgatttctgggttgtcaattttttaagcttacaagggatatgacgatgactgtaactttgaacgtttacgtaggggttattagtttagcctgtaagcttttaacttttaatcacatgacatcttttgttctatgtcaattttttttggatgaaggatgacattaggaatgagtctgcaaagtttcatttttcagagttgtcagaacatctaaattttgaaagtgggatgccaaagatgacttaaactatttctaatatgctatttacgtaaagttggttgtttgtcaaattttataagcaattttatattcaagtatcactgcaacttgtataaaatgttaattttgttattgtttatgtgctttagaataaaaggaaacgctggtcatcttgaattttattgaatcattgtctttaatcctaaagaggctatttttaattattaattaagtataagaacttttttttaaaaaaaaaaaaaaaattagtgtaagaacaatactgcatttccatctggaaaagatgaaacaagcctatttttattttgaacctgtcattattattggtttctaatacttgtttgtttaaacaggaaatttcttgcagaacttttgaacattactcgcgacaatttgtaccatccaaagcataattggacactcgtagtgcaggaacacctaaacaaaagcttgggtgaggaaggccttattaggcagtccctgttgtcgaaatcagcatcgttcatttcacatccacttcccgaatgctcttgcagaataccttctgcagagactccaaatattgttagaggcaaggatgcccgtgttttatatggtggtgaagaagagtgccctaaatggatgcagcatgatgaaaatattgtttcggaatcatttgcagaagaagagggcaaaactgatgacgatgacttactagaatatgaaagcaatctggttgaacaacctgaatcaaatagctctggcaatactaacacatctctattgtttgagcaggatgaagaaatggatccaaacgactagattggatttttcaaaatgattttcttcagcaatttcttcttgaatggtgagttatgaaatcagcgggtataatggcaaagtatatatcctttaatacaacttattttttgagtttgttatcatatccattctttgagtagattccagtccttctccggccacaattggcgaaaatatttatataccattcatttaagcagacttttgatgcttgaggatagaagaatcaggagcaaaattcgatcattatgttgatcatataggtcaagtttatacatacatgtttttggatcagctggttgtaattttgaataggctactaatgactacatgctttctttgagaatgatgttaatttgatttttcagggcgttatttcatatatttataagacaccagtcttcgttttggggtggtcaaattttgaccataaacttatttgttgtatcttaaacagttagtttggcatagctttcctttcggtatagcattgatttattaaataaaatttaagtaattttattttttatatgcattattgcaatcatgtgatgttttatttatttgtgttgcttaaattttgttctaatttgattattaagttggtattttcatgttttgtaccaattgctttttttgacatttttactagtcagtttagataacggttatggagccaaataaaagagttttatttagcctatcaggaaagataataaaggagaggagagaaaagtgagaagaatagctgaaatattgagaatagaaaagtgggaagaaaaatattgttatctaccaattttttcctcaataatttggaaagaaattgtagagagaagtctcacacaaataacatacaagtgaaaaaaattaaggtggcgtttggttggaggtaataaatagaatgaaatgaaaaataaacaactttaattcaattcttttgtttggttgtattttaaagtattggaatgatattttaatggaaggtcttttccaccattttggtagaaaatgactattccattttataaagaaaggaaagaccatttcaaattccaatgtaacaagagaaaaatttaataatttttttatcaattttttttatgcattttaaatttcattctatttttattctcattcatattcttatattttcatttctcctgaccaaacgccatctaaattatatttataataaagtattgtattaataatttacgaataatatagtaattttgcaatactaaaaaaaaaagtctttctccataccgaacaattaggattgtattttttttcttaaagtattgtgaatctatccaccaataggaattttgacattatttaatgacacgtttactatacagtattccgaatcagaataaattaatggagaaatgtaacggaataaatgaaaaataatcggaatcaatatttgtaatatgttatttactaaatttttttggaaatagaatagttgtgatttatc

SEQ ID NO: 23576 - DNA, 1330 bp, Cannabis sativa
agagagagagagatgagatgagatttaatttgatgaggagggaagggaatgaaagagtgagggatatatatagggttggaagagaaagaagagaataggagtgaggttaggagttgaagaagtaaaacgaaagaaggtccacctgagacatgtagtagatgaccacgtgttgcattgctacaaaaagcagcactcaattgttggattgccaataagtgatcaaaacgaggtgtgggtgggtctaatagggacatccgcttcttcacactctgccacgataccccccctaacctattcctctccatagtccattcctttgctttgctttccttttttcttcttttttatattctaatccttttatttaactgttttaatactttcccattacacacaaatatttaaaaggaaaaaaaaaagttagttcgttggagatggagaatcgtataatcaactacctgtatgaactaattattatttaaatatcataccattttgttattttctattggttgttattagttccttaagagcctaattaatacaattgtttgacaagatttgattagaacaatttcatgtttgaaataaaattaaaattgaaatagtatacttgctattattatgatgaaactgtatgttgttcgagtttaagtctttcttacataagtgtctaaaaataaagttaattaatagacaaattttgacatgttttgtcaaaatctagttaggctaaaaatatcatagttgaactaaatcactaataatagcaatagttgattgcttaggttattatttctagtttttttttaagaaaaataatatatatttatttaaatgttgtagtccaacattacactcatttgagaaatagtattggatatttcgaatgtggcgtaaacaaacaaattggaatgaattgaagtatccccattggccaatttcatgtcagaagaaagtaaattaataaaattaaaaaaaattaaaaaaaaaaaaaaagaagttggggttttgggtggagaagttaattggagcagaaagtacacgtcaccagtaaccccgcgttcttccctctaaaaaagaagacagtactggtcagtcagtcatcacagtaacacgtggcagtgtttgtagggctattgtcacagcaccctgaaaatctagttcactatcattggccctacacgctcctctcctctccttgtctctttccatattcttctcccccctactttttaagtaaacgttcattaatattttccaatttaaattaaacaaaatatactaaaatataaacgaaattcatgcacctttttcccctaatgaaatt

SEQ ID NO: 23577 - DNA, 1701 bp, Cannabis sativa
ggacgaagaagtagaaatgatttgggcggcttgtttagaaggttgggagaaattgaggccaatgttaaacagttagagcttaagattcaaggaagagatgaaaaagttgctagaataattaagctattgaaaaatgtcaaatttgctatatgtgtttgtgttagaatattatcttttctattgtatatgttatttagtgtttaacaaatgtagatgcacaatttaacagtttaagaaatagtgtaaattggcaatgtagctgcacaagtgtttaacaaatggagttcagtttgaatagttgtgtaaaatataggtatcactcttttctcttctctatcattccttttctgcttaaggttgtgttatgttgtgttgtgtgtagaacactcctaggtttcaccaaagtgagattgactttgatttttttcatattgacctcacattaaactcatgtatttaacttccataatttatagaagataatgaattaatcttttgattatataatgccattaatttgcactatatacatgtttatgtttacatatgctttcttaatcttcatttttgatatgaaactgaattaagaaatattaacttagtacttgtggagaaaagtataataaaatgtgcatgaattcaattattaatgatgttctttcaaaaatcatattagttgaagaagccccttgaaagtattcttgaggttgtctctacaaaattcaaatattaaagaaacaaaactgagaacaagaagttgatctgaattatactaacatgatagcttgtatggttcatttttctgcagatatgtgtggatggcaaagaagctttggttagcatttttggttgcatatttgcatgcttcgcaactacttttctttccttaaatttctgatccttatcactggcggttaatctctacttttaaggtcttgagctgataatgaagcaaagttattgaaagaagaaggaccacttgattctaccactgattaatgtgatttttattgtgcaaagttatggttcatttttcttgtttgtatacatatatataagccaattctctaactattttaactaaagtcacatcagctgaaccaactaacataacagctcggccaagttgtcatgccaatactcgaaccctataaatataagcagtttggattattattgttctaactcttttaatgttgagcagtagatggtgtaatagtagaattatgataaagaaaattcaaagttcaataagagatctcttatgcttactggttatagctcaaacaaaatagtgtgttgcatgaattgacaatccatacatagatccatatataaactgttttcattgctacatatgtgaatttatacaaattcaccaaaaaaagatccaaatttatcaaaaaagatttatatattaactattactgttccaacatatgtgaatttatacaaattcatcaaatatatcaaaatatgcataagccctgctcatattcaaaatgatgcataaaatcttgagcatccacttggctttaactactttatcttagtgttcaatctttgctagttatatgaatttgtacaaattcatcaaaagagattcaaaataatgcataatctctgtatacaaaatgatgcatacttcttgagcacccactttgccctatctattcattcttaagcacccattcatagcta

SEQ ID NO: 23578 - DNA, 2875 bp, Cannabis sativa
acctaagtaaattaagattccattcatttatattactttaaaaaacatttgtgaaaagaaaaaaaaataagagaccggatgataagcaaaagaaatatttcacatattatgaaaactacgttacaaggatacctaccctgcctatagaaacatattattcttctctttttcaagccatctttgaaataagtggctttattgttgatgtgcaagtgttgtagctggactagctagctcatcacatatatctttttcactgcacaatcaacctactcctagcatgaccatctgtaacttgaaactgtttggttatgccaagatgagccataagaagccagacatgagtgagtagctcgccacctcgccttaactgctgaacatgttggtttttctgacattggctagctgcatatgacagtatctccacccaaacattgcatatcaattcccacttctttttcttctcccattttcgatctgtttctagagtttttaggccatggacaaggcggcatgcgtcgaataacaccgacttgcatctatctcctttcacttctgatgggagaattttggtgctgactttgagtaatgcatcacaagccgtcttctcattgtttactatagattttctctcttccaaaaacttgaccgcctcagcacaagtgtcttgaaaccggatttgtccaatcccattgggcagcatgaatggccgcgtgagcagaatatacatcatatactctgataagtacttactgatctctttacaatcgttcaagccttcatccacatcagtgttgtagaacaaatttgttgcaatatgccaaagaagaatgctttcatcaaattctcccataacactccagccaagtttttcatcacattcctcatttttaagagcagtttcacctctatgatcacataattctttacaatccctaaatttatctgaggtatctctagatttcttttgaagctgcttacagatctcctctttcagctccttagtaatgctacggttcttgaaatagtacccatatactaactcatcataaaaacttatccagggtttcagatatttagcgcctatgccaggcctatatctaaggcaaaattttatgaggttgtattgtccaattttattggaccatgtcttgtttttgggtatcaacatatttggaatataggaaataggctggtacaagagatcagcaataattttcttacgcttgcttacccatagcattgtccagttagaacagagtagaacaaaaaaggtatatatctgaagaatggtggaaccagtgagcagtatgtaggtgatgatgacatgaatggtggagtgagcttccttgttagccacgacaaaggccacaaatacagaaataacacatgacaaactcaagaaatagagaaagacacctagtttagagtaaaacgtaaccactttcgtgtagaacacatcgtacatgaatccaagctcgatctcgatcaccctgaacacttcttcacatgatctgttttgaaaaaaggattggctattgacaatgttgtggatgtttaagatcaggtcagcgaaaagtggcttgaacatgttaaagaaggtgtatgcgtctaacaagcttttcgaattgggaactgtaaagtttgctggagcagaattaagatgatggcctactttaggcatgtcaattattcttcttgaagacacttgaaatccctcttctctctttaaactatactcatccatgtatctggcatactcaggacccggatcaggatcaggaaacaatgattttctaaaatattcactactggcactcatcataacccaaatcctaagtccaagcttgatgatggcagccacaagtattggaagggagagatagttgagcaaatcttcagaccaagcgttgagaaagatgtagagagagactacgaatcgtgtggagagaacaacaaagtttcgcaaccataattcggtatcttccaaggaataagctgtcattgtgtcagggccaccgaggtgaagaagaagaagagaagaccaaaaggcttttataacgtagtctgggctaggatcctctgctgcacctgcatcggttcttttggtattggaaattaaggtgagagagagtactgcaacccagtcggctgatagataggccatccatataaagcatctgactatgctactagtccaatacattcttcttcttccggctatgctcaatatggtttgaatgatgaggctaaggacaaccattgattcgatcctcctttccgcccaatgaatggtaaagctttcagaaaaaactgggggcatttctgtttttgcgcttctctacttcctcattcaattcagctgcagccacgtaaaacagagaagtaaaaaagcaacctactatattccttttcttttggaatgaatggttaagctgtttctctggttttctttttctcctcagtttctcttctctgtttttttggtggtgttcttctttttcttcgtttgctccccagttaaattgatgtaaactaaataataaagtaaaatcaaacatgttttgatgcttctctcaaaaaaaaaatgttttgatgcaaaatttggctgtggttgtggtttattattgtgttattatttagtttgctgtgaattattattgtaattgtatggggtaactttccgtaaatgccacctaggttctggttttattaagattaaataaggagaggaataaaaaaaaaagttttcaactggtagtagatagaatcttaaagctggcacagtcgaattttagtaattattcttgaatgattaaagcttgccaattaattcattctaattagtgactggatacttttttttttttttttt

SEQ ID NO: 23579 - DNA, 5219 bp, Cannabis sativa
ttttaaaaataaccataatgtaactgaatggcgatatttgcaacaacttatttagttcgaggagaatttttataacaaacaaaaaattatgggcaaaattttacaaagattataattcaagagaaaaattaaattctatttattctttttaagttttattccattttggactcggtgttatgcaaaagttactgtttggatctcctgttttgttaaatgacgaattggatcatatattttttaaaatattactaaatagttgtttttttgtcaaattaaaacttaattaataataacccgatctagagaggttatgataaaacttgttatattttttgcatacattcgtgttagagattacctctaaattatttatattaaaaaaatatcaaaatttgagtttagaatcttatttgtaacattttaagtaatacaaaatttattttgttatctaacacaacagtttttcattaatgtattattatttatatattatttttcatatattctgtaaattgtcagatatacatatgtatagatattggacacattgtcaacatcctttatatatagtagtgtatataggagtcatgttttagttcatgctctcctctttcttgttagctgactatctccctattatttaaatagctaatttgtcaaatatgctcaccaaggcacgttgaaaacgatagaagaacccttttttgttattagtaataataagaaaataaataaacagtagacccatcttttgtttactattattatttttattttcggtggtgggaggataggggaccttataattaacactagtgtctatgaccaaatcaaaaatataatacaaaaaaaaaaaaaaaaaacaaaacaaaaaaggatgccgtataagggaaattattttcctaaagtaaagatatcaatgctgttttttctaggaaaaatgatactacttacggtcaaaagttacttacgttgaaaacgataacatattattatacttaacaaacgataataaggatacaattttattgttttattttgttacttataaatgtttattttatttgcaaatgatttaatttattatatcagtcaaatgtaaattcttactttatagtgaggattgtttaacccaatttttcactccttaatcaattgaaacttttttttttttagttttgtgttgtcttaatctttggatgattaattctttttttatctcaatatttttaagtggtttatatacattgtcttaattctaacttagttggatgaatgaaatctttttccatctatattttctatgtttaaatgttgtttagccactttttactttatttttaacaaacacatgtattttaaaagccaaatagtttttccattttgaattggttttttttctgtcactttcataaatgatagatattcttctcggatgttttattcatcctatacttttattttattttctacgaaaacctaaccaaaaatttataagacatttaagaaaaagtaagatcaaaagatttcccaagtatcatcatttggatttggaaaaaagatatatatatatatatagggacatgattttgtctcgtcatgtactttcacggaatgtattccgtgttacattagatgggtctcagggtacattaaatcagagtaatacgtttctactttttaaccttaatctacatcaatctcaaccgttagatcaaataactccctcatttgacggttgccgtacatcacagaatgcattctgtgaaagtacaatcacgggccaaaatctcgtgattgtattttcacggaatgcctagtttactctcaacgaaagaacatagtacaatagttcactctcaaaatagtttcatatcctattttgaaacattagcatttttttttaacagtcagagattcaaattatcagctgttttggcatggtacgatagtttactctcaactccatcattgtgggtaaagaaagtactattatttttcactgcaaaacgaaagaacataaaaaattaaaccaacctggcaaagggcaaccaccccaaaaagcagccataccttttttttttctttctttctcctatttagtagtccaaaaaagcaggtttctctttttagtgtagcagaagaccattgaaaaaataataataatgatgaaaaggataacaaccctgcaatcttatagtaaaagaaattcccaaaaggacccacttgagctaagaccataactttgctttcaagaccatttggctatctttcctcattctagttgagccaacttcaatatctttaagccttacacccaactaactatctttatttacattttttttcttttttatatctttctctttctctctctttctctctttttcaaaatatatactgaaaaaacagataatgacattctctgatgaatgacagtgtatgtgtatatgcatcttatgaattttattattctttgtttagagtttagagatgggcaattgtgttccagttctgaggatccaagactcttcgaaatccaaatgcttgaaccacccaataatccaaacatcggtctcaatcgaatcccagcaccaaaaaccagaagaagacctctctgtgaagccccagatagctagttttccaaaacaaagtatcattctaactttttctttctttattttggcgtgtttgttaagtaatcttttctattattattattcttttttttttctttgagtgatcttgatgatgtaaatgaacatgtattactttttcaacaaaagtctgaattttggctgctttttttattattacaaaatttctgatctactgctatataaaaaataaaaataaaaaaagaagctctaataataaagtttctagagtttcaactccctgatttttgttggttcaaaatatttctgtattgcaataatcgatctataattcagtggttttttgtgctttgttgtaataaaacaggtagcacagaagagatgtattttgattctcaagcttggttagactctgattgtgaagactatttcagtgtcaatggtggtaagttagatcattttttatataagtttttcagtgccataaacacatacaattacaaatgatatgtatgtacatatatctaacagggtaaatgccattttgtatctgtattttgtaaaagttaccaattggactccctgttttgttaaatgataaaatagaccctgtattttttaaaactgtataaataggatcttaaattaattttaatctgatttaaagatgttatgacaaaactggttgcatttaataaaacaaagagtctaattagtaatttttgcaaaatataaggtccaaaatagtatttactctatctaatataattggaactttatttatgcagatattaccccaactacaagtgatactcctcaactagataaatcctttcacaaagatgaagcaaagatcaactccataccaagaacctctcaaaacaagcttttgtttgagttgtttcgtgagagttttaatagtaatgatggcagccatgattatgagaccaaaccttccaactcatccaataaaagcagctcacgtttatctgtggtaaacacaactagtagtactgttaatcacaacaatcccaaaagaagaaaaaccccacagcctgttagatgctgcatcccaaatctggtacgaagtgtaagctctaatgagagtaagaagactcttagtccaacttagaattagtggtgtggattgaaacctgacaaagtttttttttttctataaaaaagttctcaattggattattacaacgtcataagtggagttaaattggtttttcattagttattactttttttttccaggtttattgtatttatttatggatgagaaagaagtttttctaagatatgtaaatcatgaacagcagtttatactttgtgtgtgagatttaaaaagtcatacttaaaatatgattgtatatatgtgtgagtactttcctatttagacaaaatttaattcattgccttcttattaggcaggatccacaatgtatgtaatgcagttttttatatcttaataaatggtatgttgggaacaccagtttaccaatagattaggcttgaagaaaatgactattgttgggtgattacagcttacaaatgaaaagaaaataaagtcatttacagacatctttagcaataatttctctggtctcagttataattattttttggtgattacaacttccttccaagctctgctttgcttgacagaacagaagacaatgtatatgcccatgtgacaaataaagaattttattttccttttcttcatcaacttttggttaaatcaggaacaaaatttatgctcttgcgaatataacaggtttttggttcaaggaactaaaattaaataatcttttacacttacaacccaagcctctttggtcttagataggtagaagaaccctttggcaacccgggttttgacggggcttgctgctgcttagctctcttcttcatcttcttttccttgttccatctctctgcctcagcttgctccttcctcaaactctccatctcttcttccatggctgttttctcttcctattgtttcttcatatgctccaataatgacgtatcagtgttgaaatagtagctgtagaaaataaaaagaacgaatttatcgaagtaaaatctagattgaatcgcggattaagtcattctctttaagacgttcacagcactttccagaattgtgcaagcagactattagcctcgtcgtccccatgataaaacagtccagtcgaaccactgtatcagagatctattgtacgatagagagtcgtcaaaataccacacccaaatactactactcgaaatacttatataatgtaatcgtaaataaatctggaaaagttttattctgtgtgagaaaagatgtatttttcccgttggttctaatgcattatatagggaatgcacaaaaggtagaaatagcaaaccacccagccagctcagcttgatcagacaaaggtgggggcgcgtgtatggtatttaggtgagcctttgtatgacgctccctcttccacaaaagtaggtaccccttgaggcacaattgatcaattgctcatatttacactatatatacactcataaataagtgttccaagaaatgtgggactagtcctctaaggactt

SEQ ID NO: 23580 - DNA, 1994 bp, Cannabis sativa
gataagggattgcacagcttacccggtatttctccttacggatcacgggactactgactgtcatatatttagaatgtcttgctaattcatacaatgaacaattgaaggcactgttgtaactttcttgtcccaaaacattgtatttccgatgttatatattataatggagaaattagtggggccccacttaaattaaggagaaaaaaaaaaagaaagtttttccttccatttttttaaagaatacatttttctttattgactattttgtttttatttttatttttatttttttaattaaaaattgaaaaagacaaatatacccttcaaaaagctataaataaaaacacttatattttttaacaatgataatttagttaacaaaataatttagtaaacaacatataaaatattatcttcaattattttatatttttaacatattcatttttcccttattgattattttgattttaattaacaaacgtgtcattaatttaatactagttttagccatgaaattttgagtgcagattttggttactagctagtgtatagattcgataacccttcactccctataatgattaaaatccatatatatatatataatatatatatatatattatacgtactttgtttatatgatcttcttcacttcatcataaattaataataaaaagataattaaataatgaaagcaatattctacctatatttagtatatatattatataaggttcttcatgatatatccttctccactttaatataaagtcactcattttttcagtagtttccttgaatttcctttagtatatagatggtcccagcactattaatatatataacatacattacatgtctaaaatatgatagtgactacaaatataaatatgtatttgaccaaaattaatgtatggttgtcattacatataattggattcatatttatatatatatatacatctagagctacaataatcggacaatagtttttttttttttcttttactagtaattattaactataaatatatgtcattatctatttatacatccattaaagttgtaatcaaactttgctagcttatgcttaatgtacttgatcatgacttatatatatacacataaatatatgacgcgtaatatataagctatattgacacacacaaatagatacatatatatatacatattatatttatatatacaattatacatagtaactatgttatatatatatagagaaaaacaaaagagttagacacgcaaacaacttgaagccaaatcgaccaaagactttgaaacaaagacacaaatattgacttgatattaatttgccgtgtttttccataatttgtccacttctaattagcttcttttgcctataaatagatatagaactttccaatattcattcaaaaacaacaacattattcattagtgttatctaaagtctttaagtatatactagctatctagtgttatattgtcatcgattgattcatcatttgccgttatggaattccaatctttgccccaaactcaggctaagttgatcaacgagatcaaagaaacgatgttctcatcgttagacatcaatccttactccctcgtttctccttgtgcttacgacactgcatggctagccatgataccacatcctaaccaaccttcgaagcctatgttcgagggttgtttgagttgggtgcttaacaaccaaaccgaacatggcttctggggtaactgtgatgaccagagtggcatgccaaccctagagtgtctgactgccactctggcttgtgttgttgccctaagaaagtggaatgttggttcttccatgataagtaaaggtacatataattatttcgaccgtctcatgtaatgttcaacatcttattattaacattaatttttgttataataacaatactattatttttcttacatatatatgtaaatattatgcagggttggaatttattcattcatc

SEQ ID NO: 23581 - DNA, 2611 bp, Cannabis sativa
gtaactaaaagtatcaaaacctataacttagatattgtcttttctctacaaccttctcagtttgaccaagaaccatgactaatattaaagtgtgaaaaatttgacaaagttatatcttatatactaatcaaagtaggtccaatatggcaaatattaaagaagaagggtgtaccgcactgtctgtgcacacaacaatcgcatagcgtccatcccatgagctactctccacccaattgacacagttgaataaagctgcagttcccccatagcatgcattagatgagtccacaccctcaatatctgtattgccatgtgcctgctcgtttagcatgagaaaacagcttttagtaaagggcccaaagaacaggaagaaaggtgaaatgttctacagaactgagaacaatgccaagtgcagaaaccaactgaaaaagactactatacctagaaaattgcaaagcaatcttaaattagtgaaagataaaatagccaggattttcagatagggatcagtggcctaaaacacccaatttagttagagctacttaagcccttgagccactcacactagctgataaacatatctcttttatttgataagaagttgataaactagattgttacaaggcagttgagtttctgaaagtacaattgagtaaaaagaacctttgaaccaacaactttcatttcagaaaagaaaatattaaaaaattcacacttttacatgtgttcaaatgctatagcatgccttccaaattataaatcttagggccacaaacctaagaatatcatttccacccaaaagggaagaaaaataatttattttgaaagaatacctcaaagatttgcatcaggaacgttttaatcgatttgctcttgtctatcacagtttcactgccaacttccaaccgaccaatttgttttgggtcaatttcatacttgtcaagtaggctctcaaccactgtcaaactgagaagacaaattcaaaacgttaataataaatacaacagcacaaatttattcgcatgtaggtgtgcccataaaggggactgatgcacacaataaaaaagttcggtgcttgatctgaataaaggagtatcagttctctctcctattctcaagacaaccggacaccgttgactgctcatacaaaaacatactcctacctcattgagatgacatcttcaacttcagaacaaaaggccatgcaatcttgtccgagaccaatagtgtatttccctttgcttgctccatcatgagcctccaatgcttcctttttagcaaaaagcaagaaaacgataatgaaaatccgttcaacaatcaaatactttggtttatcagatagtccaccatccacacatttggtaattcaaagaacctaacatttcctttaaaaaaaaaataataaaaaaaaaaatagagaggataatcatgaatctaagcttcgcattctctgcttaaataataaatcaaggatttattcgaaagcaaaatgattatggtcgaaataaaccataattattaatactccaaaaaaatttattttcaaaaaatgaaattgaatctattaatcataataaaataaacaaaataaagcatccctactacctagtactaatagaatctcacggcaatttcagatctaatagtaacaactaacagaaaagaaaagtacaacgacaaaaacttcaattatcatttagaaccaaaatatttttacacaaaaaatacaaaattatcactagaagctcaatttcaagtttcaagtaatacataacccgagctatttctgtctcctatcctacaatatcaaatatgcacgcacacacacacatatacatatacgaatcttcgtagcgaaaaatgaatcaaagttccatattttccgtcagtaactaaagaggaagattcaaatctttaacaaaaacatatatgtacgtataagtagattgatcacctgttgaacgcagctaggggggaagtaaatgtccatagcgagaattccaacattcttggccattttctcttttctccttgtcactcaaagatccaaatacggtatcgacgcagaggcaggagctctcgtcttgctcaaagtattagagagagaaagagagagaagaaaatgattgttagagagagagagagagtgctgcaaaatcgcagaagaagtgggcagatgatcacatgttggggtgggtacactcgctatatatagaagagagtttagagagagaaagtgactattttagagagagaagcgagcgagcgcgagctctctcacactctggcacccaaatgcagacttcgtgaacttcgtggcacaacaagccaacgaaataagacgttttcccaactttgaccgctactttcattatatttaccttcttgccattatgtttaataaaaaaagacaatttctattaattaaagtgagttaattacatctttcaaaatagaaacttacaactcttttatatcattaagaataattttatctatgctagataatttttttttatacaagattaagttcacttttgaaattttttatttatttatttttttgaaaaaattcatcatctttattaattgcaatctatagtgattacat

SEQ ID NO: 23582 - DNA, 4205 bp, Cannabis sativa
atatcttcgtcaaaataccataaaaattgccacatttccacaagaaaaagaagatatctaatgcgatatcgacacatgctggactgttattaatttgaacaagttaactccaatcaaagatgtcaagctgcataaactcgccctggttaagtatcattgagtttatctaatcgactggagtgttaaaaatcaaaccctattaacacccactttaacgctttgagttttgggaatattcgttttgattctaaatttgttaccatgtgaccataataagctctattaatatatccatgaagtaataaaaacttatagattatgaaatgtagttaaatatagttctccttggataacatacttgaggatgatctgcgttgaagggtgggatgccaacaagcaactcaaaaagaataacacctacagaccaccaatctgcagttgcacctgtacaacaataataagagaacccgttaataataaaactaaaaattttcttctatactttcaacataatcataatcattatttaacttaatatctaatccaacatattttaatttgtggtttttagacactctaagaggcctaatagggagattcatatttatatatacaataatacaagtcatttgatatctataactaaccatgtcccatgccaagaagtatctctggtgccaaataatcaggggtgccaactaccgagtgcttttgacgctcttctctcttagatgtatgctgtgcttttgtttcttcttctccaagaaaaccattttcacttactgatgaagtagtcaagtcgtctgtgctgttaattagaccaaccttggagagcccgaaatctgtcaactgtagaaattaaacatcactcataagtgatctcttcgtgaaacaacattgaaaaagttgggggaaagagatcatatatgaaaataagttaaaccacattttagtacatggttcacttggtcttcaacaataataaacaagtaccaaaatatttaagcaccaagcacattacatagccagaatatttaaattagtgctgcaattattataattaaatcagttccaaattgatgaaaatatattaaccttaatgtgaccatcttgaccaatcaacaaattatctggcttcaaatctctgtgaacgacatttaacgagtgaagatattccaaagcaagaacctagaaaaaacaaattagaagaaagaaaaaaaaaatctggttatttccaagcaaaacacatgctatgaactaaaggaaaaaaaaaaatacagtttgaacataaacaaggaaggtaacaaaaatgtcaaatatattagataattcttacaacttctgcaatatacacacgagccatatcttcatctaagcagcttagatttcttagcaaagagtaaagatctcccccatttaagtactccataaccaaatagagattttccctgcatgtaaaggagtagaaaaagcgaacctgttcatcataagattgcgtacatattagattcataagcattacattttgaatgatactcaatatacttcgtaagacttgcttaccacaaaaggatttcgaagtgatataagaatgttacgctctgctaaaatactttcaactgcatttttacgaatcatgtcagccttctttagcacctgtacaaatattccaattaatgatcagtaatagatgccaattttgaatcttcatataccagaaagcctaaagataaccaaatagaaatcaaggtaaaaataatcataatttcaaatagttttgaatattcatagatgatctgtgtgataatgagagcagtattgtattgaacattaatattcgtgacaattattttgtcatgattttacctttatagcaaataagtcaccagttgctctttttctagctaagaagactcgtccaaatgctcccctgcttattggctttattatctcaaaatcttctatagatgttcggtccttgcaacatgcattgatagggctggcacgaagactacggactgtatcttcttctactgaactctcatcatcggccatgccatttgatgaatccactttttcatcttctatttgcccacacagacttacatatttttccctgcatattgaattcataaaacataattagagataattatgcttatgagattaaacaaacaagatattaatgagaaccaaaggatgttgttggcttatgcatatgtattatataaagctatttgactcactgcagtaatttctcaatgcgtcttccaaaagtctctatgactagagcatccatcttcctatcctggatgacgtactttaggtattctagccgttcaagcatatattgcaatgcactatactcgcagttgtttatatttgcaacagaacgagcaatgtccagtagcttaaaaatctgtcattgcataatttagctaagcaaattaaaagaaaaactctcaaacagttgcaacatcagtagctacatattaaaacattgaaataattggcaaaatgatctcattttgtactttgtcttagtttatatcattctttgcaaaatggtagttgtctaaacttttcgaccattatacaagttgtctgctagtacatattattggcagatctagatcataatatgttcagaggaatatcttctcaatcccaaacaccacaaagccaatattgatgcatttggcacaaatgaatcttctggttgtcataaaataaaatagtaaaaagacatacaagaccattacaaaaacaataatcatggtaccaaacttcacaatactaaacaatgtgggagaatgacagcaaacctgttgagtgctctcaagttctgacattattttccttccattcaacagtaactcaacttggctggttcgcggtgttaataagggtgaccgtggagttaagcttcctgcagatgatgattttgtagtagcaggatcagatgtcagcccagaacgcatttcacatgatatctcaggcaaaacactcagatcatctaagacaaaagcactgtcagcatcaggaacgctatcaatcgtgtctgctgagcatctacgagacaaggtgttcttcataggggaagacaactcctccatctcttcatgtgtacttgaggttgatactctatgaccctcaaaactttctcctggagcatcaccactttttggtgtgcttttgggtgtgcatgaagattctattattttctcaagagtttcagccaccctctcaagacgttcattcacagtcaagcctttgagatcacacctatcagcaatcgtgcatattttagagtgttcctctacatgagcagttggtatttcaacctcacaaattcgacaaatcatcaagttatcatcactaacatgctggtgattatcaccaaagaatccccagcttagtctttgaacaccagtacgtactgcttgtgaatggtcaggatgacatgatgatgaagaatccaaagaagcaacatggtattcagccctggttttactatcatctttgggatgcagaggatctaatttttcctctgaggctgtatcagaagcacttgtttctttacgctttttatcccaagcagatggaagtttcctccaagatgacatcctataagtacgtgatataacacttttggttattacaccatctgggcaatcacctctgttccctttttcatgagcacgtgactttttcgtatgcttctcactagaaacatcctgcggtatagaatcaatcaattgctctggataaactccaagatcactgagctggtgaagacccataattctatcttcctcaaaaccactctctttttggaattgtacaagccttgtgcaacgagtgaggatgaacaaaaggcgggtataagcttgtttaagtattcccacaggtaattcttgacgccgatcgtccaagttctgaacaatgctttcacattgttcccaaaattcatctgatgacatcctcgcacatgttcgggtatcaactaataaatcctccaaaggctctctcatttcaggtggaacttcagatggcttctcaagtatatttaccacctcacccgcaaatgcacttaaatcaaagttaacctcttccttcaatttaacaaattttgacttgattgcgatcattatttcctgtaacattgaatttatcaaaaccataatttgtaaagaataaaaaaa

SEQ ID NO: 23583 - DNA, 1174 bp, Cannabis sativa
gaagaagaagaagtacatttataagatgtaattgtaatgtgaacaaggcaaccacttgaattaattaaatacaacatatattgatgaagtgaatgccaagcaatgcaattaaagtgaaaaatagattttaaaaaaaagattattctcacctaaatttgatgaagattttgatcataatttaatcaactaattattataccttaaattatctatgttgggaaagctacccaaatgacttgttgtgaattacttagtacaaggacaatagatcattctggttaactaatctaaagacattttgaacaacaaattatatttgcaatgagctaaaagtcaaatgtatcatattcataattcttagcttgattatggtaaactaaccataacatctattttgatataaataaaaaagaatagatacttgtacaattcatatatatactttaagaattatttttattttagaaattttaaatgttgtgtttagcaccatataaaaatattgtattattattgatagaattaagtattatctctcacataattacatttaatttaataattattatgaaatattaattatttacaaaatgctatatataaataaatgtctaatattaataaaaatatatattttttttaaagatgcttgttgggttttaatttttcttttacaagtaattagaatttttgaggtggtggtgaatagagtcacatttgtttatacatggtttgacttttcaatggatggagattagtactaattgatgaagtcaaagataccttgatgcaaaatgaatagtatgcaataaaaagagtatatttgttaattgaaagaatttgcaaaaacaaaataatattaatcaaaaggctaaattccataaaggcaatatttaagaaaaacaaaaacaaaaataagaaaataataaaaaaataagataagataagaaaaatctattgatcccatctcaaattcaaccttttcaatagatttcctttttttttttttttttgaaagagaattagacttttcaataagtacatccatgttagctttgacattaccatcaagggagaggaccatcaagacataggaaaagtggatgccactacattgcccatattggagtgattctacacatcatgaaagaagtgttttgctatattttttttt

SEQ ID NO: 23584 - DNA, 2831 bp, Cannabis sativa
actgtctcaagatttgaaaatggctgcaagatgggtgacatagtcttatgcatgttgatattttatgagcatatcgtcaacatatacttccatcgtctcacctatcaaatccacaaacatcatgttaaccaacctttgatacattgcatctgcgttaatatctccctcctcgtggtgtctccagagatctagacctggtatagacactaggagaatgactttctgaggatgaagaataagatacagcttcatttacctcattacgcggttgggccctactttgaggattgtgttgctcaggatccacttcttgcggcaccttgcagttagcatcttttgggacttgttccctttgcataggctagttcaagtcgtgtccctcctgtccagttcggtgttctccatgagaatgataattagttcgccgcctagtgtttgttacctacaggttatccaaacacgtgtttggtactcgaggaggacgtcgggccctaacctttccattgacctaagcctacaaagcctgcatttgctcttgtagggttgtatactaggccatggtcagttgaatgattccttctgacaccacagctggtgtgataggcaggaatcgtcccacggtggctgccggtgtcgatgtttctccaacataatttgtggtttcaggaaataagttgaggggagtaactgtaacaccctgactattttaggcatgttaacgtgatttttaacttactgtgcatctcgttgctaattaaagagattatccaaaatcgtgattaattaacttaaaatagaagttcaggcttcaaagttaacccaggctaacacagccagagtattcagggtacttaaattagttgattgagttcaattaaagaattaagtttgaaaaaccctgaaaaaaagtgataaatgacaaaaaaaaaaagttcacatcccaaataattaattaggtcaggttaattagttaattgaggttccaaagaaacctttatgtaagaacattctcacaagaaaaatatttaagtctaagcatttaatcaaaaaactaaacgttcaggcctttggaacaagaacgtcacaaggctagaatcattaaacttaaccaattctatgatataaaacgtaaatataaaaggaattaataagatggtaccaagtacttaaaaaccctggggcaagggtataaaatattatttctgcacacgtcaaaagagggacccttgtcccttaaaaagaaaaataaagagtaaaaataaagataatgttatttgagatagataagaataatcaaggctgagcgagattattcaataattgcatatcttgtgtttgagcattagatggggcctcgaggatcgcagacttaacagggataggaacttcagaagcgagaagagcagagtcatccaccttatcaccaataggaatggtagtttcatgattgaccgctcaagattccttaggtgcgttattagctttgtctgcctcccccagtaccagaatctttggcaaaagctctttcttgtcttcatcattgaggagatcaattaccgatttgttatgttgctaaagaatatacatttaaaagacgaaggcctattccaaagccttgtcatgctgagttccctactcctgaagatgtccctttaaattttagctttcaccctccactttggtgattcttttttgggattccacgagagccttcataaatgcaaccaatttactctcaccctgctcagcactcttaatagcctctgcctcagctgcctctaccttctacagcatgtcaagattatgcttcaccttcttctctagaattgtctcattgaaaaatttgtcttcaataattttagccttcttatcgtactctcaagataaggtggtaatcctttactcttcctcttgaacattatctaggcctacttcaggttggcttccaaatctttgatttgtaaaagagccttagagtgcaagtctttatacctatttccaagatccctttccattttagttgccttcctttcacgggctagagtcttgtccaaagagttagatgcctttttctttatggtagcctccatcttagtattagcttcagctaaatccctgtctgcttcttgtcttctcatcacagcattggcatgctccacccttaacacctccaggtcataagcaagttgaatgaccagggagcagttcctctttgcgattttgtgcagcgactttacctgtaaggctttggactacttttggtttggtcggagattgcatctccgccaaagcttttatttttgcaggattggcatcgattcctcgctgattcaccataaaactgaggaattttcctgaacccactccaaagacacatttgagggggttgagtcgcattttatactgtctcaagattcgaatatttctgcaagatgggtgacatagtcttatgcatgttgatatttacgagcatattgtcaacatatacttccatcatctcacctatcgaatccacgaacatcacgttaaccagcctttgatatgttgcacctgcatcaatcaaacaaaagggtatcaccttataacagtacaaacctcgatctataatgaaggaagtatgctcctggtctggttcatacatcggattctggttgtatcccgagtatgcattcatgaagctaagaagctcatgacttgcggtagcatcaacaatttggtcaatgcttcgtaaaggaaaactatccttaggacagactttgcttaaatcagtgaaatcgatgcatgtgcgccatgagtcattaggctttggcacaagtacgggatttgctaac

SEQ ID NO: 23585 - DNA, 2987 bp, Cannabis sativa
  modified_base (2303)..(2308): a, c, t, g, unknown or other
aaaattaattcaattaagttcattgtaatttcaaaatgataacttacaggatgtggcatttgcgaacactcaaattttgataagaaagcagttccgaatgttgtaaggccactgaagggcatatcagcttggacagcaacagtgttgccagggatactcctctcatcaggcccagactgtgaacaaccataagaatacagcagagaatcgataaataaaaatatgcactaaagatggaaaatgaaaaaaaaaaaaaatattcacatctgattagcctctgtaacaatcatttaaacaagcaagaacatcaggaggtggttaaacgttccattaccataacaacaacaaatctgtcagttgtgggttctggtccaatgtgagcacctgttaatatcataaaaaacatagtagaattgtattcagtacatgcagacacaagctcaaccagaactccaaagaagatagtcagagagatagctgttaaggtaacgtgcctgggtaactgcctcttagtaaatgcttgatgaaagttgttttcccagtggagtattgacccaaaagcataaccatgggtttagcatcaaaatcactattagtctggaaaatatgaggtgctattagcacatgaattagaaacaataaagtaaaattgaaaaagaagaataggggcctaaaagtatacaaaagaatcttaacaagtgcacataaatacttactaatgaaggggatacaaagtcattaaaccggtatgcgtcttcaagtggcttcagcttcttgagatatagtcgcttcaagccatcaacaattgaagttacagaggaaagagacacctgataatatatataatatataatagattggcaacaataataagaagaaagataaggagattaaaacaacataaagtacttttgatatgtaaagtaaagagaaaacagttgtacaaatcacatgaataactttacatatggtgtataaaaccagacaaacaaattttgtgaaaatttaacttgagttatgacctataagagcattgaattgataggtgtaagcatgtaaactgaaattgccaccaaaacaataaggcacccattttaaagaaatcaacaatttccctaacaaagttctagtagaaggcacaaaatgcacttgctcaaaactgtaggacaaaggcccacctttttcgatgattttgaagaaaaccactgcgatgaaggtgaatgttgcactatagaaccacctgcatcacccacagcaattagttaatttacaaataaaacataaagtaatgataaccaagcgaaaagtgtgatcaagttattaccatttaaatcaagctcactgatcttctgtggactctttttcttctgaaatatattaaagtaaaatcaagcttaatagaacacagacaaacaatttgacatatctttcatagaaaaaaaaaagtagagggggatccaaagtcaaggaaatgatgaaaaaagtaaagccaaataattaccgaaagtaattcagccaaaccctccataacagggggatccaaagtctcaaagtcaactgcaatacaagaaacccaaatgagttgaaagaacatatatataccgctcaattcacttaaaaagacagtgacaacaaaccacctttaggaaaacttaccgttgctattcaataaatcatgtgttatttcaagtccagtttgcgccaaagaaaccagctacaaacaaaagaatagtaacaactcagagatgtcatttcaaggaaacacattcatgaattcattttcgaaaagaaaatactccacaaacacaaaataaaacacctgcatcgcagcaacaaattctccaaaaccaagatacccttgtctcttcgaatctgcaaccgcccaaacctaatagataaaaagaaaagtgtggtcaataatgtaacgagataatactaaaacaccaaataaagactacatgaacaaaccaagctatttctccattattggtttgaaataattatctcaacccaataatacaaataacagaaagccataacaataggacatgaaatttgctttttttcaattagtaacaccatggtatcaacgatcattccattggaagtttaattacccggaaaaagaaacaaccattctaaaagcagtataatcattatttaatttattatgttaattcggctaaaatgcttacctgaataataaaaatgatatccttttaaaaaaaagtaaatatatatgtaaacaataaaaatgataactaagaataaccaaattcgttaagcaaaaaaaaaaaaaaaannnnnngaagaagaagaagaagaagaaccaaattcatattaaatgtcaaaaactttaaaacacgaacaacccaaaaaagtcctctgaaaaagaaaatgaaaaacctgcttgagatcttgccgagacaaattcgacaaagcgaagaactttaaagcatcattgccagtaatgcggccatcaccatctgaaaaaaacaaaagtttaaatttgaattgaactggggtcatcgaattagagaaataatcgtagaatgtacctgaatctgcgtaaagaaaccattcatgataaatcctttgatgctctttagagcaagaaaagattggagaagaagcaatctccatggtgaaaagaaaaacgagtggtttttcctactgagagagaaatatatcgaatttaaatataaaatgtaacgaatttcatataatcagttcaaatatctgttaaatcttctcatttttctatttttgaaaaaaaaaaaaaacgaaacaaaattatgaatttgaatgggaaagtgatttctttgtacagagactagaaaggaatcttcctaaaaaagcggtggaaattatttagttcatttatactaaaactaactttgttttattttattttatcctcttttttaatttttcattacgattatttatcattatttttttctagattttagttatggaaaataaaa

SEQ ID NO: 23586 - DNA, 2392 bp, Cannabis sativa
  modified_base (2333)..(2361): a, c, t, g, unknown or other
atacaatattatgaaaatgattaggaaagattagaatttagtcaagatatccactaagtttgtcttggaggagatatggttcattttgagagttccattttttatcttctctcgaactatgtggtaatctatttccacatgctagattctttcatgataaatgagattttcaacaatgtggattgcggcactattttcacagtaaagtttggactagagagtgatggaaacattgaagtctctcaggatggagattagccaagtgacttcacaagttgcattattggtcgtagaccgatactctgctttagcggatgaccttgaaacaattggctatttctttgattttcataataagagagactgtcctaagaatatacagtattccaagatggatctttgactgtcaaggcaagctgtaccccaatgcaacatcatcaaaagcttggagctgcaggggttatggagttgctgcataaaaaaacaatccttgttcatgggagcctttgaaatagtttagaattctaattccagcttgttaatgtggttgtaaaggagcctgaagatactgattgagctttttaacaacatagctaatgtcaagtctagttattgtgagataggtcaactttccaatgagactcccgtagaaagtgcgattagacatcaagtcacctgagtcattattgagcttgaagtttggctccattgttgtggacacatgtttggaaccaagacatcctgcatcttgtagtaactggattgtgaaaggtcattgtgtgacggatatgcctttgtcacgacgagaaatttcaagtccttaaaagacatgcaaactaccaagatcattaagtttaaactgagcatcaagagtttgtatgaaattgatgagtgcagtagtgttgttagttgtaattattatgtcatcaacataaatgacgagagctaggaagatacctcgtgtatgatgagtgaatgataattttgagattggtggaaaccttgtttgagaagagtggagctaagcttagcataccactatcttgatgcttgtttttaactatacaagcttttatttaatttgcataaatcattttgtggcatgactccttttggagtgtaatcttgaggtagtttgatgtaaacattctcattgcgagatcaccatggtggaatgcatactttatgtgcatgtggtgtaaatgccaatttttaatggcagcaagagcaaacaattaatgtgatgaatgtagcaactagagcataagtatcaaagaaattgataccttatttttgaaaaacttgagtcaaataccattaaatttttaaaatggcaaaaaattgttatctattctcaattttgaaaacacacaattcagccaaacaacctctaaggatttatattaattttgctcctaggaatttgataaatatgctagtagcgtgggaatttcaaggcataatattgttagaaaattcctcaaattggggttactaagagaatgaatatagctcttttagaaagtgtgaaatgcattttaaagggtgtcgacctaaggagcatgttttggggagaagttctcacaataaccaaatacttgataaatagatgtccctcagtatcattgaatttcaaaactcctcaagaagtttggaatggtaagaaacctatttattaacacttaaaagtgtttggatgcacaacatatgcacacataagaccagatattctcgggcctaaagctatgaaaagcatgttcattggatacaccaatggagttaaatggtacaagttgtggttcttggaagaaggtttcaagaagtgcatcattaacttatatgtgcttttcagagaagaagaaattccaattaaaataagtaaaggtgctgccaacagtgtgaatgaaaccagaacacagctagaagttcacaaaggtgcaaatgttcaacgacaaattaatacaactggtcaaattgaacacattcaacaagatgagacaacgagtgggttgagtgattaccagttagcaagggacaaaaacagaagggagatcaaggcctaaaaaagtctaggctatgcaaatttattacatatgccctatgtgttgcaaaataagaaatcagttcagatcccattactgtccaagaggctctgagcaaatttgaagagaaagcctggaaataggctaaggatgatgaaatggagtcattaaagaaaagcaaagcatggattttagttaaccgacctagaaaaagacaagacttgtaggatacaaatagatcttaaaattgaaggaaggaatgtaagaagttgatgttggaaatattttacnnnnnnnnnnnnnnnnnnnnnnnnnnnnnttattaacatcctaaataagaactttctaaa

SEQ ID NO: 23587 - DNA, 5502 bp, Cannabis sativa
  modified_base (2806)..(2817): a, c, t, g, unknown or other
  modified_base (3709)..(3709): a, c, t, g, unknown or other
ctctctctctctctctctcccttcgagcctagcaagaaacttgggattttagagtgcctagcaagaaacttgggattttagagtgattttgaggaggtgttagctaaatccaagtggcgtaaattaaaggtaaccctagagctttaatctttgtgtagcttaaagctttaattttgatttgattatgcaattttgagatgtagtggttgctagggttataatggtttatggttcagtttctaggttcatttgaagttgaaattgagttcttgtagttggttttaatgtgttgtatggtgaatgaacagtttgagtttaactcaaacttgggtcattaatggcatgtttggattttgtgtgtttttcttgcttctattgcttgaaaattgttgtttgaggttgttacaggtgttttggaaggtttggcttggtttggacacgaattttacaagtttcgacttgtttgggttacctggtgcaaaccgattaaccagttttacaagacctgtaaaatcggttaatcggatcgagagcaggtttcccgaattgtttgatttgttgatccgtgttattttaaagccttagttagttaattccttgatacatagggtattggcatattagttaccaatagaagaatccttagttgggagtttgggtttcccggattagggttttggcgtgttatttacctgtttatgtaaatgtgactaaggcatccatccagcacgaggtttttcattcaggtcggccaactcacttgaattcggaaacgaggtaagaatagcatagaacatgttatatatgcgattatgtgtatgtgtaatatatgcatggtgtgtatgtgatttgcgtaaagttatgaattgatatcacagcggtacaaccatcgtgttgggtcagcagtgcgagcatagtactcggtttgagtgaagtctgattctagaaaatattaattgttgctatcatagcggtacgagcatagtaccaggtcggcagtactagcatagtattgattaagaggatattatggccaattatacttttaggtattatcaatgctatcatagtcgtacgaacataatatcgagcccgttgtgcaatcatagcactagtagtggctgatatcatggtagataataccaaatgtaaagaacgttcttacttgtctaataagtcttgtggatgggtgtatgagcgcctagatacaagccggtaatatattatttgttatatcttttttttactgagtatgttgactcacagttgttactttcatgtgtaggtaaaagaaagacggaggttgaacacgagtgaactccgagcttgggtggtgattgtacatgtcgagatggcgcgacctggagtgttctgtctagtgacatcttgggcagtattttgtagtcgatgtgcgacatgtttgcaaaaatattttgataacatttgtacaaagtttaaatacgggataccggcttatgtaaatatatatatttacaaagtttaataattttaatcaaagttttaatttggcatgattttcgaggaaaactctttggtcagcaaaggtggcacgatagttagaaaatcactgtagcgcgcctaagtatcagggcgttacatttcttaccccaagtttcgattcaggtatgttggtcgacctgcttggaataggatcgatgatcccaggccctatgtcataacaataataaactaataagtatttatcttaaaacattgtttaacagttgcaaaggacaacctagggtttcctaccaaaccccgtagttcatatacactaaaataaaatttatattttggctctaaaacatacaccatatggtagactcatcgcaagcttggaaacggtttatagaacgtccaaaatgaacacccgggtgaaaagttatgacaaaaatacgattctagatctcactggaatttccagaaatggcatgtcgttttggcaaaaacggcatttttgggcacgaaaaactcaaattttgcactcaccgaaatacccccgtatccaaattattacaaacttcatagaacatatatataccatatatatacaacaatccttacgtaacagaaattaaaatcgagcccttaaacggaaaacgctattaaagctcggacttaagctttaaaaagttccaaactcaatttctaactcaaaatctcctcaaatttaacaagaaacatcagaactagtcccatgactactcgagaacaattctataatgtcagaacctccataactattctaatttgtaaaactcctctacaaaaccaaatgttttaaacttaaaatggaataaaaccttaccttaagcttttttctctctagggattgttgttctgctactaccggagcttaaatcgcttggtttcagattgaaatttcaaaaaaaaaatggataggggaagataagagtttcgtcggaggacgaggatttcgttttgtttcgtatgtttagtttttaaacttataacttatatataatattaacgtttttttaatatataatataataatatattattaataataatagtaacagtaaatataataatatattaataataacttttaattaatgattatcttatcgtttcttagttactaagaaatttatatttttatcaattaaacctgttatgatatttctgtcatccgatcaagttttcaaggtcaccaaacctaaaaatatttttattccacatatagcccgtattacattcacacgtactatatcaatctccgtaatttataaattatgcttatttatccacttatagcaannnnnnnnnnnntgttgaactagattagtaggatcataatctcactaattatttaagtaacccataatataattataaaccctaactatttaccattagacttatcatgatattacaaaaactaagttattaggttatcaaaataagagcctataattatctatttatatgatgtctattagggttaggttagaatttaaatatggaataaaaaagataaaatggctttaaattgaaccctacggctgaacttcctttgtgggccctatgagtttcaattttgtcactttattaaaaacttatcttttttttctcaaataccttattttaattctaactctataaatactaactttaactatttaataattataattaattattaaatatagttttcattttacttatttattaattagacatttcaaagtttcttaattaataaacaaactttaaaatttcttttcttctcaattaagtcattgtttagtgaaaattcataaatacaacatagtctaattaagaattctaattgattaattaaaaccaattaactgagtctacaaaccaatattatctcaactagtgcatagaccatgggcctatataatcaagctctcaattagtagttctagaatttaccaaataaattctctattttattaattcttcctaactccactatagattcaaaattgcactcctgattatatagaatgctctatatatcctaaatatagatacgctattaattatctattgtttcaatctaaataatcaatgatcctctattgatgatctacatcaagtagggacatttttaccgttctgcccttcaatgtattttatccttaaaacacttagctacttttaatgacattataataaactaatataattactnaaatgagtactccaccatttaatctcgtttatagccaacaagctcctcgaagaaggagatcatcattatttcacttctatatatttatagaagctataaattctgtatctatgattagcgctctcactcaattgtactaccatgttcttaagatgtaactattgggtcgatccacttggttgactttaacgaacaagtcaaagaacataaataatatacttgaaccagaacctaaccatctcgggattgagatcattgatctaagatcaactaagtgatatttacttaaaagacattacggtaagtttatggtatcttttccatgtgaatattagtctggttcgatgtataacaatacatatccaagacaagctgactttaccaatgcaaatcatgtgtactggtaaatcatgggactaatagtttaatcacataatcttgataaattttcactatgtaaacaacacaataatcatgaataagaataacaacgtgataagaatttaaaagaatctatatatcatacgaatgactatgaaacaaacatatgaaccaagtattatattaaacaattaataaaataattctgttcttttattgataaatgaaattcatgataacattgatatagggttttagttagggcacaaaacccaacatctctttcatgacagagtactcatgatcttttcccagacacagtcagattgtgccacaagcttgacgattgacataattccaatcttcgttagaataatcttttggtctggactccaaagtaatattagatccttctcaaaacaataatctgatacttcacattgccacatgccaaagttattggtgtcatcaaatttctccacctcaaactttacatttgataatatggttatcctcatagaatctcttgactcaccagaactttttacgtcaacttgtgcatctttttttagtttctttgtcgttagccataagtgcaaacagataacaaaacttttacgcttataacttaaaacaacatttttcaaaattaataaataccttattttgaaaaacgggtgtcctggttgagttcaaaatggtccaattagttaggagtaagtttgactcggttgaaaacgagtgaaaaattggctgagtcggtccaaaaatcattgtttgactaagtcaactcggttactggtagcaacaatctagcagctactaccagtgcaccagacatccaattgaggcgattcttgcaacgttgaattcgtctcgtcaactattttgatttcatatataatatcgctatatttagctctgataccaatttattgtgcgcagaaataataaatcgcaaaaaaacaacggtgttttatatatcaaataaaaaaaataataaatacatagaattgcatagtttggcaattcgccaactccacatgagacagttgatatgattcaactaagtaagaaatatacagaatacaaatacagatattctactaataatatccctctaagtgtttcccaatgtgtggctatacaaataatatctctcaaatttcccaataaacttgattgcaccaagttgctaatgcttttcaaagagttccatatttacagaaggaaaaccttacctcccaaccatatgtaataataagaggtaatttatctcccaaccatatataattaatgagatatagctcatcttcaaaccatatataataaatgagagtattagtcaatagctattgcataacttcatagacaaatgtggcaaataataagttctaaatttcttaattatt

SEQ ID NO: 23588 - DNA, 1754 bp, Cannabis sativa
tccatggctacccttcttaaaaaagtatgggattcagtctcaaaacgctcctcttccaattccaaaccagactcatcatcatccatggctacccatctgtctcccccttctcatcatcatcatcatcatcatcatctctctccttcttttctggaaataccttctgatgttttgctacaaatcctcaaacttttgggacccaaagaagttgcaaagatgagtgtggtttgtaagtacttaaagtctttagctttagatgaaaagctttgggttttctttttacagaatcagaatgcttctcttcctcactcttgggattctcttgtttttgctgaaacatatttgagatctgcttatcctcttcagtaagttcccaactttcaatttgtgatttttgtttgttttttttagtttcaagatcagtacttttttgggttttggttattgcagaacactcactactcaacctactcaattgtgttttatgagaatttatggtcaacgtgtgcaagttcctggctcaattatcattgatggtaatatttatatgatataaagatatgatctttatagtaatataagaacaataactagtcaatagtaataataactagtaagtttttggttggtagttcattttgttgtacttatgtaaattttgtaaattttttgctactacgtagtcattttgttacaatattagttcttatgttgttaacatcaatgataattgatggtatggtaatatttgtatgatatagagatagggaaattggcagcaaaattttgtttgtagttcactttgttgtatttaattatttatgtaaattttttggtggtaaaaatctttatgtaagttcattttgttgtacttaaatttctatgtaaattttttactagtatgtagtcattttattacaatattagttcctatgttgttaccatcaataataattgatggtaatatttatatgatatagagatagaaaaatttgcagcaaaattttttatgtatttcactttttgcacttaaatatttatgttaattttttagtagtaaaaatccttatgtagtttattttattgtacttaaatccctatgtaaattttttgctactatgagtatgtagtcattttgttatcatattagttttttgttgttactctcaattatcattgatggtaatatctacatgatataaagaagatagggaaatttggagcaaaaattatcatgtagtttattttgttacacttaaatacttatatgttaattttttggtgataaaaatcatatgtagttcattttgttgcacttaaattcttaaataaattttttgttagtagacattttgttacaatattagtctctttgttgttaccaactcaaggactaatgttacattaaatatgtaatcgttgggagttttgctgctaaaaaatttacacaagaatttaagtgcaacaaaatgaactacataggaattttcaccaccaaaaaatttacataaatatttaagtgcaacaaaataaattgcataagaaattttgccgcgcaaatatccctataaagatattgatctttgtagtattataagaacactattgaatacccaatttctgttctttgttcaggtggttctggttattgcaaatatggttggagcaagtatgctgctccatctgtgcgctctgctactttcttggtcacattttaaactccccaacttcatagtttcatcattcatttcatt

SEQ ID NO: 23589 - DNA, 4088 bp, Cannabis sativa
  modified_base (4032)..(4062): a, c, t, g, unknown or other
gttttgtatatctggtccgtacctggaacattgccattgtgaagctttacatggtatcaatcactactgacttctgtctctgatggcttctactgataaaacgttttcatttggtgcttaaatcaatcctccaattgccacttcttgggctactcccccaactatgaatccaatggctactccagctacttggaatctgtttgctcattctctctctatctctcttatagtgaagctttattgcaccaattttcttgcctggaaatctaaagtcattctaatagttataggccatgatcttgataatattcccttcactggtatgtcgctgcttcaagtttttgttacagttgaaccaaatcctcaatatctgcaatggaacaaatgcgatcaattgcttctctcgtggcttcgatcctcaatgtatgaagaagttcttgctaccgtgactaatttcttcacctcctatcaagtttgaaagactttggaatagtttttttcctgtcaatcttgagcaagattactccatctctagggtcaattctcgcatgttcgtaagggagctttatccatttctgattatgtggataaagttcagtccctatctgatgccattattattgcaggttctacaatgggcgaacaagatgtgattctgaaattgtttaatagacttcatcctgaatataactcggtggttttaggcatcaccttccgtagtgatgcgttgagtcttgatgaagttcagacactcctcatggcaaataagattaatcttgaacaacataatgccatcattgatcttactatcaagatgcaagcgaatctcacttatggagcaccaagaactaggaaatccttgccatatcagcctactacacgaggctctacacttgagaatcaaaattgcttatatggtcgttgatttggtcgaggatttatctcaaattatcatttgattcgtcaagtctgtctcaagagtggtcacacggctgttgtatgtcactaaaaatttgataagaattggattactctgaaacgtggtgccaccatcccccctgattttcgtactgagcttcagctagattaagaatcatcaaattatcgtcaatacattttgcttgattttggtgatgactctggctggttttttgacacaggtgctaccaatcatatcaccaatactatggaaattttttattctgttgttgcctataatggtgttgaaactttagtagttgggaacggtaagaaactcaccatttttcatattggttctgcctatttatcttcctcaactcaatcttccttaaatttaaaatatgttcttaaagttcctgctatgaccaagaacttagtcagtgtatctaaattaactaatgacaatgatacttttcttgaatttcacaaacattgttgttttatcaaggacaaggacactagcaaagtcctgctgaaagggaggcttaaagatgggctatacctactcggggaaggttcttcttcacctttgatattagccatacatcatcatcttacttgtgtgccttctgaaaattctattcaatgtttgtacttcttgtaataataaatgatcttgtaataaactcatgtacaaattcttctatcaataaaacatcttctaattttgatttctacctttactctccataagtttttcattcttatattagcaaagatgttaatgcttgtcactataagctacgtcatccaactcccaatacattaggcatattattaccataattgcctcatactagttctttaaaagaaccaaaatacaactcgtcaacaaggcaagagctacactcttccattctaatcaacttttagctctaatacatattcatctatggggtccctcacatgctacttctatagacgggtataagtattttataaattttcttgatgactacaacaagtacaccttgattttcttaattaacccttaggtctcaagcatttgtgtctttataaagtggaaagcacaagtggaaaaataatttaatctgcctataaagtcagtccgagcagactgagaatgagaatacaagactttaaaagattcatagaagatcaatgagtacatttttaacatccatgccctcatacccatggccaaaatggaagggcagagagaaatcataggcacataaatgaaactagactaactctcttggctaaagctggtgtagacctcaaatattagtggcatgcattcattgatgtagtgtttacaatcaacagattacctaccaaagtgttagacttacaatcttcgtatgaagtcttattccacagtaaaccagattatgctatcttaaaaacttttgggtgtgcatgttttcctcacctaacgccatacaacaagcataaatatgacttcagatctcaaaaatgtctatttttggggtactcttcacaccacaaaggctacatatgtgagacatcagaagggagaatttacattgctagaatttttgtgttcaatgaagagtgcttttcagccatgttgtctgcaacttctacctcttcaaactcatcttaggtataatttttccatttctcttcattccctatcactcatttttacactggaccttgtccaactactactaatacaacatctgttgatggttttgttggtgtgcaaactgagaatgctgtttattcactagaacaacatgtttccgctaatcctatacctgagcccttaaatcaacaacaactaatacctacctcaccctcacccccattaagtagaattcgcctactatcttaactccaaatatttcaacccaacttccaataaactcagaacatactatgcctgcaccaaccctacctgcaccatcacctcaaaccgggaaagcacaaattaaccaacataatcaaattgaccatacaaacatctcactatagaatgttgttatcacatctgtaatgcccgccctattcaatagggacgccacgtgtgtgattttacaaactagtttaatactaatagaataattaattattaaaaatcgtgataatactaaaaaaatttgactataacaaaacattaaaaacggacatcataacgacagtgaaaaggcatttttggggatccctgttataaaagttttacaaaagaactatatatgatgacacctcaaaaatataaaaccaaaacacatgatacatacaacccaaaacaactcctgacaactcggcacgcataccggtgaggttaatatgtacattgctggaggagactgtcttctcatggttgctctaactttcccttgctcttacctacaccacagagcacctgtgagtcaaatagactcagcaagaaaaataataaaaagggtacattaaataactaattatacattttattatcataaaatgattaaacaataacattcaacaattgacaatatgactagccatatgcatagaaatggatatactcatatatttgcattgcctaatcaggcaagcccgtgtcataatgcaatatcatgtataatatcataaccataacatttgaaagtagataatattaccatccatatccatagaaatagatatgctcatacatttgcattgcctaatcaggaaagcacgtgtcataatacaatatcatatataatatcattgcaccacctaatcaggtgagcccgtgccacaacctggcaccaatatatcgcattgtttaatcaaacaagcctgcacctacgcccgatacttatcatatgtcactaatgcctgtacctacactcgatatgtcccgaggaagaaacccaaaatttggttttgatctatgccataaccaagcatttttatatcaccgactcttgtacctacgctcgatacatcgctaggattattgcatcgcctaatcaggtgagcccgtacctattttcagtactcatcatatgtcactgacacccgtacctatgcttggtacatcgctaggtatattgccaggatttattagaagtgggtacgacatactgnnnnnnnnnnnnnnnnnnnnnnnnnnnnnnnattgtgaaggcccatttgccttattt

SEQ ID NO: 23590 - DNA, 4959 bp, Cannabis sativa
atatatatattcatatatccataacacagatattgaatttgcattggtatactatgtccttgatacgagtatatttaaagtttatttatttattttggaaatggaactttatttattaattattggttttaacatgacaaagatatatattgcatataattatgtaattaattatcatacttcataataatagattatcatgtgatgaggtaaacatatttagggtctgttaattcgtatacatacactaattaatattattttgaattgtattatatatcatatatttttataatattatacggtattaatttatatatataggatttttttttttacatttcaatttttttaaaaaattttttacaaaaattcacatacatagaaatcacaaagaaacccacatagtaactaacagagtattctaaatcgcaaccaaaattcacatagaaactacaagagcaacccaaactgtaaattttttttaaaaaaattgtatatgaaataatttcctatatatatgcacgtatatatatataaatacataacttaaattttaacattatattaaataaaaatataatatataacacaatttaatataataccaaacattacaatacgatctaataatttagcatactaagggttcattcggtacaccgtattatattatattgtattgtattatttaatacaatatcatgtttgatattgacttgtactaattagttgtgtaaaattataaattatttacaataaactcgaccacaatcctgaccacgcacgacctagaatcaaactcagactcaaatctaaaccccggacccgaaacatgccccagacccaaactgagaccggagcctcgaacttgaactgagacctggaccccgaactcaaatccagacccatactggaccctagaaccgaacccaggctggactccaaaaccagacccaaacccggaccccaaaaaccggacccagatcccaaccccaaaccctggacccagactccaaacccacgtccaagccctggttcaggtctagggtttgggtccagggtctgggttcgggtttgagtccatagtttgggttgggtccaggtctaagatctagggctggggtcgaggccgagattgacccgaaatcctttgtaaatattataatacaagctaatatggtcatttgttatgtattaaataatacgacttaaattgtattaaaatttatggtagtaataattaatacaattcaatattttatccaaaaataatacaatacaatgttttatctaaaaatagtgttatttattatataatacaatacgacccttatacaacttaccaaacggaccctaaacaaatatattagtgtagttcatcatctatataataaaacaattcattaactatttttctagtaagtttttttttgaaataaagatataattcatagagataaatctgctgttgtagaaaaattcaaagatcgtggataatcatctgtccaaacacactcccctaaactagtaatagaggttgctagtgtatggacaacaccattcactaaacgcagaatggcactgcaagaatcaccaccaacagcaactaataaaaaataaatagactgaaaactaaaattaatgtggagcttattaataatggagatactgaaattaaattgatgtgcaagagtcaagcctagccgagtgacaagcagctccgccacattagtagaaaaatcacctaacacacttgatgaccacgccaaccgaaccacaccctctgcatctcgtatcactcctcccaatctgacaaaaccccttcccaaaatcattgaagcatccgtcgctaaagtaaaggattcaagaggaggtggaatccatcgagtaggtcagtttgcaactgggtttgcaaggcccaaacccaaatgaaggcttcaccgaccatacttcttaaattttgatagatggttaagggctaaatttggaacaaaatccaaccttgactgcttgttgccaaataatactaagtttatcataccacaaccactaaagggttgtcatcatcaattcaaaagtctcacgagatagcttgtcaaagagaaataggaaaatttcttgcattggtccatctacacatcgacggagcaccgactacactcccaactgatgtcatactggaatcatatcagaacaaaccaaaaggtacctaaacttttcgagagataagttgtgaagctactggtaaagccaaatgtaacatacgccaaacaaaaaatacttgctttagtatgtagttaatttaattaaatgcttttttttatgagacgaaaatattatatgtttttttttttaaaaaaattaaagattgttgatttgtggtcgagtgaacctgaagccaaaacaattttttttttttttttgcttaaataaaatgataataatacatataaattgtaattaatttattattgcttgattaattaggtgacactaaggattaatggtaatcatttttttttatattttaaaagtatggtgtgtttaattcctaagtagcataaattatatatcaatatatgtgtacaaacaaactccactagtttctgatgtctttgtattttgttttgtcaaaatattctagctgaaatgtcaaatttcgtatattgaaatgaaatattattagttaataattaattaatcaatcaattaattgattaaagattatgtctacttcttcctataacttgactatgtataggaaacttttctagtgtgtgaagaaaaatcacattcaactttatattactcatgtatttaattattgaacctatttaatgaatttgctttttcccatttgacaaagtgaatattattgtattttattgctcatgggatttaaaatgtttgatcattttccaacattaatcttaaaaaatgacatgttgatttttcaaaaatattattcttgtatgtgcctctagatataaataccaagtatatttcgcattttgatcatttttcaaccaaaaatcctaagaattatattaataagaggtagggttgtttaggaattgatttggtttaaattttcaattttttcaaaccaatcagtattatggtattttaaaaattcaaaactaaataatcgaaccaaactaaactaattcactcaaaaactgattggtattgattcgaaactatagtttatatttcgtgattattctaattcttttttgctataattattcatttttttgatattttttaataagtaaatagtggcataagtacccaaagttttaggtttgtaagcgacataaattcaatgatttttttaatagcataagacccaatgtttataaaactgtaattttcttccagtttcatcagtagagactctgttattgtcttaaacaggacacatataagacccaaattttagattatttggtctggacaaaaaatatgtagtatcagttacttccaaccttatttaataaatttaaaacggagcctgtactgatgaaaatagagaaaaattacaaatttacaaacattgagtaattctgccactaaaaaaatcattgggtttatgccgcttacaaactcaaaactttgggtacttatgccgctaaataatcataaaaaaattattatcataacaatataaagtcaatttcaatattctacctaaagttgttttaaaatatcaatatttcgtccaaaaaatacacattaagtatataaaataattatacagattgatttggtttgaaccgctaccgaaatttctaaaaccgtgaccgaaccagagaattttaaacggtctgaattaatcaaatcattcacaccaaattcatttgttccggcgttaaataatttgcggattatatgaacatatctaagaggtctatttttggagaattttcatttttatagtttttaaagtataggtttgcaaaaatatggtttttttttctcaaaaaaagttatttatgggaattttttttaaaaaaataaagttaaaaaatatgaaaaaaaaaaaaatagcataaagtgcatggttatccatctagttaccttaaggtgcctggttattcttacatgattttcttatatttttcaattttttatttacttttcctataaaataacctaaaaatacaaaaactgataaaatttataatttcctctagactgatttatgcttaaaagacattaataattcccttgtaataataataagttaataaatttgttaaaaaaaaaaaataacaacgttgggcctagttcaaaatgagcatgagatagttgtagtttcaccttagtagaacgggctcaataaatgggccggttggagctcgagcctggccaagcccatttcataaatagacctaatttgtgtgttcggtattttatttctaacaagtttttactttcatcatccatgtaatgttgaagtgaaaatgaaatatactatatggtcaagaattccatctcaaacttaatttgtaactatttttgttcacaaattttggacagtgagagcataagtgactccttttaactctcatttgtagatttagatcatatactagttagggtttgtggttgtaatcatagtattttaaaacgtggaaatgtgttttagaaattagggtgctatacatggtaaggagtatgaggctttatatagaggaaattacatgagatacctactttcctttacttgttttaatttttacctccatttttaaatcctctaagatatacccacttttatagatgatgtcctcattagactccttaaattaatataaattatatgctatacttaagtaaagagtaagagtgtattgggcaatccactcaaaaaagtgggtatatattaaaaaaaataatataatatgagggtatttttgattaatagatacaaaaaagtggtattcttca

SEQ ID NO: 23591 - DNA, 3767 bp, Cannabis sativa
tagttagggcataaaacccaacacaaaatacctctccgctgctgcatttcatcacaggacttattctagtcattagttccctgcttcatttgtccttttgtcatgacagtttgctgtttcttcttccaagtcacatgtttgcctttgttacaattagcaactgtgtgccccaagagagcacaagctttgcattttgatggtaaccattcatattcaacacttttctccattagttgctttctctcatttacaaacgtaatagttttaggagggcagtctaatatctccacatcaactaggactcttgcaaacttgatcatagacctctcaagtgttactttatccaccatgttgggtttgcctattgtgctcaccaaagcactcaaagaattcttaccccaatattgaagccccagtatatttagcctaatacagataggtacataacgcaccaattgattagtatccaaatttgatgattgcggcctaagaacaacaagttttttgtcaaaatgaatcactcccgtttcaagaatgatatctctagtcagctcatccctgaagcttactaatgtgaaaccagaatgcatccttacaatcttttccactcccaatttcccccatattctcctaataaaacccttaaaaaattttgaatggtggattcacacctaaaacaatacagacaatagatgatttccaaaaggaagcctccacttctacttcctctaggtcaagttttgccacaatttgatccccaattttcataggttcagtataatcaagccttgaagaagaagttttaacctggtttacattgaaattgctccatatatccttggttgaagcttggaaatctgttgccgcaacctcatcagcccagcaagtaggtcaatttggttcgaacacattcagatcttcatcttcttcctttagaacattctccagttcatcgcacgggtccggaaaatctctacagcttgttccttttagtgtgaaggtcactcgttctcactatggttagcttcaatattagctcctgaatcaacactcacagatcaaatggtaggctttcgaattgttcttctcttctttgccatggaagaacagagagagaacacgcacaccctttttttattttgatgtaaatgaagagtttcttcttcttcttctcttttattttcaaaaatataaaagctattttctcttgagtttcttcatgaaatttcgtgctccttagtgttaagagctttcccacacatgtcaaagcaatactcagcatagtgaggaagactgtgatggacaccatcgaaggaggagaagatccaagttcagatcttgataatgctctactacatacaagaatcaatggctagagatctgaatggaaggagccatattattctactgccatcattgaagggattttttaatctcttatgtgtttatttctcattttaggaattttatatttacgatgttagattataaaattataatcatcatacatgttagtaaagttagatcttggtaaaataagtttccgacagcttcctccacctttctattcctcttgagtactttgaccaatgatatgatctctttcgaagaactttatccttcttatcaaggatttgaattggttattcctcataggataagtatgaatgtaattctagggcttcataatataagacatgattcgaatatgatacatacttccccagcatcgatacatgaaaaatattgtgtacagttgacaatgcaagtggtaaggctagccgatatcctacctgtccaaacttcttaagtatttcaaatgaccctataaacctagggctcaatttgcccctcttttcgaagcgcctaacacccttcattggtgagactcgtaggaaaacatgttcacctacctaaaactctacatctctacacttaggatcaacataacttttctattacctcactgatccgctaatctaactctggacccaaatactttctttctctgatttcatcctaatgaatcagagaatgacatttcctaccatataacatcaataaggagccatccctatcgtactctgatagctgttattgcgagaaaattctatcaaatgcaaatattttccacaaaccctcaaagtctatcacacaggctcgtcacatgtgttctagtatctgaatcatcctctcagactgaccatttgtctgaggttggaaagctgtaatgaatttcaactttgtacgcatggtcctctggagcttttcccaaaacatataggtaaactttagatccatatctaaaataatggatttcagagctccatggagatgaactatctccttcacatataacttcgcatattgatccaccataatgttgtccttaccagaaaaaagtgtgctgattttgtaaaatgatccactataaccaagatcgaatcatacattcatgtgtaactaggcaaaccaaccacaaaatccatagtaatatcctcccatttccatttgggaagtgccaaagtttgtagtaaccctgcatgtttctgatgttcatctttgatttactgacaagttaagcacttggatacataatccaccatgtgttcgttcatattgcatcaccaatagtagagtttcaaatcttgatacatcttggtggtacctaggtgcgaagagtatggtgttgtgtgagcttcatctaaaatttattttctaagctcaaagttattcggaacacatacccgagtcttgtaaagtgacatcccactatctgagactgagaagtatttagcctgactagctaacacctcctcccaaaacatgattaactcagaatcttccaattgcatacatctgattctttctaaaaaattagactgaagtgtcaaattattatctgtcaaacataaatcaatacctgccttgaccatgtcccttgctaattgagaagagatcatcgtagcactaaaaacctttttgggacctttcctactcaaggcatcgaccaccacattggtcttctcaggttgataaagaatctcaaattcatagtctttaactaattctaaccattatctctgtctcatattccatctctgacttagaaccttggaagtttctgaagaagaaaggtgtttggcagctctagaacaaggaattaagcttgttgatgcaaattaattagtcttcctctcttttaatttcattaaattatgtgcttgaaggtaagaattcagtatattattgagtctatcttgctgaattagttggtgaagaaaagtttacagattttaagttaaggccctgattgtcaatggtgtatttttaattctttgtttgacggtgttttaagattataattatgtttattatgctatataaaactgctctggaaaatttggttgcatttagtgaagttttgtaacaccatactggtttaggcatgttaacatgattttttaactgaactgtacagttcgttgctaatcaacgagtttattgaaaatcttaaataactaaaactttatttaagtaaatataaatatcaaatgaacatacttgtattaaaccaggatcccatttacaaaaatatttataaaagttttactgtgcatattacaaatgtttgtcgcccaacaactatacaaaatgagcccaactgccccaaagaccgtgcgctccaggcctaaccaccccgacatgtacaatcttcatttgctcgctctcacggctgctcaaccttagctttgcccttacctaca

SEQ ID NO: 23592 - DNA, 1565 bp, Cannabis sativa
gcatttggtgttaaatggtgagtttctcctgagtcggggtaccaagattgatcggcaacagtgtcagaatttgcatattgtgatggcatttctgcaaggttggcactccctgtaaagttttgaagagaagctggacccaaaaacgatttgtcaaatctgtaaaaacactgagtgatagtgtgcccaagcttgtggcataattggcattgaggtttttgccccaagcagagtactgtcctctcccacgactgccgatgcttgtcctctgtgtggtgcagtggcacgagaattatgatgattgagtgatggaccaaatcctggagggggatgatgggccgagtacatcccaggataggaagctccaccaattgaagtgcctctagccatagcagcagggtaattaaccagaaatgtggggaatagtgggagaagaaaaggtacctctatttccatgatatggtttagtgtgaccaagattagcaagatttgcttctggtttactgatatcaagatctttggctcctttatccaaccgaacttcttgagccatcaaaagagcttcaattttggcaaccgaatatgtatccaatctcgtattaacagaggtgataaagacatcatactcacttggaagaccattaaaaatggcttcaatgtgatcttgagctggcattcgatgtccaatggatgcaagagtatcaacagtacgcttgatcttgagcaagaaatcacccagagaaccttgcattttagtgttgcgaaggagtgttcggtattggcttatattggcacaattgagggctgtatagtattctttcagattaagccagatttgagctgcggtttcacatcccaccattcgagtgaggatcttttcagacatggaggagagaagccatgataccaaaatgctatcttgttgatcccaatcttcaaattctgaactaatgtgattagcagccctgtcttcgtcagtgaggaatttaggggggtgagtgtaggatcaagaaatttttgcaacctgcttcctttaatggcagcatacacctgatgcttccatggaaggtaattatgttcgtctaatcgtactgacagagaatgagaaaaagtgaccggagatgttttgggaagagaagtaccagttgatgcgggttgttgagtgtgagatgaacctccattgctgttatccgaaagagtttccattgatgaacgaaaaattgctctgataccatgtgaagattattaaaagacaataaagaaaacagagaaagaagaaagtaaagaaagaagaagaagaaaggaaagaagcaattcattcattgaataaaagggcggtacattgtttatatagcagcaggtgcaagacagaaaacagttacaaccaaataatagatttcctaacaatattctaactgttctaactattattgtacaactcagcttctttatccttgacatatttggcttggttggtcagattatagtaggaacattgacagattattgaaatggatctctagatctcatctatcctcttttcgtaagcaagtcttttttatggctct

SEQ ID NO: 23593 - DNA, 2366 bp, Cannabis sativa
atggttgttatacgctcgatctggtttcattctggttgcgtagcagattggatcgatggaggtttcttcatcgtctccgttcgtgacgtgggactgaaggtataagccaggtggtatttttgtaatattttcaatgtgggttgtataaatgttgattggttcggcccatagtaatattgtaatattttacccttttcggaattttcatgtttttttcccttgttattttgtagggtgtaaatagatcttctcttttattttttataactattttcttgtatgagaatattgttttctttcataaccagtgtaagaaaaataagaacagaagtagttaaaatatgatttttcttcaagcgttaaaataagatatttagtattaattattaaaaaaaatgagtattaactttgttatttttcagttaaacaaatattcaacgaaataaaataaaataaaaataattttattttttatataaaacacaccgaaatcaatgttagtgaatttcaaccttcttttttacgggaattaactctataatgatggtcttgagggccctgcttatgcaatagtattctgactcataaaaggccatgtttggaattttatggttacttggactgatgacaacggcagcgccacggggggtgttgatgatatcattagtaggactaggaatttggctgtcacacatgaggaagattaatgggaagaaaatacagaagaagttgtgaaatttggagagaaagtgttagttgggagagtgattgcccgaagggagatgaatgagcgactgtataaaagtatcttttctagaatgtggaaaaaggcaggtgattggaatgtgaagatttttggaatggatggggaacattcatttgtgaaaattaagttcgctgattggaaggacttgaaatggtgcttgaaaaacaaccatggcttttcaatggtgggattttaatactggaaaattggtctgaatcgggtcagtgggaagatgctcgtcttgatcaggttttctattgggtgtgaatgagaggcttccctctaaaaatctttaccaagaacaatgtacattgtataggggagcaagtaggggaagttttagagatacactggtctactactcaacaagttttctttgtgggacatgtccgtcttagaattggatttcctattaaggaaagtatctttgttgggatattcatccctgttgggggaaaaagaactggattcagataaagtttgatcgttttccattgttatgctacagttgtggtatctagggacatgaacaaggggtctttcatgtgacacaagaaatggaggcagatgaagaggttcatttagttccttgctgtggctcttggcttaatgaagatgacacaatcccaaactattttgttgctcaccaataataacaacttcatggttcactaaggcagaatctacctagaaccgagatgaattatcaacaagaggtcgagaaactagttgagagccatcgtcaaaactctgagttagagatacatggccgaagtgctcatgaactcacgacagtgaagctgactgctaaatcgaaaaccaccatctccggtgagatcatggaaatagttgaaccagagggcacggttgaaaaatcctccaggattgtggttgaaaacgtgggcatggaagttactaatgagttagtacacgggcccacaattaatacaagtgccaacatggatattgaggttctttaatttaggcccaaaatacccatcactgagaaacgcaccacgaaccagtcagggagtaatgagctagagggatggacaaaagttaagaaacaaaaatgtacccagggcattacgaaagcaagttgtagagatggtagtaattcaagggtgcttgatggtgctgtaatcgacatagcaaaccaaggtaaggttaaaaataatggtgttactggttttgctgtcggggttgaggggaatgatacccatactttgaataagagtaatggtcagaggaaacaagtctctctcaaatcaaaagctcggggccacaaaggaaatcaaatcaatgctgaaactgggtgtggcacgattgatagtcggaatggttcaaagaatggaagtttatctgtggttggttcttcttctgaggttggtatttctaattcactggatttattatctcaattatctaattttgaagcagcgagccgtgccgagcaacgccgccaagagcaatgaaaatccttagttagaatgtctaaggaattagaaatccttggacattgcaaacttttcaatcccatatttgggactttgcccgaatattgattttttagctgaaagtaagttaaccaagtttcaag

SEQ ID NO: 23594 - DNA, 3218 bp, Cannabis sativa
  modified_base (162)..(192): a, c, t, g, unknown or other
ttatggacctgaacctgggtgatctatccgacaaggatgaagcttgggtgaaagtaagtggaggttcgaaccgactgatgtttaagaatcagcggatgagttgtggttaggggtgaaatgccactcgaacccagagttagctagttctccccgaaatgcgtnnnnnnnnnnnnnnnnnnnnnnnnnnnnnnngtaaagcactgttttggtgcgggctgcgagagcgataccaaatcgaggcaagatctgaatactaaatatgaccttgacctcaaaataacaagggtcaagattggccaatgacagtgggggacaagcttcatcgtcgagaggtaaacagccgaaatcaccaactaatgcccataaatgaccgctgagggggtgtatatgcatgtcatgtgtgacaggacaagagttgctttatatatataactcttcttattattcgaacaccaaatagttgttctggatattttttacaaattataccacatataacatatcgtatctattaatggtttgtttaaattttaattaacggccacaacaatacagatttcttggacggtatataaataattaatgaggattatttttcatattttttttaacttaacctccatttatttcttttttcatgtgtcttttgttttggaaaccaaacatagcttcacagtaaaaaatattgattagatgaatactcgaacgtaccgaaagaaaatgataaagagtgacatataaagatttgataatatactcaataataggtaataatattacatttttctttttaaaaaaattatctataattattataacatgcagcttaaaaagctagaagcaaggcaccgaaccccatcaagagtccagatggaaaactggttgcaaaggtgaccggtgcagcagatggtgctggggcggagaggtgagcactggtagaaggagcaataggagtgagtgacaagggcgagccgtcctccacggatgaataaggcgacagtggaggagctgcggttggctcggcctcaggcgaattatctgccacggggccgggtggggaaggaggagaagatggctttggagttggagtgttagaggagggaggaggagaagaaggcgtggttgctgcaagagtagtgatttcaagcttcattcctccgctgcaatgtcctgatgttccacaaatgaagtatctctttcctggagatgttaaaggaatgattgtactcccgtcgttgtagatctgaatcaggttagttgtcccacaaacatcgtagtctgcttttggaacttcgataacattatggtttggagtatattggaaaccttacaaagtaaatcaaacataattagtatatattacttttcttcaataatctcaaaatataaaactgtcccatatcgaatatataccgaaatacataaaaatgactatttattttactcatcatcaattttgagatagacgtgtgttatatcaaacacctcattttatgacaaggataaaagttatatatatatacaacatattaaaaataaaaattatgggaaagttaagataacaacactagtgagtcttgattgtgcttactgagactgtctccgactgaaaaagtctgagatgatccccaagtttggaggtctgaggtttgctcccatccaccactgcctcctactgtgtaagtttctcccatggtgagttgaatgagcatggctgccataacagccaagcttaataaaaatgtttgcattgccatgtttggaagatctgacaagaacagaggagatctaagtgtgtatatgcaccaaatgatatatctttttagtgacacaaatataggatataagtttggaaataggagttatatatatataagggataaagagaataagtttcaaaaagaaaaggtttgtcatttgatttagtcgttgagagagttggttaagtctaatgacaggttgttttattgcataaaaaagtttgaaataaatgagactactacttgcttcactggatgttttgtacattagatatatttataaatacatataatacttggcaagattaggacaggtgtaatgtaaggaatatagtgaaaaaagaaatcgtatggagttgttaatggcattcacatgaaaggtagtgcacctaatccaagcaatcatccaacccataattgcagctatacggaatgaataaacaaaatatatatgcagatttgggtattatatgcaagcacgacgtccaaattataacttggtcaatatatagaagcaaatatattatatataatgggatgtgcatcgaaaaatatattaaatctaggggctttgatcaattgtataaagtcataactaaacgatcatctcacatacatgaccaaataatgtagtttcttttattttatatgtcaattatttacaattatgtaagtacatattgaaatatcaagagaggttttgtgagattaacgagtaataattaaggcatttctttaatttatgcataataattaagttgcttattcattaattccaccacgtttagtgtcgatcgttaagctattctttcgattcttgcctatatcatgttaaattgttttagaacaattggtgaaaaaaataaggtttaataaatgtttcgcacattgaatctacatcgcttgggaagttgtttttgtacaattttgcttaaatttggattaatttagggcgttagctagctagcttcaccccttccttgtaaatagagtattgcacgaatcttttgtaatcaggaagctcaccttagacattcttgtgatcttgtctacaaactcgaaaaaataatacaaacccttaaaggattaggctattgacactcggagttaaacctctataagtatcagtattcattctttacatttaaataaagctcttgcattttttattgatccatcgtcatttggccaaaattctatttaacacctctaattacataattactgtgtaattaccgagtttagcaaaacacgttaatctcgtaattattctaaattacacttaattttttagaccatcttcattaagagatgtataatttgcattagagttgttcagaaaaattaacaaattaccgctcaagctgaataaattgcccaaactaaaccgaataaaccgacaaaaaatacaatccgaataactttatgaaaaactcaaaccacccaatgaatatattg

SEQ ID NO: 23595 - DNA, 1947 bp, Cannabis sativa
aacccaggaaaaacaataattctaatctcctgatttatctaggagagatttaacagtggttgtttgtattttatctaaccaaagggtaagcttaatggaatgtgtcagggccaaagaccacatgacaaagttcaacaagtcagctgacagagatatgttacaaggattaatcgtactcaccattagctgagtagacctttcagctgagttatcatttacagaattagaaagtcctccatgatcatataagaacttacgaaaggccatcttaagggcaatttcaattgctgtggatccattgtctgaaaaatacgttcgagaagcccaacctgcattacaaaataaatgcacatcaacaatgaaaacaaatataaataaaatgtaaccacaaaaagaagaaggggagaacaatcgtagataaatcacaactagctattctatataattctaacaatatctgactatcgacctgagacctattatacatttgttttgatccaaaatattgcagtaaacgaaaataagtcaacactgcctaatttcccaattacacaatgtataaagttattgtgcagttcaaagtatatgctgaggattttgggaaggcatgaggcaggcttggaggagaaccttattcacataaataatttttttcaaaatttaatggctaagcacgcaaggtgctcaactttttttcatggaagtatttgctaaccttttccaacaccttcaagcaaaagttcagcacattctaaggccggctcataaacattctcaggaaacattacatgcccatatcttgcagcagcataacccatatctcttgcgagctcagtctgaaaccacctaaaaaaatcacattaacgaaaaaacttcaaacatcatttctcatggaaaagttaaaaaaatataaaagacacaatggtctaactgaataagtatgctaatataaattgagtctcgctgaaataaagaatgaatataataatttaggaaatgttaataattttattttttgatatttgaacccctctccgacccacacccacagacactcacacacccaacaacttaagctagacccaagtggcaaagtgttattagtttaataaccaatatcatgatttatttagtggtggataactagaatatatattatcaaatgtattcagtttcctagtttagttcatttgcctatctataaataggcgtacaatgcttttgagcaggggaaagcaagcaccacttaaatttttttattaataattttacatgcaaactttagctaagaacttaagattataaattgaccccataaaattcaaaaaacttaagcaataatttttaattattttctgcctattataatttatatatacactattttgcctccactacaaataggaatttgctctgccactgtttttgacacttatgaaatacggatgatatttgaattcttcctctcttgattccctttgaatgttcaacttctgttattattccatttctctcgaaaagttctattttaatttctcttagctctctctcttaattaatcatgttcttctagaattttttatcactcattctgaacagaatgcatcatatatgtttacataatacaataaaactgagaactagtaatgatctaccgatttccattacaggggttaaaataaaaaatggaataaagctaaagcattgataagttggtcacctcaggcaatcaatcaaatatattaaagaaaaatgaaatacaattgaatatattaatttaactaacaaaacagatattcagaaaggtgacctgtaacgttgagtcaggtccttgagtccaccaactagcacaagcatcaaattgctgtgtcatgacaccattgttttgagcctacagattaatttgataacaaaaagtgagcaagcaatgtataccaatcaattgca

SEQ ID NO: 23596 - DNA, 3533 bp, Cannabis sativa
acagaaggcaaggtttcaggagcaggaaattttttagagatgtttgaactacttgattgagcatatgggaattgatgctcatcaaagacaacatctctagagatgtagagtctagcattggagctaagacacttataacattagtgattgaggttgtaccctagaaaagtgcaggttgtggatttaaactggagtttatgcttcttgtaggatcttatattagggtaacaagtgcaaccaaagaattttaaccagttgtagtcaggcttgatgttaaacaagacttctataggagatttgtttcctaatactggtgtgggaagtctgttatgaaggtggactgaaattctacaagcctcatcccaaaatttaaagggtaagtgtgcttgagcaagtaaagctagaccattttcaacaatgtttctatgctttctttcagcaatgccattctgctcatgagtggttggacaagggtggatatgagttattcccatttcttgtaagtaactagagaatgacctatattcccctccccaatctgtttgaagacaatttaatttgaatcctagttgtaactcaacttcacttttaaagcaaagaaacacctttataaggcctcgaatttattctttaacatgtatatctaagtgaaacttgaatacatatcaacaaaatgaacataatatataagggagtcagtatgtgagggaccccacaaatcagatacaacaagttgtaaaggttgagtgtacaagacaatcaagagagagttagttagaataacaagctaacaactcactcaagctcataacagaaaaataacaaacatgaacaacaaacagttgaagacagctaacgctaactaattgtaactgacttgagctaactaactttaactatcttgattaaagcccttttttcctgtagtttcactctctatgaagactttaattatgtaggatgaggaactaagagcaatgtattgaaactaactacctcgagacaaagtcatagataacttagtataaatcaaaatagaattttaacaaatatttcaattatccatatattcatttgctatcatgcaatgcccttaaattaataatataattagtgaagaaaaaaagattcatatttcaagccatttttaaattatatgaatattttagttgtgaacttatataaatgtgctttgagtttgaatgtttcataactattttatgcttaacatcttaattgtcacgacccaagttttaagccgtgatagatatgtaatatctataaatgtgctttacattaataacttatgaaaattaattatgttattaatttcctatatagttttggcaaagagaagcagcaacacttaggcaacaactacagtatttgcaagaatgtcacaggtaacttaaaattaatgaagctcattctatacaatactttgtttaagtacttaaagctcataatgctcatttttagagagagaaaaagttattaataatagaatgttgttcaaagataaagaaaaataattatgatgaaaacaaacatatataatgcaattcatgcagacaattaatgggggaagaactttctggcttgagcaccaaagatttgcaaaatttagaaaaccaactcgaaatgagtttgaaaggtattcgtaccaaaaaggtatgcaattattaaactctaatatatcccttaattataaatatccaatttccctttgaattatttcatagactcattgtcacattttatatttatttctctgcatgcaggaccaaatattaactgatgaaataagagaactaaacaaaaaggtttaacaaatatatatggttgcctttttttttcttcataataaatttcattttggacctaataattcacattaattaactttatgacagggaaatctcattcatcaagagaatatagaattatataagaaggtagacctacttcaaaaagaaaatatggaactccaaatcaaggtatatagtaacttaattaattatatgcattattttataatatgattaatgtatgtatattatttttatcaggcttatggagcaagtgacatgataaatgatatcaatagaagctgtagtactacaatgggatatagtagtgttgttagcaacaaatatgatcatgcacaacaaccaaccatccatctccaattaagtcaacctcaacaacaattgcactcagaatctcagtctaataatcttcaaccatctcatcatgatcacaacaataaaactactccaccaaaaccaatgattctagggtatttatccactaaaacttccctatctattcaattttatttataaataaattgcaaaattttacagctttttatcatttagagaaagtatactcaatttttttatatggtagtatatattgtaggtatagtatacatttcatctattttaaaaaattttaaaataatttttagtgtcgaaaatatggtccaaatgttcatttggatgcagatatattaatttttattttgaataattttattttcagtactattaattatttaaactctttaaagaaaaataggtgtgataactactataattatagtgcaaactatcataatataataaaaagaattaaattataatttcttgaaataccaaaaatataaatatgtctctactatagtaaaaacaaattaaagtggtaccactattattattgctctctatataaatgaattcaaagcatgcatgcatgcatgatgaaatattgttggattaattatatatatctataaataatactatttttttttcttttaaattggcaacagattaaaactgcaatagcaaagttatatttgactatttgtagaagaagatgagtagtgttatgatgaaaaaggcatgcaaaagagtagtgagagtggaaatcaaatctttgctatagctacctatcttgtacttcagaactactgaggaaaatgacatttttcatctataccagaagttttggaattatgtatatgttccttttataattatgtgtaatggtatgtgcatacaaattattatgcaacaaaatattacatttgtagtaatatgacagtttatggtaactaattatgtttactttagatgaaatacacttttttttaagaaaaaagtattacatcactctctgtaatattttggtacataatcaattttattttgatgtagatatcattactcattaattacttaatgatcactcgaaccatatatatatatatatatatatatattgcttcgtgaagagggatcatatgcctccggacttggacacattgtgatgtataaaaggagttaaggtggtgtttggttagaaggaatgaaaatataaaaatagaaatgagaataagaatagaaatggaatggaataaactctaaaatgcataaaaaaattgataaaaaaatcactaaatcttttctcttgttacattagaatgtattttccttcatttttaaaataaaatatagtcattccac

SEQ ID NO: 23597 - DNA, 4002 bp, Cannabis sativa
tattatcaagtgtgtagatatatagttttgcaggaagaattacctttttgtgagttggcatttaatggacaatttacggacatatgtgtgacttcattgagagaggggcacactcttgttacttctccatgttttgctggacaattattattttaaaaaaaataaagaaggttagtagtcgaaaatttagaaagatgaatattaactaacaataccaattttttatatgaatataccgatctgaagtcgatgttttttggccgttggttgtctgtgtctattatccactccttgattctgttgcagaagattgaaaactgaagtatagtacaaaaatattgttatttcataataaaaattaattattttgattgatataaatatgaataacaattttaatatcaatgatgtcattaccttctgattgaagtaattcaatgtgatatgaaattttgtctaacttcatagattttgtgaaatagatcacaatttctaacatcaaaataattttttttcttaaatcatatttgtatcgattgtaggtagtagtcacttttcgcttgaatcttgcatacttgcatatcttcctttggagaacagctaagttatcggttattgttggagatacgacccttaaggaatatttcttgacttgcaattttatttttctatcttgtcgatttaaagctgacagttgatgatgcaagtaagaaaattgaattggtatatttattgattcactaaattctttgatagttgcagaaatcaattccatcgaatctgtagaataatataaaatagtaaattatattatctattttaattaaaattgtatttatttatagggttaaacatgaaatgataattccaaaataattattaatttaatataagttaagtggtaacataactgtaaaaataaaataaaaaatatattgtaataattttaacaaatattatgtagttatattattagtcatttgtatttagattttaatgtttaaagtttaaattctctcacaaaataataaaattgaaggagaaaaaatatgtacatctttttgaaggatgaaaataaaacatttgaacatactgaacatacatatatatatatataaaaaaatttaataagatataaataaaatatttgaacacggttattttgtaaaatattaaaatacttaaagtgacaaaataaaattatttttttgggaaaaaaagaacaaaaaaaaaaaccaatcaatataattagataaaaataaatatctaatctttatcaatgttgcggttgatcgttggttatctctgctttaatctttgtcattgggagataaaatacaagagtattttatttaaaaaaaaaaaaagagagagagttaaaagtagtaaataatagaataattaataatctatcaatttaatattaataaatttatattgaattatttttgtttttcaataatacaattgcatatatgtaccaaatattaattgaaagatataagttaatatctatatatatatatatataagaaataataaatgatgaattgttataatagaatttagaattctttttttaatgaatggatgtcatatatattacaaataattataaaggtactcaaaataattcatattgatagagcgttaaaagtagtaaataatagaataatcaataatctattaattcaatattaataaatttatattgaatttttttttattttttaataatataattacatatatgtacgaaatattaattggaatacataagttaatatatatagaaataacaaataataaatgatgaattgttataatagaatttagaattccttttttaataaatggatgtgatatatattacaaataattataaaggtattcaaaataaattgtatattgatataaaatatcatacaaataatacatgttagatttatatttagatgtagtatatattattttgaatttaaaagaactaagatgtaatataaattacaataaattttaagtctaaggttttttttttttttcctgtcattggatgccaaaaatacatataaaatgtaattattatacataaacagatatagaataaaatgtaatcattattgttaatgactatatttagaagaaaatgaccattataagatataaaagtaaaccatataagaaattagataaaattaaataatttaaacaattatgaaaataaagaatatggaaagtattttcaatgttttaaaccaatttaaagattatgaattacagtttatatcaagtaataaatatttaccttgggtttgaagaattacacttttgtagtagtgaaacattctaaaggcttctttcaaaaaaaaaaaaatctatcatattcatataaattttaaacactcatcacattattgactatttcttttatagagataatgttaatgttaatgactatcaatgatattaaaaaaaaaattgaagtgagtccatcaaaattattatttagaatttttcataaatgaccaacttcattgtataatattaaattattaaaatcatcatgctttagagaacaaattaattgtaagtggaatatttaaaatatacttacatatatatgagagaggtatctcaccgcatggctaaaataagattttgtcaccagctatgaattgttgactccttgtccaaccaatgctccttcaccaaccacatgagtacctctttcactatctcatcacgctcaacttttcctttcatcagttatataaatacacaacaggtaataccaggaatgtagggaagatttttccagaccactcgattcaaagtgcttccatttttaccaaaatctcattatttttgggagtagtcgctggaacctcaacatgttgaaaccaaaatccagtaccatatcacaattacaatctatatctttaccaaaaagaaaaaaaaattatatataactagattgtttattaattagatgaaggagaaaaaaaaaacaatatacctttgttattgataaccacgttgggattcttgtgcccttgactcaatggttttttccgcataaattgtttcgttagtttctgtagttcataggcaagaggagaagaaaaaagaatacgaaagttgaaaggttagggttttctcattattttgttttgttaatatcttctccaagtaattattgattttttttttcagattacttgttgatttctctaaaatcaatttgaagagtcattcgttatctttcctccattaatgatttgaatgtgtattttattgtatgagctataattgtattttttttaattttgtgtattcaattacaatttattatattgctaagtaattgaaaagtgcatatatatatatatataaattaatatcagttgcaaacatatataactcattaaacttttaattattagatattaaataatctttattagtatttatctcaaaagtttatagtctcttcagcaagttttttgcttctaacgattttcatttattcatgaatgttattaaagtatatcaatgttgatgtagattaatagaaaaaaataattgaaaacatgacacaaaatttaagtaaattgaaaaattaagagcacacagattaaaaaagagtaataaatttttactagaaaatttatttatatttattaattatttaagaaaaaaattaaagttagaaaattgtaattgaatataaaagttagataattgtaaccgaaacattttggtcattattatttttagttataaagagcatttatatttaaaaagtgtgggaaaaaaaactataaagggtacaatgtcatttaataggtaatcaattttttttaatggaatcaatgttttattatatatttccgtttttataatttattagtcaaatgtaatttatatgcttttattagtcacaattatttctcttaatgttgttttcacattttgttttttatttgtattttattcactcta

SEQ ID NO: 23598 - DNA, 1132 bp, Cannabis sativa
taaaattattgtaatcttaaattctttttgttgatcgtgtttttgagtttggagttctcgggactaagtttctttttagtagataattaaaagaggagtactaagtataatttcctattacaacctcctactcaacttttacgtccgaaatcatatatcaaattttcttttataatttttttcatagcgatatccgtcatagttacagtatatctctgtaaatttttaaaaaattctgaatagtttaccgtgtttaaaacagggttcttaatattccactttatcacgcttgttcaaaaaacatcaaccgtattttaagtacggtaaactattcgaaattttttcaaaaatttataggattaatattataagcataacgaacacgaccgtgaaaaaaaattgagaaaaaatacttcggtatgtgtttttgagtgtggaagttaactaagagattgtaataggagattgacggcaacactcctctaattaaaatagtgtggataaagaaataatcaattaaaattaagtagttggcattcatctagatttagtttattccccttgagcaaacaaattcaaaatgaactaactctattcattaccatgtatattatttaaaaaattaataagaaaaattgtcaaccacaataattggaaaaaggtcaagcagtatgactgtatacgagtcatgaatgatgattgagaatttgagagtagtatccagattctagatcagtagtacaacaacaacaacgtatccaattcacacacttggatggaatagaagaaacaaaacgatgatagacaaaatgtcttttttatgatccaaatatgatacaaatagaacttcacaaccataactagagatgaaaataaacttaaaaccaactaaattatattcaccaaatgctaagggtctctttcagaattgatccaaagaccaaagccatttgaggaccttctaacattcacaaccagtagatctttgctgccgccctccaccaacgtcgattgtatcaggaaggtatctaacatcaccaacagaaagaaagaaaaacaaaataaggcaaagttaaccacacaaactcaaggcaaagttattaaatagaaaacgaatatacttcacacaaag

SEQ ID NO: 23599 - DNA, 6441 bp, Cannabis sativa
ctgtttcctctctcaccacgcgtctctccaaatcagatgatgcctggtttgacccatcgacgttttcccttttagggcgtggtgtgttaaaatctttggttcgggtgacaccaaaacccatggctcgaactcggccaccatgctcatctatcccgagcgccagggtcagcacgtcccttttaccttccacttgtacaacaccctcttccacttgcttacgtaattcgtcttataaacaaaacaaatagagttagaaataataatgaagcataaaaattaatacaaatgaaattaaactttaaacttacaatccatctaatgatttctgcagctgggccctccaccttgcctttcgtgtttatgtgaagtcttctccagatttcagatctatcaaattaagtaatttggtggctggcctatttctccatctgttattaaaccatccttacacctcctcgtccggtgtgatggttgtaaatattacaagccctactcttttgggccttcttcctcttcacctcaacatctggacttaatctcgaggccacaaactctctccattcttgcaaatcaattattttttcataaagtttgggtgacttctcgagaagaagtgagataaaataaaatattatatttttaagtgatgtgaaagttttaacagccttaaagaatgtaactattggacatatcctaagtatctctctcaccatgagattcattatcagctttattcatgttcaaacgtatccaatgattcctcttttggttttaatttgaattcttggtgaggcttagtcaatgagaaccacattcaacattttaatgtctttgatggtggccaactttgtcaaggcatgaaattaatattctgtttgtgggttacttgttttacagtatacttctagaagtgtatcatttctagtactttgaccaagtaggtttttattttagtcccttaggcatgacattctccaagaacttaatttaccacatgttagaaattattatagatctcaagtccttctacgctctcgaaatacttataatcctgtgataagtgattcatactttgcttcattgttggaggcataaaatttgaaccgagtgcaccatgtatttgatcactttcacaagagaataataacaaccttgcttgaagcaattttcattggaagacttctcagtatatcttctagattgggaaggatgtcatggacttttggtaacctagaaaatagaattatcttagatacttttatgctactaaatttgggtaattagagtgagttgtgttctttgtgtaaatttcatgttttatttcatcattatttgtggaagcaagattttgttaaattttgtgtttctttatgttgggattgaataatttgtttacatatgttgagtcatggctttggtgaggcttacgagtgtgtgcttcgaaaattaacatcttacttagtgtaaatgtgaagtaggattttttggtattattgtagcatcaaaatctcacagcactcgtaccagtagaagtaatatattttaataatgtgggtgtgattattcaaattagttgggaatgagtctaaggttgaggtaacgtgttgaaatgtgtgagatggattaaaggaaaaccttgacacgtggacttaagtcttatgaatctttgtctgtgagaaatcccacctatttctggcaataggagccaagagaaaaaaataatgctaaagtttattctaccatatatcacatgacctagggagaaaataactcttagttgcttaaaattgagaaaagagcgccaatgagtgtacatttctacactccttcctagtcatttattagaggatttagtatttatttcttaaagttttgaataatttgatatttttcctttaagtgtgtaagtttgtgcttaaaagataattttgtgatggactgagatctttaagccaattttatgcaggatagaccttgctactagcttttcaaaatatattaaatcatctcatttggagtttggacgcaaaagttatgcatgatttactgagcaatgtcaaagcagcaaaagaatgacgaaaagtggcctgtggcactatagctccgatttcaaaaaaattagtttttgcgtgaaaaatgaaacctcaaaaaatattgcatggcgcaatagcgtcgcctgtagaattcgacaaatatcttattttaaaaatgtcatatttttcatcttttctgccttataaaaagaaaattataacttcggcttttggatgactgtagatatacttaaagcaactttgagattaaaaaatacattaaagagcaagagagaagaaattccaagcaatcttcatcaactatcattagaatccttttcttcttcttcttcttattttttcttttgtttagttatttaattatgaacatgattattgtggttattatgtttgtaattatgaactaaacactatttttagagtgctgatggaactattttagataatgaattaaaagtttttagattattaccatatttgtttatgaaattttgtgttaatatcatcttgttaattcttgatcaccattaattagtatagagattttaggttttacacttgagagaggtaatctaaaatcagacttagaattgcatgacatagaacaagtgttagatcgagagattccactagttctttgagtttcatttaaagagaatcatattgctttattattgctttgatttattaatattgaatatatatatcttgctagttaatcaagtttattgtatcatcactcgagagaggttaatatgctacattatgattcttgaaactacaaatgatagaattaatttagataattggtaaactgagattcatagtttgaaataaaaaagtcaatgctctaggtctttatttttgattaaaattgttgtttgtctatttacttttctgttattttattattttgttcttaattattatttacttgtctaattaaagcataaaataaaaaaaaagtatagtaattagtgaaatttaataatcaatctttgtgatttcgacaactgttttagaattaaaactttactacaacaacactgtaggcttacagtataaattatgtatcaagtttttggcgccgttgttggggattgaaagctcttaaatcattacttataaaattactaatttttttttttgctttaaattagattctattttgtttgttgttttgtgattcaatttatgcaaagaagtcgaagtgttacaccactcacaccgctgaatcctaagaaagaacattaatgcagttaaaaaaaaaaaagaaaaagctacatttcacaatggcatccattaacattaataacaaaaatggccttaataacaactaaccagcacctgctgcagctgatgcacaattatgggttgttcgtgactattgcttacctgtggtgaaggaaaatctgactggtattgctaatccaatcatcactgccaataattttgagctaaagcctgcttaaatcaatatggtacaacaaaatcagtttggtgggttggctagtgaaggtcatcccgtacgaggacactcctatcatcatttatggcattgatacgaccaatagtagggtcctttatggtaattgtctatacatcctttgtatattattgtatcgttacttacacattatattttttgcagacatgccatctaagatgtttgacaagattggaaagaagagggtcgtcacatctctgatgattcaccttctaaaacaaccaaagccagttcatttaaagtggtagagaagagcgcacaggcttcataggcaaagcccgaggtgacactcaagacagtttggtaataaactccaatatagcaaaacatgccaagtcttgacctcctttttctctgtccattcacgttgaccatatcgagtaagagtcaacccctccaaccaaatatatgccagcaacccatcctcccccttgttttctttttcaattccattctaagttcggttatgcctatggtcacaccaagtcagcagttgctcaaacggataacctttcgaaggagttatctaatttttccaagcaagttgaactcaaagataatttagtagctgagctagggtgagagctaagcactattaaggctaagatcgttggcctagagaagaaactaaccaataggataagctggataacttagagaagcaaacgactcagtccaaaacttagaagatgaaagagaggttgtcaaggtggcgcatacatgtttggccaatgaggttaatgagctcaaagatggtttggccaaggagaaggaagaacttgaagctgagaatagtaaacatgaagttgacaatgccaagtatgaaatgataggcttcattttcttttacaaattctggaagaaaaaaccccctggcagactactcatatatgggttgaagtgagctggaaggatgtttgaacttttgttctctctagtaagctacagaggatgctgaaaaacatgcaagaacggctgctgaagccttggaccaggcggttgccgaccaaaatgctgcaacattaaagtttaatgtgcaagaacaagacaatctcgcaactggatttacaacggtgtgcttaaaatcttggcacagccaaaataatcggtagcctggttcctccaatcgggcactcagtttgttgcaaaaatcaacaaactcaaatttaggttttttattcagccaaacctattccaaatcaatcgtaactctacagaaccatatatttatgagttctaaacataaagatcataacacaaaattacctaatgaatcaaaattcaccattaaagaacaggctttgagtttcaaaactcaaaattctgattaaaatatttacaacttttctatcttcccaaaacaagcatgaattctaatttagaactttaagaaaacacttcttaacctatcaattacaattagaatacaattactctaattagcacactaaactatcatactattcatcaaatttaaaagggaaaaaaacacaaatcataccttaattctttccttcaattccccattgtaaatttctccaaaaactaagattttctttcaaaatcagagagaacaagttgataagtttttttttctttagttcttaatatggccgaaagggagagaatgcaagagaagaaaatgagcttttgatttatctaattttttttatttttaatttctaatttctaattctatttctacacaactcaataataacagataaactcttataatatctttcccattctatggtaattacaaaattaccccttcacagaaaaacatatataaaataaacttaagggtaaaatggtcaaattcaaactaccccacataacacataatttccaatgggccataatattcttagtacctctaaaatattaatctataccaatataacatttttggccaatccatcaagtttttactatttttgaacataaagaatgataaatcacatattatacatatatggtacacacataatttaataaaatctccataattgagaaatattaacatattacgtattttctaataataggccttattcctaaatttcacatattattcataatttactataatataggaattaaatattaatttccatgtctaatcatacggtcattatagaccagatgcatctagtttttgtatctcttttctaagcggtttgttgatgtttactttatgggatgagcttgaaaatatatttgaagctttcttgaagtgaagaataggcaataagtaattttttcaataggaagatatctactttaagcatatatcaatctcttgtcgatagtttatacgggatgctgagtactctcatgttctcaaatcacgatggcattgactatgtattcagttacttctaagtatatccccaaacctttgccatccaaaggctttgaaacgattggaggttgtgcaagttgcttctttagctcctgaagagcttctttatatttcttggtccattcaaaagttttgtttcatcagagaatattgaagaaggggacgcacttcttgttgggaatacttatacaagatcatattatttttcatctaaattattatttaacgtaaataattacctataacatgttatttaagaccttagaattatatgtgagagttttagaatacttatagtggttattgcactaaaaaatatgactcctttcattcaatctaacccttgttccattctgtcgcagagtattagcaatcattcaacccaaatctccatagaactcaaaacaaaccaccaatgttatcacaatcttcctcaatgatgtaggtgttataacagaattctatgtacaagttttgcaaaacttagttggatttcgaatttactagaaata

SEQ ID NO: 23600 - DNA, 3621 bp, Cannabis sativa
  modified_base (3571)..(3572): a, c, t, g, unknown or other
cagagaacctcctacaaagataagaaaaaaataattgtaggtaatagttctaaacttcctatttttaatattggtaatagttgtttcactgctaatcgaatgctatatttcaaaaatatactacatgtgccctgtattgtcgaaacctcgtcagtatatctaaatttactaaagacaatgatctcattattgaatttacctttgatctttgttttgttaaggacatgggttcgaagaaacctcttcttcaaggcactcttaaagatggtttgtattagctcgagtctcaccggtctcatgccaaactctcaccctacagattcaagaatctcacccagctcatgttgtgtcagtgtctaagtctatagatactagttctttttcaaaattttgacaacaattctaccattgtaaatctttggcacaaatgacttggccaccctaataaagttattttgaataaaattcttcagtaatttcaaattcattgctctaatattgaattttgttatgcatctcaacttggtgaattacatcaatttgcattacctctctgtgaaaacatggccaaaaccccttttgatgttgttcacactaacttatggggtccctcccatcaagtttctacgggtggatataaatattatgtgtattttcttgatgaattcactagatacacttggattattccattaaaactcaaatttgaaacaccaaacatatttttgcaatttaactcttatcttgaaagacaatttgggtgcaaagtcaaaactcttcaagctgattggggtggtgaaaatcgaccccttaaacctatacttctaaaacttgggtttgtgtttaaacacccttatctccatacacaccaacaacaaggcaaagctgagagaaaacacaaacatctcactgagacggctcttaccttattggctaaagctaatttgcctctcaagttttagtgggatgccatcacatctactgcctatcttatcaattggcttccaattcaaaaacatgagtataaggcgtcctttgaattcttgtttcataccaaactagattataattttctcaagatttttggttgtgcttgcttccctttcctaaagccatatcactctcataagtttgatttcaaaacctccgcatgtcttttcttggggtacaatcctgctcacaaaagggtatagatgtcttcatccacctggtagattgtatatagctagaagtgtcacatttgatgaacattattttccttacaaaactctctttgctccctctaaatctaattccaccaaatctatctcctcaccacatttcttaccctttcctcaagttccacatctagctcctattccagttatgccccaaacaattcccaaaacttcagcttttagaactcaaacaactaccacatcttcatctcagtcccctcaacctggttttcctaaacctatctatcctccctttactggtctcaacatagattccagtcttagctcaaattttaccaatgctcatcaatctatatgtgttccacccttacaaattgcttcctctatacctccacatcctacttaatctatttcaattcactctatgcagaacagatccaaaaatggcataacaataccaagggcattagtagctaaaataacttttactaatgatgatttttatgaacatactactgtcaaacttgccttaaaatctccaagatggagtaaagcaatggatactgagtattatgcattaaagagaaatgaaatctggaccttagttccatacatagatgacatgcatattgtggaaaatatatgggtgtacaagaaaaaactcaaagttgatggatcattggacaaatttaaagctagaacagttgctaaagggttttaacagacccctagtattgattattttaatacctccagtcctgtgattaaggccggtacaattagaattgtctttaccttggcagttacttttggttggaaaattcaacaaattgatgtcaacaatgtcttcttaaatggtgatcttaaataaactatttatatggcacaacctcaagtttatgaagatgctcagtttcctaatcatgtttgcaaacttcacaaagcaatttatggtcttaatcaagctccaagagcacggtatgacaagtttaaaactgccttggaatcttggggattccccaactccgtttcagatagttccttatttcatgctcatatagacaaccagttgttaattgtgcttgtctatgttgatgatattctcattactggtgcaaatccaaggagtattcaacaaattatcaccaatctccacaaccagtttgccttaaagattcttagaccagtgaacatactttcttggatttgaaatcttgcaaactctcaatctttgtcaagccaaatatgcccaagacattctcaaaagaacaaatatgcttgactcaaatacctttactacaccaatgagccctagctacaaactatccacttcaaaaagtaagtcattctcagatcctattccttatagaagcactgtaggtgcacttaagtatctcactcttactagacttgctctatcattttctgtgaataaattgagctagttcatgcattctcccactactaatcactgatgtgcctaaaaaagggtgttaaggtacatacaaggtactctttccagaggcctagtgtttaaagctgtaaaatgattgacccttgaagggttctcaaatgctgaatgggcctgtgacgttctggatagaaagtttgtcactggttttgtgtaatgcttggagggaatcttattgcatgggcttttaggaaacaaaaagctgtctgaaggtctagtactgaatctgagtaccgagctctctccactactactactacagaactggtttggattttttatcttcttcatgaattgggtgtcaatttacctcaaaaaccaaagttatggtgtgataaccagggagctcaaatgcgagcatccaaccccgtttttcactcaaaaatcaaacatattgaagtagatattcattatattagggatctggttttgaataaacaaattgacgtgtcttacatcccttttgaagaacaacatgcggacatgtttaccaaggctctcacatttccaaagtttaattttctttgtagcaagttgtccatggaatacttctcgatcgaatagtttgagggggcatgttcgtgaaatgaatgacattgttattaacaactaactgtctaggttagttagttagttgagagtccttttatttaggttattacagtcttggtgttcttgttgtttagttctcattactctgtataatttctgtatcattctttaattgtgtaatgaaaaacacgaattgattctctctttcttcttcactctctctttttctttcttgcactctgtttctttgattctttgatcaaagtcaactatatcaatagttggaggttgacaatatcgaccccttcttaatatattactattaaaaatcttacttttaattacaactgaaattctgtattttaatatnncctgtttaattatttaattaagtgattaattaaatgcggaatgaaactg

SEQ ID NO: 23601 - DNA, 6514 bp, Cannabis sativa
aaaaaaaaaaaaaaatccctcctaaccaacaggaaatttgtccaaggttgatgatgatcgaaacaatagtagtcttcccaaagagactaatcgttgcccttggaaagaaccaatgggttcacaaaggtcacctacttcagaaacaacacgttcaagaagaagccagggtggtcatgaccaaaacccagaagctgggaatgaggaaaccaatactaatactggtggttatgtacctaggagcgaggatgcctatgatcccactaggtatataccgttagtagaattagaaaatctacaactggggcaacgtctagccaagcctaaccaacaaattgttgagttggagagagaggcagccccagccagggaaactcaaggaaacaatgcacaaaaccaacctgatcctagagtgagaaggccacgaggtagacctagaggtttgagaaccaggaggcagaagacaaatgaagaaaatccccagaacactcaagaggaacaacttggggaaactagggatgttccagaagacgaacaacggaataatcaggcaccttgtcgggaagtacttcaaagataccagggatttacgaatcaggggaatgaaaataatgacgtgcctgaatcttctcatcaaaacgagaacataaggcaactaagaactagggaacaagagatccctcgtaagaacgaaagaaatcctgggactcaacctaggacaagcgggttaccgccaagacacccccattatccttctcgagctgatagggtggaggcatacacataccccagcgggggacgtgtatctaacccttcccgaaggagaaagcttgtgtaggacgaggcaagttctagctcgggatattcaagatcccgagagcacagtcgatgagaaaggcatatgcgaggaggagatagacctcgtcgtaataatgagtgagagagtaggagtaatacgaggagctgtcaatctgagagttactctgaacaaggtctgtgagtaaccatgaatgaagacagccaattcttcgtgaacatcaaaatcaaagacaacctgatttacgcaagcgcttaaatcagaatgcccctaatttacgccaacaactcaatgctaattggaagcaagaggatccaatccaattgtgaatcattgacttggaagataaattcaggagataccaagatgggcaatacgggaaactgcttggttatgactcggacaacgaacccaagcctttccatccagacattgtgaactctaaatttccccagggatttaaaaaccctcacgtctcgttgtacgatgggacttcggacccagtcgctcacctcaataatttcaataccattatgcgacccaaaaatatcttgaataacttacgctgtattttattccccacctccttgactggggtagtgagtagctattttaataagtttacccatcattcaattacttcttatgaacaactgtctaaggatttcaagaaacaatttcaggcagtaagagatagatgacctgaagcatcctcccttactaacgtaaagcagtaaccaggggagttgcttaaggcttacctaagtattttcagtactactgctgctaaagttaaaaacttgaacaacaagtattcaacttactgctcttcaatctgggattacgactgacctcgcaatagttggaggcgagttgtgggaaggtttataaggtcgcccggtaaggaacatcagtgagttcaatgaaagagctcaagtgtttatacggaaagaggaagcgatgaacgagatgaaattattaaagactagcttaggaagtaaacccagcactgtctcggcaagcaccgttttgacaaaggttgacaatccaggtggctctaacaccaagagaaaagatgactctagagaagcaaccaaagataagaggaaataggaaaagcacgataagtatgtgccgatttacattgtttataccgagcttaatgaaactcatgaaaacatctttctcacaaatgagcacagggttgcatttcgcaaacttgagcccatgagacatgcgagaaacaaaaaggatccaacaaaattctaccaatttcataaggacatagggcatacaacggaagaatgttgtcagttgaaagacaagatagagagccttatctcgcgcgattattttaaacagtatgtaagacgacatggtaatagacaaaacaagacaaatccgcccaataacccaggcaaccaaagattacaacctcctcttgtagaaggagaggacatactggtcatctcgggagggtcgtatctcgctagagaaagcagtaatacctacaagagatatgtcaatgaaataaaaaatgagcgatcaatttttgctctagaatcatctaagaaagtcaagactgaagaacctccaattgtattttcagaggaatacacaaagcacgtgagttatccgcacgtcgatcctcttgtcattacaattcagcttgccaacaaaagagtaaatagggtgttggttgacaacgaaagctcagtaaatatcctttacaaggatacactgaggaaaatggtattgcaaaatgtaaaattaaaaccttgtatggtgaatttatgcggatttactggagatagttttgccagtcaaggcattatcgaactcccattaaccgtaggtgagccaccattatccacatcattgatgaaatattttctagttgttgacctacaataagtttataacatactgatgggtcaccctgcactgaatggactaggggcagttagcttaatcaaacacctatccttaaagtttcaaacaccggcaggtgtaggtgtagtgcgaggtgaccaactattgcctcgtgaatgctatcgtgtaaaactatagaatggaagggccaaccattagtcaatggtagtcataacagaggaaggcgagaagcaagaaaaagatctagatcctcgaattcaagacaaaaataaccaattgaaaccaatccaggaactacaagaagttgttttagatccaagaaatcccactaaatgtgtgtttattgggagaaatttggatgaaaaactaaactagcaactaataaattttctgaaggcaaactaggatcaatttgcctggagccattcagatatgatagggatcaaccctaaagtgatttgtcatcatttgaatattgaccctaattacccagctatgagacaaaaaaggcgacccttagatactgaaaaacaaggggcacttaaggaagaagtggacaagttattaaccaatgactttatacgttaggcattctatccctcgtggatatcaaaccttgtccttgtcccgaagccaaatggtactaggagaacttgtatcgacttttcaaatctaaataaagcatgtccaaaggattattttccactaccaaggatcgactagttggtggatgcgattgttggacacgagctaataaaattcagggacgcattttttggatataactagatcaagatgcatgtccctgatctagagcgtacaagtttcgtaaccaacatgggactttattgttataaagtcatgccattttttttgaagaatgttggggcaacatatcagcgacttgtaaatggaatattcaaaaaacaaatagggaggaacatggaagtctacgtcgatgatatgttggtaaagtcgataaagtgtgaagatcatacaaaagacctcgaggagtgctttgaaatactcaaaaagtataatgtgaaactcaacccaacaaagtgttcctttggagtctccttggggaagtttctagggttcatcgctaatgtgaggtgcattaaagtgaatgatgaaaaaaattaaggctttgatagagatgtcatcgcctacaaagccgaaggaagtctgagccttaacaaggagaatgatagcactaaacagattcatcttgaaattagctgacaaatgcctaccattccttaatgtgttgcaaggcaacaaaaagtttgaatggacagatgagtgtgaggaggcctttagaggcataaagaaacatttatcaacacctctagttttggaaaaaccaataactggagagactttatacctcgacttagctgtctcggataatgcgatcagtgcagcattggtgcgagaagaggaaaagcatcaacaacctgtttactatgttagtaaaaggttacaagggcagagtcgagatatcctcctcttgaaaaattttccctatgattaatccatgcatctcgcaaactagggccttacttccaagcatatcccataaaggtgttaactgatcgaccattaaggcaagttttgtcaaaaccagatgcgtctgggaggttgataaaatggtctatcgaactggggcaattcgacataacttatcacccaagaacatccatcaagggccaggctttggcagatttcctaatagtagggataacatatgaaaacccacttatccagcgagacacagaaacttggaaattatacgtggatggagaatctaatgaaaatggctcgggtgtaggggtaatactgatctcgccaaacaactttaagtttcactatgccctaagattccaatttgactcctcaaacaacgaggccaagtatgaagctttaatagccggtttgaaaatagctaaagttttgaaggttaagaatttgatgtgctatagtgactcacaattaatcgtgaatcaagttctaggcgaatatcgggcaaagggtttaaaaatggctagatatttggagaaggttcggaagaacttggagaagtttgattacattaaaattgaacaaatcccaagagaacattactcaaatgccgaagcattggcaaaactggcctctcaaaatgaacttgataaactgaatttgataccaattgaggttctaaatgaacgtagtaaatgagacccacatggatgacacccatagttgactatctactcaacggacaacttccaatagacaaaaatgaggcacgaaaactcttgtattcaatacctcgctacacggtagtagaaggcaaattatacaggaggggttattcaatacctctcctacggtgtgtgctccccacagaagcaagcaagataatcaaagaaattcacgaagggttttgtggagaccatgcaggttgccaaagcttgccaaagaagataatccgacaaagatactattggccaacaataaataaagaccttatttttcctttctttatttcattgaagatttcttgaatttttatacatagtctttgcaaagacactttgcaatgacacaatccaagacacaaacaaatttgtttctagaaatctcaaatttgagaaatttaacccaattttttgttttttttttggaaaaataatatatacatgtattttattttcttgagttccatacattataattatgtatatctagctactttatcggtggtcttaagtggaattattagcttgaaattgttggcttaattattgaagagaatgacgtgacttatttctcttagtttacatatttaaatattttgtaactagatgttagattaatattggtttaaaaaaaatgaagttgtattaatacttgatgttataattttttaaagaaaaatacttcagataataatttcacttgcttttctcttggaagtaattctaagtagtttttccttttttgttattttaaggtagatgttgggaatatttaccaagatcaagatttactaacaagtacgttaaattaacatcctaaatatgaatatctaaaacaatgagattaaacatataagagtttagaaaaccttacattgattgcagaagaatataatgtctccttccgctcagatctctaacccttgatactttctgtcgcagagtattatcaaggtcaaagcatggatctctttctctccttctagttagttaccaacgtctttccaactatgattgagtacttaacttgctatgtgtgggcatgccactctatcactatgagtgaattggataaagaacaattaagaagggttcaaatcactagaaagtgtctctcatctactagttgtctaacaaagttagaaactagatttggcaggttgaagaattggatgagagcatcatgttccttttatagtgtttcaactagggtttaggtttgaattatatgaattaaaaaagaataaaatattggggaaaaattactagaatggccggccacttaatgaaccactttgtagttacaattgaaccactttatttcaaccagttattcatctttcaataataccatatttttcaattttaatccgtcaaaaatatttatttaataattataattaattatcaaataaattatcatttatattatttattaataagaccattcaaagtcacttaattaataaattaaccccaaaactccttttctttaaaattaagttcttgcttagtgaaaattcataaataagacagtctagttttagaattataattgatt

SEQ ID NO: 23602 - DNA, 3115 bp, Cannabis sativa
gagcattaatggtaacattgactttataactaatttgcacattctgcaatggagcaaaaatataaaaactagttataaaagtaattttattgtgttgttaaaaaaaaacaattattgtcaaacttctatgatagatttaaccattactttaataatgaaagggtttaaaaaaagcaatatccaatataatctaattttgatgaactagttaatccaattcacaaaatacggatatttacatttattaacggtgaaagtggttagaagttgctcgttagattggcgagatgaaacaagagatgagtacaataaatagagacaaaaaaattatagtagttcactcctcatgtcataatgataatggagttacatgtactttgagtttttatttctcacgagaattaaaagagaattgactaagtgtaaaagctctaaagttttagagatagaaactagagacagattctctaaccttatgataacttttctgaatgtgaaaatgagctaaaggagcacttttttttataggaaaggaggtcttattaatataattataaaatattaaaaaaatgtgaaaaaatacatgtaagctatttttgaccgttaatgatgatctaacagtaaaatttactctggaggtcggtcgtcaatttttgtaatttgaatcgcgtccacaggacttttatcaggtaagttgtagttgaaattcataactctcttcaggatgaaatatgggcttgatatcttcagatttgcaattggaataatgtgagatatgacttgatatagaattgaaataaattcaaaactcaagttgaatcgtgtcaatcagatcattattgaataagttatggtcattttactaaaggtgactctcataccagttcgcaggttcacataagatgtcaacttaaacgctgggtgagtggaaaatcgtgctaggaatatattttttgttgcctaagtaatatcttgacatcacttagttaattttttcattctagtgaagtcgttccccgattctcagatatgttgctcttttgctgaatcaggagactagaaactgtctgattttcaattaagggactttgccaaaaaagtaaaaatataaggttgtgaatttgacttgtctaagttcatagatcttgtttgatttgaaaaactagatgaacgctcaagacataatcaaaatcatataagcagaacacagtgcacaaggccatatgtgaacctggccactgggtgctcttttcaaagcttccaggatgtcattttaatatttctaaggtcttaaaaataaaggatgaggtctcctacctagtttttgaccatgatagagcgaatgcccaaaggaaaattggcattttgagtgatagaaaccaacacactaggttgaatgtgaacctatgcactgggctcagtctttagcccttcgggattcttgttttctcctcaagtttacctatatctttgttatttttaatggaaaaaaaattacctagatcacattttttaggaaaatgattagaaatggcctaattgacaaaatgtcaacttgggcggtaggcccaacaccaggtgtgaacctaagcgttgggtccagtttttggcaacgagatgactcagtttgatttccaaaaagacttgtatcttaaattttaattaaaatagataatattcctagaataatttttttaaaataatatatcctttgaaatgtcccaggttgacaaaatttcaagttgggagttaggtccccataataggcctctaagtcaatctatgtctccctcaaaagcatttctttgttcattttcaatgaatacaaagaaagtgattgggatagttcttttgtttgatgattggaagtgccccaagttgaaaacatgtcaacctgggcattgggtgcctaaggcacctagtgctacgggtgctcaaaaatgaaataactccgaatttgattatgatgccttaaatatgttcgtgacatgtataattcatgttccagtacaaatttttattaagaaggtctcgaaaactgaaaccctagttagaatatcaacctgggctatgggtaaaaccctaggcgcccgggttgacttccgaggtgatgttttgtgtatttttaacttttggtccttagactttgattcttcttgacttcattacacagaataatgatgaatggtgacttggaaacaacttggtgaaattaaataatacccatttcaaagcctttaagtcaacctaggcataaggctagggaccgattcccatgttgactgctatgactcgagttccttcactccaggaatgtttttcttcttgccacgtgtcaaacattgacgtccatgttatcaggctactttttgtgtaaacatttttctccaagtaaaatttacacttgtgtgagattgacttcataatgtgaactacgtctgtttgatatgaaactactaggtgggcatcaattttaacaatcttagcaattgtcttctcattgtgttcattagtagtttcctttgatttgagacaccgtgaaatcgtgttgatacgaaaatgtcaatgccaactttgatctttggctattttcttagcattggtcctcttgtcacattgcttgtttaagtaatatggatgtactctttgttttctcataggttagagccttggatttctttatcgttccctcaactgtacttatagcagaggtggtttttctcatatcgttagctttatagcagaggaggcattcttcatgtcctcggcttcacagcagaggaggccttcatcatctctttagctttttagtagaagaggtcttcatcatctccttgactttataccagaggaggccttcatcatcttcttggctttacagtagagaaggtcctcatcatctccttagcattatagtacaggaggtcttcaaaaatctcctcgactttacagtggaggaggtcttcttggtgatagtcaacaaaatgttgtagcaatcgttggtcattcttcaataaatttaggatgtgaacaactcccaaactaatatatctaagatgaagggtgatgtaacaccctaactagcataggcgtgtttacgtgatttttaaacgta

SEQ ID NO: 23603 - DNA, 1453 bp, Cannabis sativa
cttcttcttcttcttcttcctccattaataacactagttctggttctgatgggggtgatgttcataagcttaaacagctatactcatgggctgatcataccttgattcaagatgttattgtagctgttgaccatgattttcataaagcctctactttgttacaagccatgaattccccttcattatcaacaacctatgaccatgaaactaataagtaccgaaacagaaacccaatgttggaagaggaaacttgttctagtgagggtaataagaatccaccaattcctgtcattgaaagcagatttggctatgtgcctattgagcctgaatgggaaggttatgactatgatgaagatggtgatggtggtgtttacttgaagcatagaaaggaggccttgagagctatgaggtgtgtgtatgtatgtcatttttgtttgtattctacctttataaattattggctaactaggattttactcttaactttgatatagtattaaattgtgttttctaaactttttaggtagttaaaagttttctaaaactactgagatcgttgagattgttagattgaagaatgagcacgatttagtaaatgccaaagtttaagaaaaaaaatgttaataagtctaaaattatatgtatgtttctttttatgtatattgaaattgaaagagtgagaagatatatgaattgggtttggtttggtttgaatagatcagcatcacaacattcaaaggcagcaacaaatgcatttcttaaagggaatcacagttcagctcaccaacattcccataaagcacaacaacagcggttagctgctgaagcactaaatgccaaggcagccaatgatatcttaagcttaagaaacagccaaaacaatgtgtggaatcttgacttacatggtcttcatgcaactgaagctgttcaagccttgaagcagcgccttcatcgaatcgaaactcagctcttgtccaataacagttctttttctacaaacagaaggagaactgtaagctcttcttcacttgaatcaatggagaaagcatccttaagaggacagagaccatcatctttacatgtcataacaggtgttggtaatcatagcagaggaggacaagcttctctaccagctgcagtcacaggattcctcaatgaaaatgggtattcaataactctactttatatcattgttgttttgatgtttggtgatgataaatggattgattttatgttcatcttttgtaggtatcattatgaagaattgaagcctggtgtggttacagttcggcccaaatttcgtgttttatagttaaacattgtagattatttgtacctttgtattgagtttagtttaggacacccaatgattgaatatgatgaactaatgatttgttatttttgtttgaaaccatggtattatttgtaaacaagttagacagacaggtagggt

SEQ ID NO: 23604 - DNA, 2844 bp, Cannabis sativa
  modified_base (29)..(30): a, c, t, g, unknown or other
atagaaaagattacattgaaatagagttnnatttagggcacaaagtccaacacatgcctctcaattattgtgaaaaactagatgaagggtcgagtttaaatcaaatcagataagcagaacctaacgcactagactatttgtcaacttggccgctaggtgcttatttcggagcttttgagatgtagttttaatacttccaaggttctagaacaagagcacaaggtctcctaccctatttttaactgttatggagagaatttttggagcataattgtcatttgagtgatcgaaaccagcgcatcaggttgattgtcaacctgggtgttgggccttgcaccaagtcaacttgggcgctgggctcaatttccaggccccgaatttgtggttttctcccatagtttgtggttttctccctaagttttctctatcttcattatttttgatgatggaaaaaatgcctagaacactttttcgagaaactgactggagatggcctagtgtgaaatgtcaacttgggtgttaggtccaacttaaggccatctggaagttctatttggtccctagaaatagttaaatctcaatccttgctaagaatggagaatatgctcaaaatagttcttggaaagaatcctcataattggcccaggttgaccaaacatcaacctaggcattgggtcagccccaaatgtcaacttgcgagttgggctgtgattttggtacccaagaagtgttgtttattccctaaaagcacttacttcccttatttttgatgaagaaaaataagatgcacgagtcaaatttttgatttgatacttataaggggcccaactagacaaattgtcaacctgggcgctgggtgcccatgcattgagtgctgtgggtgctcaaaaataaactttcttcaaatttgattctgatgcctcaaatatgtctatggtatgtctagttcatgttccaatgcaaattttgacccattttcactaagacaatcccagaaactgaaaccctagttgaggatgtcaacttgggcgtaaggtgaaaccgtaggtacccaggttgacttctgaggttttggttcgtgtattttcagctcacaggggctagatttggttgctccatgtcttcatggtacaaaatactaaaagatagtacattggaaatgagttatcgaagtttgaacttctattttagagtttccgaagtcaacttaggcgcagggctagggacccctcctaggttgactgctatgactcatgattactcaactttgagatgtcatcttttttggcacatgtcaaacattaatttccacgtcaccaaggaaagtttttgggttaaaattttccccctaagttaactttacacttgtgtagagttgacttgatgacgtgaacgagcccgtttctctcaaaactaccagatggatatcaattttgataatcctagacaattgtttttgttcttcacattcctaatagaagtaggactttgaattcccctgttcttgtatatgggaattttcaaaaattgttaagcaaagaaaaataggaaaaactttcgattttttcatttatcttttatctttttgtttgaaaacttaaaatttttatgtatttcttatagaattaggactaattggatttaaatcccactcctatttgaaattccatttgtaattcaaagtagaaaagaagaagataaaatatctttgatcttttgcttatcatttatctttttcttattaactctagcttttccttaatcttcatagcattaagaattgttttaccttttaaattaagaatttctattcctattctcatacgaatttcaaaattcaaaactagaaggagaagagaaatatttttcatctttttcttatcatttttttctttttcttttgagctttaaatttaaaagactaccaattgctttaggattaggagattaagctcacctataaataagagagctttcaatcaaaaattttcacttcccatttagctttccacacccaagcctttgttgagagccttggattttatttcatcagttctacaagcactctttatccatcaaggtagaaaaaaaatccttttttttttctttttctcttctcgatggcgttttttttttttttttgaaaatttttcttcttcttatcctttgttgagcttgcatcaaggattttagaactcccaaaaatccttgaattccttatttgagaccttcaaatgtccaacactatctttgtgagttgagaattctttcttctgaaataaccttcagtttgccctttcaaagccaaaaaaactttccttgagttataagcaactgaattttgaagtcaccatgcctcagatgaagagaagcagaagatttcctgatgaatatgatcctcatgtggctcatttcgttagagctaaattgattgtgcctaaggctaagaacatagacaaggcatatgattggaaagtaacggcaactaaacttctcaaagttgtcattgagagtgatgacccaagagaccggacttttaagtttagacctcttgtatttagcaccatcattaaaaaccaagcacaattaatcagagatgattatctccttccaaaaactgtcatccagaagccacgatttgaatgtcctactagctcccagaatccttgtttcaatgcctcgttgaagttccatatgaatgtgggtgcttacttgcctttgcacctgtggtttatatcaatagatgacttctttggagtttatgttagcctaagatatgtttccaagagggggtgaattggaaatttaagctgatttcataaatttaaaaaccccaaagacaat

SEQ ID NO: 23605 - DNA, 3918 bp, Cannabis sativa
atatacatatatagcagttgatatgttttatccacttttcctccttttcaacaagagcacttgaaagaaagtgcgaaaagtacatgttcaacacaacctcttaccaaacaagtacccttccaaaatatgaagtagtaacataataattatttggttcaaaatgacaataataatgtataattaattcttcctagtttcaattaatgttattccattttaattactataatcacattaaaaaacaagctatctggcaaaatttgatcgagacatttgtcattgatctgaaccatccaaccaaggagtgaactgcaatgattggatatagatcttatatataataatccctccatcacttttaagtaattttagttaggattattatcgaataatatcatgaataatttataagtaatgtatatattaatttgttacataatatatatcaattagaattaataaataaatgagaaattttataatgcagggtcaacgtaaggcacatgatttgaatgattagagagacattaataaaacttgatatatagttaatatggcatcgtgtaacattcacaaagatatacttatccaatttcctttatatatatgtatttttaaaatgtccaactactatttggttagtttgaatagttttatgtgataaaaagttcattatatagatgtaagtttgttattatatatctttgacccatactagctactgcttttgttatagataaattctgtctcatcttcttctttacttacaatataagacaatcaatcctcgagatatattctagttctaataatttaaggacatgtaaaatgtgacaaatttaaaagtaaatcgaaatttcaaaggagattgaaactacatatcaataaaattagatagtactactactagcttgtacaatatcagtagcaattttttttattggggaaatggaattccagttaaggatctcctttttgtgagaaaaaaatgcactacctagtaaattatgaccgcattaattaattaaaggttattctaataccatcttcaacgaaaatgtaaaaaatgttttttatttagcgcgaaaaaaaaaattgtattaatttttagtattttgttccaatctataattattgatgtaaaatttaatatttaactaatattttatttaaaaaaaaggtttctcgttcttaaatttatagctacaggaggttttttttctcaaggctcccagactttccttgggcatatataggtgtggcttaatcggggttgtattttgctattgggattcaattttcgctattgcgattagtcttgtctctatgacatggttttgagtattttaatcttatctcagtgacatggttataagtattttagtcttgtctatatgtgtacatggttttgtttcgttgatggttcttctttgttctttgatagctcgccatcaaatcgatattagtggttctgcgactaaaggggttgttagtagtgcagttatgtaccttacacaatagttgagtgctgatcaagttacaatgttgaatgaacctgctgtaacagtttctattattgtgtcttctctgcagtagatggaactaaatacaatgtgtccttaaagttaattgtgatgctgcaatcttttttatctgatttattttttagtttttttgtcaaaggatatgggaattacgcagctaattatttgatttatttttttttttaattttaattctgatcgtgtatcgaatgaggaaaatattgcaagttattattttagctgattgttattaataaaattgcatgatttattttaaaaaaataattttatcatcaattctattatgtaaataataaaaatatatatttatatgtatataattagtttataatttaataatatagttaaatatactaataaaataatataaatgtaaataaaaaataataaatttattgttatgaaaattttacatcataataaatattgtgttaaatttatcacaaaattttttatgtgctaaatttatatattttttagcacactaataaagtacattttcactttccatctctcatttacatctcctctaagcatatgccatgaagattattctaaaatcaaagggtttttttaatgcacaattgaaatctcaaaagaataatatattttgtttagagaatatatcatcactgatatatgtaattatatgcatgatttataataattaagcatcatgacataacttgtcgacatcgatcatgcattttctttcaataaagataaaccaagttaatcgggtaattatataaaaatgagtggttggctggaaatccttatatccttacccctagctaattaacttattactaatataacttgtataaattaagtagtactcactactcgatcttttctaattaaaatggcaacagttgcactcaagatcgatctataataatatcgtgcctatatataaagagtggtcccaacggcatgaaatgtagagtgaaatttggtaaagttgaaaaaaaaaaagaaaaaaaacctctaatcatatctattgagaagtgttaaaaggtaccaatagtaacagtgtcgagacgaaggaactgattatcttaagtttaaaatataattaataataaaataaataataatacccataatattaaatatgtgttgcggctcaattataactttattagtttaataactaagaggtttagagttgaaatctcaacaatctcatttttttttttccgtaggttatttttttatttttttttttttgtttaaggtccaaattaacataggatcgattattagtaatgtaactctatataatttaatttaacaatattgtgaaatatccaacacctatgaaatggtatctaataacaatgttacatataagtatataagtgaatatatacatataaattaaaagtatataaataattgctcgttatttatagaacattattattcggtattagtattcggtacaagtgttgcttaacattttttagacgtgttaccttgttactagttaacaatccttctttaataattattattacataaaattagactcgacacttaactttactaataacaatattaacattaacatgtaaaagaatgctaggtactataaatatcatttaatatttttcttatttatatgaaaaatactaaatgatacttatagtgtctaacatttttataatgtgtaatatcactattgatataattctataggagatcttatatattttattttaataaaatctataaagaattactaccaattataactataacaatataaagcacatagtggataaggagttaataatgagccaatagaattccgagtttggtgaccgtgtaaaaagcttcacaaaagttgtgtatacttattattattgcaccctccgtttcatcatcacaattatttggcaatgcaacttctacggaaactgtccattgatggctataaaattaatataatatacattgtataatatgtatatataataaacaagttttacccccactacatactatacaaattaatgtgacaaacaagtaacgcatctaaattttcttggttaattagctagctatagtatacctaaccactagtattagttattatttgggtggtaattaatgaatttaatgggatattcatcactaatatattaattacttcataattaattaagcaacaaggaaaattcgtcaatgtatagggagttaccaatgaccatatctcgtactatttagtaggaaaatgagctgtacttaatgtatataacaaatattaagagtacgtaattaagtagttaaacagtgtgaatataaggcaaattaatgaagtggaagaaagcaaaaatataggaga

SEQ ID NO: 23606 - DNA, 2198 bp, Cannabis sativa
attttacgactgtcgtataggcgacggttatagaaaccgatgggaatactttaaacgactatttaaaaacgtcaggaaaacctatttttgtagtagtgggtccacgattgtgttgattctgatgagactgagctccgagttcacgagtgtaatttccagtatatcctcctcttgtgttactgaagttgctacgattttgtgctggatatcgtgagttgcgattatactgagctatattcgcctcaaagtccagatttggatcgatagagtaatcaacttcagttttggccaagtttgcactgatttcgtgttcttgatcagtcttttcgattcttgattcagatgcaagaagtaatgcttcgatctcagcgacagtgtagccttctattcttgtgttagaggagatgatgaacgtgtcgtattcgttgggtaatcctttgaaaatagtcgagatatgatcacggtcattaagcgtctctccaacactagccaataaatctacagtctgtttcactttgagtaagtacttgttcaacgacatggatccctttcgaagattttgcagtctggtgcgaaattccaagatcttggaggaaactcgaagagtgaaatacttttcaagtgagctccagatctgtcttgccgtgttgcatcccaccattctggtgagtaggctttctgtcatggaagatagaagccaagaaacaagaagttgatcctgtacatcccattcgacaaaagttggattgtatacactgttggcttgatctgtatcattgaggaattgagaaggaggtgccacattttgaatgaacttcaacagacgatttccacggatggcagctaacacctattttttccaaaaaaggaaattgtgaccagtaagtttaatggaaatcgaatgattaaaataaactggtgtattttcatctagatctctgtttcaatttcaattttggttgttaatttgattttcaccattaacggttgttcctcctccatttgcagctgctccaggaccaacgttggccatattagcgacgagacgaggccacagctctgataccatgttaggagagttgaatctccttgacattgttgaacatgaaacttaacaagaacaaagaacagagaaggaaagagagaaaggtagaagacagagattgaaagattgagtgaaagagttcatttcattgattatcagttagtacagtatttatacaagatgatagagttcaactgatcaagatcagttgttaccgaattgataacaaccataacagaatacaccaattgaagcaacagtaaaaacagaattgactgaattaactgtaactaactatgagactaattgaatactcttaacagggggctatagccccagtaaaaaaaaatagtgttaaaaaaaattaaatatcttctatttagttaaataattatacaacaaaatactaaaaagctcccacaaaatatttataattttaatataaagtaaataataaatattcttataacaattaagccctaaagattaaaaattctgagtccgtcctcttccttgttgaaaaataagaagaattccctctaccatcttctttgagtctccaatgcccttttctttacgaaacacctctcaaaattttttgagccacacatggtggcatatccttttcttcaatgcccttttcttctaatcaacactgttttgtataccaaactgtccagggaaggatcctccaaaagctcaacaatgtctgaatgatgaaagtcctcatcatcattccttttccctcggctcaacccctctagggtaatcaaactcctcaatcaccagttcaaaccaagcaagaagggagaatcgcaagctcacatagtcgcacaccatacacgactctaatcagagccattattatagagtctatagattaatatttggacatatcattttttggaataacttttttagaaattgcttggacgacttcttaacagtaattttttcaagcactggtcttaatttttacaggaaattttgccataatttttttttttttttagcgaatctaattttaatttgaaacatttttctttcattttttttgggcattttacaaaaatactggatttggggtaatacttttcaattttactgccacacgacagaaataacatttatactgtcctctcccatttttttt

SEQ ID NO: 23607 - DNA, 6304 bp, Cannabis sativa
  modified_base (560)..(568): a, c, t, g, unknown or other
  modified_base (3261)..(3266): a, c, t, g, unknown or other
  modified_base (5843)..(5845): a, c, t, g, unknown or other
  modified_base (6258)..(6271): a, c, t, g, unknown or other
agtcagagtttgggaaaggtaaaatacattgccaaatagggaaccgcccaaggcggggatgaagatgtggatccccgactttgggaaccgaatacatatgttgggccagtggaagaactaaaagagattagaatcgactcaaatgttcggaacaggaaactcaaaattggaaaaggtttgctactcaaagtaaaatcagcattgataaaaattttaagagcacacctagacatttttgcatggtcggaattgatccttctataatttcacacgccttgaatattgatcctaatttctattctgttcaacaaaaaagaagattgttagataaagaacgggccctagccctaaaagaagaggtagaaaagttgggcaacaataatttcataattgaagctttctacctggcctgggtggctaatcccatactagtgcccaagccaaacaaaaaaataaatggcatggcgagtagtgtgtatgtattgattgacttcaccgacctcaataaggcgtgccccgaggactgctttccacttccaagaatagatcaacttgtggannnnnnnnnaggacacgagatattaagcttcattgatgcctatttaggatacaatcaaatcaagatgcatccaccagaccaagaacatacaattttccaaacagatatgggtctgtactgttataaactcatgccatttggtctcaagaatgccgaggctacataccaaagattggtaaataaaatgttcaaagaccagatcggacgaaatatggaagtgtacgtggatgacatgctcgttgaatccaggaaggttggggggcatataaatgacctggacgaatgcttcaaagtccctaagaatcaaaacatgaaactcaaacccttaaagtgctcctttagagtcaacttgggtaagtttctgggctttatagtcaatgtcggaggaattgaagccaatccagagaaaattcaagccctcttggatatgaaatcgccaacaaaaaccaaggaagttcaaagtctaactggtcggattactgcacttagtagatttgttttaaagtcaacagacaagtgtgtttcattcttcaacatcctgcgaggaaataagaaatttgaatggacggaagaatgtgaaaaagcctttcaagagctaaaaatgcaactcacaaaacctcttatactctcaaaacctctggatggagaagaattaggaatatacctgactgtcacggaacatgcagtaagtgtcgtactgatcagggaagagaacaacatccaacgcctggtctactacatcaacgaaacactcattaaagctaaaggtcagtaaccattgatagaaaagctcacctattgccttctcctagcaacaaggaagctatggccctactttcaagctcatcttgtttgggtatacactgaccaaccattacatcaagtattgtaaaaacttgatgcctctggatggttcctcaaaagggtagtagagttgggcccgtatgaaattatctttcagccctgaacaacgattaagggtcaggcatttcagaaagtaacccagagccagtacaagtacctcagccgagcaatagtaaagacaagccaacctagaagctacatgtagacgggtcaactacggatcaactgtctggcacaggaattgctcttgtcaaacttggggggtaacacctgcacgctgcggtcaaatttggatttaaggtatccaataatgaggctaaataagctcttattgctggcctaagacttgctcgggagatgaaattcgaacacatggagatctgcagtgactcatagttagtggtaaatcatgtatctgacgagtacaaggctcagggggagaagatgatagcatatctaagaaaaatacacgacctgcttgaacaattcaaaaactatgctctcaagcagattccaagagaagaaaacacaactgctgatgcagtagcccgacttgcaagcaacatcataaatgataaagcaaatctgattcccatctaatttcttgaaaaacccagtatcatcagcacagaggagattgaaatgattgatagatccccaaactggaggacgccaatagcagcctacctcaacacttgggaacaaccatataacagaaacgaagctcaaaaatgaggagaaaggctgcgcggtacatcattgtagagggagttatgtaaagaagaggattctccatgccactacttaggtgtgttacacaagaagaagctacacgacttttatcagaggtacatgatggattctgcggcaaccatgtagatgggcagagtttgtccaagaaaattctaagacaaggttatttctggccaaccatgattgaagactccaaggtctatgttaagaaatgtgataaatgccagagattttcaaagataccttgtgcaccgcccaacgaactaactcagatgcaaaatccttggccttttgccatttggtgagttgacctaatcggaaagttacccaagggaaaaggcagagtgtagtacgcagtggttgcagttgactatttcaccaaatggacagaagtcgagccacttacaaccatcacgtccaataaagtacaagacttcattgtgaagaacttaattttccagttcagattaccgtataagatagtctcgaacaatggcaagtagtttgacagtcagtccttcaccgatttctgtgcgaaccatgggatcataaaaagtttctcagcactggtacatccttaaccaaatggtcaagtcaaagctgtcaacaagacactcaaagacaccctacagaagagacttgaagatgctaaaggaaattggctggaggaactccctgaagtattatggtcgtaccgtgcaactaagaaaacagcaaccggacaaactccatttgccatgacatattgatatgaagctatgttgcctgtagaactcgaaccaccatcccactgaagattgacatataaccaagaggccaatcatacactcctcacaaaatcacttgattaagttgaagaaaaatgaacaacagtaaactgaaactgatagcccatcaataaaaggtagctcgatattttaacaaataagtaagagcacgaaaattctttgtgggagatatggtcctaagaagagtatttttgaacgccaaagatagtacgacaggtgtgctcggaccaaactcggaagggccatatcaagtggtcaatgttctagaattgggagcatacaaattgggtaagtatnnnnnnaaaatgcaactcgttctagtaccaaggtattggaatgagaaacacttaacaaaatactactagtaaaagtacaaggttggatgaccatatcaagtacaaaacaaaaaaatatttactcttaagtgaacggtcttctgggcagaccacgcctaaaggttcggataaatttacgaagtactcaggttagatgaccacttatattatctacaatttgttctctttatgctaacctaaagatcagactagataaacataatagcttcaatgtaagttactaaggtaacagatatatttccgaccaataaatgaataaagatgtttatttaaattcaaattgagtcaagttcattagcatgttacaaatttaccatctagtgcgtaccgaaggtctagtcgtaccaaaaaccctgaacagccaaaaaaaagaatacttgtgaaaaacaagtgactaagagtcaaaagtctgcttggtcacttggggggcacctatacctgtacaaagcatttggtaaaaaacaaaaacaaaacaaacacaattgcacaatgatcataaacaagggatgaaattcattaagagtaacaaaagtaatcaaacccgagattagaggctgcctggtcagccagttattcagaaaatgaaaactaatattccaagtttaaagactgcttggccggtcaccttgtctcaaaagaaggcttactggccgaacatacataaaaaaaacagatagtaaaaggaaagcaattatacagtaggagtcttaggctccttgtacggctcaactgggtctgaaggggccgaaggatcatcattctgggcggaaggagcctcaacactcttatcggtaagagaggtggaagtggttgccttaggattctcattggccgcctaagccgtgcagtagtcaagaaacatgtctttggaagcgccaagatattcaaagtttgccttgggattggccttccaaaagtcataaaaaatatcgagactagctgtctccaaggcattcaccttttccccatgcctcaccacctcgaacttctggttcttaaccttagcctcaagttcctcctccttagccttcttctaatcctccaacttgtggagaagattccggagaccctctcttttgtcttgaagactggcaatgtcccgagacagagaagcattgtctgcctcgagctgctctgttgacgacatctcctgcagttccctggtcatctcggcaactttggtctcaacacctaggagtttcttgttgacttctcccattttcgcccgcatagtctcaagctgagtccgttcatcttcagcctcctttatggccaagtccgcatccctttgcagtgtgttgaagtggtaggattcttcacagcaattgacttagcttgggaataggcgcatgccatcttcaaacaagtcaaaggcattgaaacccgaactagttaaagagaaatgaaagaaaaatattagaaagaacttacccgcgaaagctccttcaagactcctcccaagaccagctccaaggataagtcattgtccgccccagtcagttgttcgttcacctctgggatcgaccagctcacataatggttgagcatgtctctgcctctcttggcttccgagcacaataccaaaggtggggcaggagccttaacttgtttagatctgcttctgaccagctaagatccacctttcacctactcaggtccatctgaactctctcctcggcaacttttggacatagtgactttcaaggcaggagggtccacagaaggttgttcctcagagagatcaatgacctcttgagctggtgctttctcttcagaaagagtctcgccgcctttggacttcttggccgaaggggacaagcccgagcttcgccctcctcttttctttagggcctcaatcatcttctgagacattttttcccggaataaaaacaaaatagttaggagaaggtataaaatatatgaaggcatgaaaatcaagaaaaataaatgcaatatgaagtactctacatgttggcaagagcatctgcctaaatgagcacagatggggcatcatcattcgaagagtcttcttgctcctctaggatggcttttccctttccctctgcaggggttgatggccgagcaggtacaccaggctccctaatctggatagtatgttctatgggcctctgctcggtctggaaggttttcttcttcttaagcggcttctcctgctctaaatattcttcagcctccttctcctgctcagaatattcttgagcatactacttggctctaccatcacccttcaacttagcctcatgcttaagttgaataagctcgttctcttgctcatctccctcagctcggccagccctggacttcttcttcctccccttcatagcctggggtataaaatttcccggataaagcttgtacttcacaaaattgtcctccgaggtcaaaaaagtgatattccgagcaacatccggtagttggagaatcttttgagccctgtcaataagagccaatgtcaacggtggacgacagtacactgagatctgttgaaaccgagtataggtnnnatccatgccttccacgaagtagtactcctcaacaaaacccccgatcttgctaaccttcgtgtccacggtgcctgtcagccacttgcagttcagctgagagaagtagaagtacccagacctactctgcttaggggtggaattcaaatcaaaaagccagatgacctcgtgcggggacagcacaccccatccttaaatggagtagaggacgaacagggtagataggtatttaatacccttgggagtgaactgagtcggataaaggcagaaataattcgtaaccctcttgcagtacggttgcaaaggcaacatcgccccttgcttagcgtgggcacccgaccaagcacaaaaccctttctttgggttagttgttcggtgattcgaagaagggaggtaatgttgggttttatgccctnnnnnnnnnnnnnntcaatataatcagatttgtttattaatatagat

SEQ ID NO: 23608 - DNA, 3681 bp, Cannabis sativa
cttatttgcaaagtagggatggaatgactaaagagtggcacatactgaaattcgtggtgcctgatcctacgaagaccatgtgcaataaagtactttttggtgtacctgcaaaccttcaacatggttgtacaattagtctcacctagccattagtgaccaatctagttaaaataaaaatatccagttctaccctgcttcagcgcggacttcaaatcaaagtagttatcaatctcgtaaggtgtaggcgctgagatttacttgagctcttcggcatgagctatgttgggcacattctaaaacaggacacaatttccaaaaaatactgatgaagcgacaacaccgccccatgtttaatgtggagctcagaccacaccaaccagcccagaggggaattgtctgcccaatagtttctacgaggaatcttgtaatggacatctcctattaagccactagcaaggatcttactaaaggcttcatcgggcagagaagaagtaggcgacacccaattcactctaggtggtgtcacatcaaggatttataacttaggagattgctctaggaaatggcttagtcctacctctgaaggctcaccgagcctattcagtggattacgttgagcgtcataatggcccaagccacagtcagagaggacagagcaagtcctatacctcctcctcctcacgggagcaacatcctccaactcagattctgcatcataactctcagctcctgagccatctctagctaaggatcaatagggggctgagcggtctcctcctccgttataactcgaccccttgtggatatcttggccacattgggatcatacggaggcgccctacacagagtctatttcgttctagccataagtagaaggtaaacaagagacctatacagttgtcacctcccttattaaacacccaacatttactggatggaataactaaggggaggtgagcaatctaacaaagctacagacatattaaagtcaacgatactcaagggtaccttccaggtaaaataaagtgtacaagattgatcaacgactatgtgccatcttaagtacacttacgaagacatatactaagtcttatgttgtataattgactataatggactcactatatagccttatacagagtttccaagagaaacaatgcataaggccacaattgtatatgcctccagacacgagaccgtaatcgaggtcagaagagggtgaaaaacttgctgcccacttggagccttggccttgggatgctagggtttgaattcctaacggccagccagaccccaccaagttagtggctagccaagaaccctaattccaggcataggttggccagcctagagacacagtccgtatcgctggcaagaccccatgaaagccaccgattgtcagctaggcctcaaacaaggcctccttggcctgccaagatctgcatggatcaaaacacgtattttttcaagaactcaaacatgttctttgtgttctttgcgctcttcatgacttaaagagacgagaatcacaaaaaggtcagatttagttctttttcgtctagaaattacacattatctatcctaaggctatcatgcggatcaaaataccaaaaggacaataatctaatgtaagaatcaaagcatgttaaaaacaagaaataattttcatccatccatggaaaaatcaatgaaattaagtgaaatagttggaatagagagcttacccactatacgattttgttagagaagaaggtgggatgcttggatcgttgaaatgcccaagaagaatgatgcttgtgggttcagccacctagagagaaggaagagcttttcctaaagcaagtttctagtgagagaaagtgaaaagttaaaagtcaaaagttaaaaaggttttccccctaaaagtcacttatgtaatacgtgtgagccctgtttcttcacttacctcacctccatatcataaaggcaactaaagtggttatttttctactacaatgagattagactatcaagacaaaatgttttaaaaaggcttaaagagcatcaaattttattcagtaattgctagaacagtccagactgcattaacatagctcgtaaaatccctaaccgtacagatgtccgcacaaggacttaggggaaatgttaaatatttgtcctcatgacgtggcatggttacatggacaaaatcagtgccatgtggcaatacaacttccaaataggaaggccaagtcagcacctaaacaaacgaagaccctaacactaaaatgggcatcaagtgatagaccagcttcctcttaagagctggccagccacaccttgtcggccctgtggtcggccagctttgggtttgctcaatggccgcccagcatggcctgcacaggggcctgaccaactaagacatgcactgcaggcttttcaagacacttctacacgtggatagcaacaaatgggctccgaattgggccctaaaagcccaacagaatggctgaataatatatagaatctagggaacttttgtcttttgtaaatatctatcaaactatgcaagtattaagggattgaagctataacctagggttttaggcctcctatataaaggccttaaccttagcctagaaacctaagttgcatttaagtctgaaacctacatccaagctctaagtgtctgacaaactctctcccatgctcacttcttctctcccttgcctgccttagctataattaaacacttgtgcttttccattactgattcataccttttaatcgtaagggtgctatagcagatccaatctatagtgatctgggtagtatttccctcagtataaatataacaaaaggggagtaggtcattacccgctatcacaagggggccaatcctctataacaaatttgttttattgatttttattcttatttgtgcaaatacattgcaagcatcagatccacacaacctcgctaaaaattgatcactttttaaggtcaagaagcctataaataccctttttccacgtaaaaggttgacagaaaaagtaatagccaaaactctatctaaatttctttaagctttcttcttcttcaagagaattgagtaagggttttccactacgaacaccactgtaatacattatacaagccttctaagactaatatactgactcgtggactagggatcattaacgtctgaaccacgtaaaataatgtctattttatttatttcttcatttatttcttaagctcttatttattttctgaaaatcacagtaacacaattactgaatgtaatcttggatggtatcattgcattctttagttctcaatggaagcacaaaaatctttatcaagatattcaaagaaaaaattatttgatattagtgctaaataaaatacaattaaacgaatcaaatacgaagaagacactcagagtttttacgtggttcaggcattaacaagccttagtctcggagttagtattgctatcagataggctagaaaagcctaagggattaccatgagtatgaaaactctattcactttcgcactacataaaatagagtcattggtcatactcccttcactctattcaattatttttcacgaaaattcaccaacatcaatcaatcatcatacaacacacaaaaacaacatgataccatccaaataacaaacaaatcattttaa

SEQ ID NO: 23609 - DNA, 1157 bp, Cannabis sativa
gatcaaaatcgagactctgcaaaaaagaggtttattgtcttctataaacaaaaaaaaaagaggtatagtaatgagagaaattaattgtgaggcacattccatgcctgataaattatcatctcattattgagtatcatttgatgatcctgggagattcccttaccaagctcctctgctgatacatgattttcttctatcttacatgctgcatatatacaggtcagcctgtgaagaagtcagtcattgtaaagaacaggaacttgcataattaaataaaatgcatattagctatgtctatcccatattaagaacaggtgccaaacaggaaaatatgaacgattttcgtgccatgtacggaaccttttggcaataaatctaagaaagctttaacttatttggagcaagtcaatttaaatttttacagcagaatgtttatgcactcataacagtaagggttttgaaaagaaaaaagaagaagaagatatacttcaaccttacattatgttttttggatgatgttgcataactgaccattgcagaaaaaaccttttgaaatatatgagagctgttgcctgtgaaacgataaccaactttagaaagaaataacacaatgccaacgattgtatattatgcatatatgcaaaactgcatacctgaattttatgaggaaaatgaaagttgttacaaacttcttggagtttattctcatagaacactcgaataaaatgctcttcttcaatattaaggggttttgaacgagaatgcttgtctgctgacacacaacaaaaatatatttaaaacaataaattagtcaagaaactaaagaaggaagaaattatatattttcaaagataataccattttctttaacttgaggctcagggaaagacagtgacccatcaacatctacttccattagtgtagctccatacttcagagaaatataacagtttaaaatcaaaatgtagtaacacttgaacggagtatatttgaggtaaatgaaaagaagaatttacaacaacctgttttattgttacaatacatctaccaaggactaacaagagtgtaattaccttctccaaagtttgaatagctctctggttagcagctttgtatttgtcaacctacaacatacaacaaatgtctgattacaacag

SEQ ID NO: 23610 - DNA, 3181 bp, Cannabis sativa
  modified_base (872)..(873): a, c, t, g, unknown or other
aagactccactaaagccatgaataatgcacacattgattgaatgaaacctgctgcacctgtaataatgggcaagcgttttttaaataatttctttaaacattttgaagagtatgtagttcatttttagtagatgtgtggttattacttgcttgctgttatgtatttttttttatttttttgtgcaaaatggaggatttggtttctttcagtgagatttgaattttttttttacattatattgatggtttattgataatatgtcgatgttttattaatggtaagtgtactaaagttggggaagattcttattgataattttttgatggtttctcgataatttttatggttgtgagaatgttttttttttcatttttttttcttatcaatggtatctcaatggtttttctacagtttctcgataattttggatgtgtgcattttttatttttttagttttttttcattttcaatttcttatgtgtatcgatggttttttgattgtttctcgatgatttccatggctgtgtgaaatcattgaggaactatcgatatgaaagtgaaaaatgaaaaaaaaaaaaaaaaaacgaaaacaacacaaaaaattcacacaaccatgagaaaccatcgaaaaactgttgataagagtcatccccaaccttgttacaattaccatcgataaaatatcaatatattatcgataaacaatcgatataacgtaaaaaaatccagatctcaccgaaaaaactagatctcgccatttcgtagaaaaaacagcaacatactcttcaaaatgttttaaaaattatttgaaaaatacttaactattattgcgagtgtagcaggtttcatacgagagagagagagagagagnnagagagagagagagagagtaaacagaatgcgtttcagctacaattttttatagaaattttaaattatatatgaatattaattggacaataataattttaaatatatttttaatgtataatttttttaatcaatgataaatttataaagaattctagaaaaaaaaattattatacaatttttatatatatatataaaatgcaagtaaagaaatatttgaaaaataattataatcactatatctcacttatagtcgcaactacttttaaatttaatatcatcatatcttgcttgtagtcattatgagtccaattataaattaactaagtgaataattagttatttattatatatagttatataaattattttgaaaaatttcattaaccatgcttatttgtataaaataacgatattattttcccaaactactattttcatttaatttctcatctctctctgtgcttctcttttcccctggtttttctctccaccaaacccaaactccaacccccaatagctacaaacccagataatccaaacccaaaccaccccacctctcttcctcctcgacttctctcgcccaaccaccgacgccacacaaaatccaatcaaactcgaaacccaaagccccctcctcggctccattcacttaataaaagttcaaaaccaccaccaccaccaccattttcagtgttgaacggtgccaccatcactaagaaacaggccaagacagagcttagaccaccacaaacaacgacaatcgaaacatagttgaattgtaaatttttctttaaaaaattagttgaatttttgtggattgtttgtggtgatctgttatttttacagtgatatcgatactttatcgataggatatcgattatgaatcaaggggcagttgatagtttagcttatctggttttccaatcttttaaatttttgttgataggttatcgataggatatttattgtttgtcgatggtttggttaggattgtggcttttcacttttttcaatattttaaatgtttgtcagtaggatatcgatatttagtcgacaatttgtcgataatttttattaggttttgtaagaactttgaatttgtcaatagtatatcaacactttatccatggcttatcgacaattttggttatgttttgatcttttttaagaattttaattttgtcgataggttattgacaatttatctatgggttattgataattttgcttgtgttttaattttaaaggatttgaagtttgtcaatacaatatctaaagtttctcgatggtttttagtttgcctaaattaatttggcaatatggttgtttatcgatagtttaacgatactatatcgatattttatcgttagtaatgtgtttgtttaaattattttgtagattaagtagttattgattttttatcgataggtttgctaaatttttttcttttgcagatgccttcgaagtttatagttcaaatctctaagcattttacaggccgtgtgacctatataggcagtgatatatatagtaagattattaaacagatatttgataggcacaatttgactgatagggcaaaggaaagctctttcggtcaattttggcgggttggtcctccatcatttccttcagtattatttcaccaactgatgcttcataaaatgaatgttgatgttgagaaagcagaataaatccatttttacattggacaggatgagatgagatttggcatggtcgagtttgcactaattacaagcctcaacttcacacaggggctaacacatgaggagaaaaatgtccactcgaggtcagaccggttgataaacctctatttcaacctagcatgcgagatttcaaaagatgtgtacaagctaggggtgtgtttgtttgtgaagacaaatttattgggttgtgagggaaacacatttattaccacagagcgatatgttgaagatcttgatttatttttcaagattgatacactatttttactgtaagcgtaccgtgttgttatagcaaagttttaatactaaaaaggttatcgaacccacatggattgattattaaattttactaattattatatttttaattttatactttaattagataacacaaagtaaattataattcaaaatcaaataataagataaatagaaaaaataaatggacaaacaatgattcttaatctgaaagtaaaaactagatcattgatttccctatttcaaactatgaatctcaatttaccgattatcccaatttattctataatttgtagtttcaagaatcctaatgtaatctatt

SEQ ID NO: 23611 - DNA, 6199 bp, Cannabis sativa
aggacatttttaactttggtttaacttacggtcaacacacaatgaaatatcgaataaatcataaaatgctgattttattgcaaaatagattgaaccctaaaagatgagcactacactgtggtcatgtctattgtagaaacacattatccttgtgtgtacaaacatagtgaactgatgtcagatactgcaagaaaaggttgccaaagttagagatagagatgcttactccgagcttatctgagtcaatgcatttatcaacaaatccagaatcagggactcgccggtaccaatatccaccctgtcgaaaatttcaaagaactaaggaatatgctataaaaaggacttaataattgtaatatttagtaaagtccatgcttcgtaccagatacgtgccaggttctgttgaatctcaagatcgccaatgttataaaatgtagttggtgtcacatttgcaccctgaatagcatcataacttggtcttttctccaaaggagattgagacaactgcaagagtggtgttcaattttctgaatcaatatgatacagaaattttcattggagctgtcaaacaacaagaactcttatagagtaacacatatagtatttacttattatggcctgttgttatgagaatgagatgttttgcacaagccgcaaaaatgattaaagagaaacattacttgcatattcatggaattgcatccgcccaggcgtccaacgatgtgccaagctctaatggactataacccatcaaaacaattaggttacttaacaatactttcaagagatgtaaagctacgtttaagagtaactaacttacatcacaaagtaacgatacatctttctccaagggagcattgtaaaattcgaaccatatatatgagttcgagaaattaaacctgtagtttccattagaattcaaaaacagaacagtgatcaacattaatactgcaattccaatccaatcaaatccaagtcaaaatgattttttacaaaaatcttaaaacatcacgaataatttgctgaaccataatataaaaacacttacttgttaaatgttactttcatgggtgtggctgaaccagtctttgtatgcaaaatcttattccttttcctcctcaacctctcttccatctacaaattcagttaacaacaacaagtaatgatgtaaaactttgcgaataaagcaaaacttcataaaatatgggttataatgaaattaagaaagctcaaagtttactttagactgagccttttctggattatcgagacaactccccaatatttcagcgaattcagggtctctatcgtaatccctctcttcccctctccctcggaacccacgacgagtcgagaatccgtcttcgtcttcgacatcatctgcatcgttgtatgggccttcatctccggcaatcactccctgcaagttgtggctcactttgggggcgaacggagaagccttgaactgagcataggtacggagtcggagtttaatggtagggaatgaggcaaagcagtgggagtggcgggagtttaggaggaagggaagcccggatgcttgaacaaagggtgcgcatgcgtgtaggataagcatggtttctttgtagtaccagtttgaaagcggttgcagggtttttcctcctctttgggtttaaattaaaatgtttagagtaagtgtgttagctatgtgggtggtgcaaatttttttaaactaactcgcacacatgtagtttttctaatttttcatatcgtacttgcactgtaaaattgaaaaattgtaaaatccgcaccgtaaaaaatggtgcgctgcggtgtgaattttgcgattttttacttagactatcatcaaataattaaactatcacaaatacaacaaggttgagcaatactttaaaaataccataaaaggcttgaattttttttaagtttcaacaatacaataattagtggtctttgggttggaccttcacatattgaacctaaataaatataaaaattagtatttttataatgtgcggtgcagtacgatttgaagcgcatattaacaattcaaaactgcaaaccacaccgcactgcacggtttaagaaaattcaaaccgtgaccgcactgtaaagaatttaaaaccacatatttttttttgcaatgcgaacgatttgaggggtttgatgaataaccctactttagagcatctccaaattctagctagagtcgagtgcctaaaatgtcacataatccataaaaagaaaaatattttatttatttggtaatttttttctaataatatttcaatagtattagatttttttagaataatttacagtataaatacttaagtttaattatcaattgcaaataaataattaaatttaatttttaacggtaataatatctaagttataattctagaacttcagtaggtaggtacatgactgttaagtgttaagtaaattttcacatggcaaaccctgattggtccaggtcattaaatttttattttttaaaaaattaatttaaatgtcctaataagaaaatgatatatgtataataacttgatacttaacagccaggtacctacagagttccagaaatataacttaggtgttattactataaaaaaaattaaacttaagtatttatttataaccgggagttaaacttagatatttatactgcaaattactattttctttattgaaaaacatagtacaatattatcgtctccttttaaggtgatgcactatcttattgttgttcatcacacatttttttggtcaaacaatttataatccctaagccgctataaaactatttgaagatgttgttcatgctctgcttctgattgggagtatacaaggatatcatcgataaacactataatacagttatcgaggaaatccttgaatactcttttcataaaatccataagggttgctggagtatttgtcaacccaaacaacatcactaagaactcatagtgaccatatattgttcgaaatgatatcttcggaatgtcttcttctcagattctcaaatgatgataactcgaacgcaaattaatcttggagaaaacagccttgccttgaagctgatcgaacaagtcgtcaattctgggcaatgaatacttgtttttaattgtcagcttattcaattcttggtaatcaatacatattcaaagggatccatccttctttttcacaaataaaaccggaggttcccacgacgacacactaggtcggataaaccctacatgcagcatcccctgaagttgtatttttagctccttaagttttcctggagccattcgatacggtgcctttgaaacaggctctgctcaaggtgccaagtcgatgatgaaatctatttcttgttgtggtggtaatcctggtaactcctcaagaaatacatccgggaattcttttacaaccctgacatactcacacccaaatgtttcgagtctgctggagtcaatcacaactgctaaaaattctatacatccactatgcagtaaatcctttgcctttaaaattaaaataatcaaaacccgagaacatagtctcgacataaacaaatagttcctcaccctctagatgaaaagttaccatttttcgcttgcaatcaatattggccgaatacttggacaagaagttcatcccaagtataatatcgaattaagttaattccaactccactaaatcaacgcttaactccctattctcaattctaattggcctagacctagcccacctcttggtgataaccaattctccattaggtagtagggctccaaaccctatctcaatgacatcactaggcctacccaatttattaattactcttgatgccacatatgaatgtgtagctccagagtcaaacaattcaataaaataggagtcgttgacaagaagctgacctgttaccacagaaagaatgactgcatcatttgcttgtataatagcaaatatccgagtgggagcgagtttcgtatcttgttttgattcttccttcttcatctaaggataatcctttttaaaatgtctgaccaagccacattgaaaacagattttctaattacatttcccaggatgatgtttcttacaacggggacactcaagataggaataaccctgacgacaacctctaccttggttcccacgaaaccttttattctgacccgagccaactgatgtcgggaaggtctttctcttttgatcaacattaaaatcaccaccatctctaccataaccagaagtaggaagagtagtggtcccaccaatagtgggagtcactcgagactcttgtagaaactcaatcgcacctttggctcgaagggccttctcaaccatctcagcataagttgttgtgtcatttgtggtgataaccagatcatgcctaatctttgcattcaaacctgccaagtattttttcttcttactgaagttcgcaagcactatacatgaagccaaattggctagtcgatcaaactttgtagtatattccattactgacatattctctctctgaaccaaattagtaaattctttcttcttagcacggcagactgccttattgtaatatttagcattaaacagatcccaaaactcttcccaggtcattatagtgatgtctcggatgagggataccaactttcaccacacgagagcatcttcctagaattgaaaagtggcataggtcacccgattcccgttgacacccataaagttcacgatggttttgattactattagccattgttctaccttcacaacatcaggacctcccaaaaaggatggagatgcctgtttgcagaatctttcatataaaggctccatacggtcaccagcaataagttgttttgttggcaccactgaaaccaaagcaactgacacttgttatggaggcactacaagaggaccctgttgtctgaatctcttaatctcctcatcttgctggttaattcaagcttacatttctgcaaccctttgctcccaatcttaaggagcttgtggtggattttcctgatcacccctttgaaacctttcacggcctctgccacgtccatgggggtttggaggattttaaccttctcgactgtctctggtcttgaccatattaccttgacttcttgtgtttcgttggacgtccatattataggacttagcttgtgaatccataagtcaggtaggtcagacagcgatcacataaaattttaaatactgcattcatggattttaggcaacgcaaataaataacatattactaacatgctttctatcattattttcaaatcaaataacttactaaacaagtaaaggcttactaaaccgtgagtcaagtttgtctctgacgatgattatacatgttttgacggtcttcggtaaataacttggcggctcttgttatacccaaaattcgattggaggacacgtgtcaagataaagggaatgtgaatcagtgcaattgcttcttatggaataactcattaattacctaagtatcaaagtatatttataacccgctgactgtaaggtcttaggtgagggatcaatgtacaaaatgacacttagtatattagcgagaaaccatatgtcgctaaatgtgaatagcgaggtaccatagaaagcgacacgtatcaatcgtgaaagtccttagcgtacaatgaacaaactaagtgtaaaagtcggatcggctcaagaacaagtaagtgaggtgactgtcttgttatgggaagacttcatataacttcatccccttagcgtcatcgaggcttacaatcctggctcgtcagaagatagcattcaagtgagcctcgaagaattctttgaggataagaaccgcgatcgacaccagacatatatcgttgacctcgaaaggaagaatggtcccagctcgctattgagatcactggaaccaagtttcagtcgagacatctccagatacaacaactaaagacatgtttaatacacgattattttgacccagtaaaagcaaaaaatcacagctatatgattttcaaatcataaattgcatttacactacgtgatatgtaatcaaatcccacgattttagggatgattgttgtaaacctattccggtcaactatgtaattaactgtccactatgtaattataaatagtgacaaacaagataaaaaaaggactaaaaaattcatacgagagagttcctaaaaaaatcagaaat

SEQ ID NO: 23612 - DNA, 1757 bp, Cannabis sativa
gcgttatcttcaggtatttgaactgttatactttttcttttcaataaaagattctcctattaggaaaaaaaaagaatctcgtattagttatgcattttataaattttagtttgttttttgctttcccattacctatgtgtctttctgttttttttattaaaccactttagtggacaaaaaattaaaggcaacgaaggagagggaattcatcaataaaaatcattgtctatcttaaaagcatgcaaagatgcattaggaaaactagacaataaaactctaaagaaagcactaaagagtaaagtgctcaattgtttgatctctcccaccaaaataatacctgcaaaatattgaaaatgatggattagtatggcatctttaagatatatgaaatttcatattagaagaaacattctccccattgtataaagagtaatttataacttatatatctgtgaagtatcaagactatgaacaaccaaaactgtaaaaaaaattcttccacctccatcaacaacaacctaacttggataagtaattttcttttaacaaaattaacttaaaattgtgttggaggtcttagtatctaagtaagcctataattagccacaataattatataaaaaacttattatatgactcattaagtgtaaaataactgacaaaaaattaaaagaatcaacaattttcatacaaccttctcattaatagaaaattcttagtgttgagagactcctacattttacaaaactctaataagagaggactatgaaattaataagaagaattgaagtagtaaagaatattattaaaaaattaataggaatagtttaaaatttagaataaataatttaaaatattaaatttttaaataaccacaacaacatatatgatttgaaaagggtctgtttgcaaaaatctatatacataacctactaatatttaatattaaatctagtattatatttttattttcttaaaatcaaaatttatggaaattttttttaaaaaaaaaaatagtatgtacggtttgtttagttagtacatacaattttttttcttttaaaaaaattaagattttgtatagttactgttttaatttttatttatttttaaaaaatattgctataaattagatattttcttagaaatattataataaatgagaatatatagatgttattggagaaatatttgtttgaggtcatttttaaaattattttttttagtcttattagagataatttttaaggtatattatatatatattaataatactgtttaaagtcttaaaatttttttacccttaattagaaattttaataagacttattaattttcttagataatgaagtaaagttcacaatccctattaacctttatcgaatttaaaaaagtctattaatcgacaacaaagttcattcctatcaccaaaaaattctctttattatttattttgctggtagcctgatagcataacaaattttttaaataatgaagtataaagtcaacacatatagtaaagaaaatagaagatagttaggtaaacaaaaaattacaaactcatatagccaatgaacaaaaaaaaactaacacttttgattcttacctatacaacttgtaaagaaaattattatccctaagcaaaaatgttattatatttatatatgcatatatagatactagcaaaaagcaacgtgcgaggcacgtatagtaaattttatgctagttttttctatgttatttgaaagtgatacgat

SEQ ID NO: 23613 - DNA, 1291 bp, Cannabis sativa
ctgatagcatcgtatttaataatatccacgaagaaactttgaaaggaatcccctgaatttattacttcccaacagtttattcaaacatgtgagaagtaaagacaggattaaagaggtaaagtttaacatgattaaacgagattgaaatataaatactggttatgcaaatataggcattctaactcgttcttcctgggaatcacatatactgatcacttaagtgcatggaatttcatacctcaattattgtcctggcaatttctgcagatgtaagtctagcacctgcaccattctctggtgttaatttagcaatgtcctcaaatgggtgatattgtggtcttccattctgctttatgggatctgaaccaggccctaaatgctttgttgaagcatgaatcctattcttaatgacatggcatcttctaggagaagcattgttcgttcttcgatatcttctcctgcatattcagaacaacctattccacttattaatctataattataaaaggaaaaagcagtttatttcctagtaaagttccgttggatttcgttaatcacagcttctctacattgctttaatcaatttgcaaataacatctttcagaatgaaaaagaaaaactcaaaacattatgcttcagccacaatgtaaccacactattcactattgtatacaaagcatactacctaaatcaaaattgtttcaaaacctaaatgaaaaaagtccacaaaacccaaatattgtcaaaaacatggaacgaccaaaaggttgaatggaacgtagctagctaggtctacaaacaaagtggaatacgtaagtaagagttaatgattcagtaccacgggacgtggaatacggaggaggcgtgagaaacgcggcaagaggttacatgaacaagtccgttgacatcgtcggagctcaacataggccgataatctacatcaattaaacaaataataaaaaagtaaaaactttgattggtaagcagcaaaacaagcagaaagagagagaaaccgaaagtggagggaggagttacaaggtgcggcggctatggcggcggagaatcggaaggtcatggcggagtgaatcattatatatttattagatatgtgtgttggtgtttgagtttgagtttgggttgatatgaatatgataatggtttagattccctccgattatccgattatccatctcttcacaaaaccacccgggatatgttggtccaatcatatttcactttattattacattccatttccaatttccacttcacatattttatttatttttat

SEQ ID NO: 23614 - DNA, 2643 bp, Cannabis sativa
  modified_base (2265)..(2312): a, c, t, g, unknown or other
  modified_base (2491)..(2494): a, c, t, g, unknown or other
aactaagcgggctttacaccttatcccttgtagatccatctacatttcaaagtactttaggtgtgatgagggatcttcttttcctatgtacattttccatattggcattttgatctttggtggtaggtcaaggacttcgtttttaagcaagaagggttatccacgtgcccatttgagtttgatatctatgatttttgggtcggtcaagccttgtaccatgttttttaggtcatctatttatgcttgcataagaagatgaaattactgagcctgttgacggacctatgtcacattgggatctctttaaactagatctttggcacggttatctggttggatgtttggtggaatgttttacccatctagtccctttctgtgattcaaatcggtttcaaggtcatgtgtagtgcccaacctatcgaactccgaagtaccaagtggccttggcatttaacttgtttggttgataggttggcctgagacttcgatagtggtgtagttattggaatgtgttattcctcccaagggacgatctggtaggatctggccatctactgtttggcccacaatttggacctgtggcctcagattggacagttgaccactacaagtttgtgtagtatgccgagttgcataccattctaattcgctccgtggattactagattcagtagctggttgttgacttgtaactagtaggcccttcttatcaacacggtgccctgcctagaacgatcatcaatggctgcctgttgtgccttcatatcccggtccctccactttaagaattgacgtctctcctcatcaaattcaaggttaatggaggtttggagatcctcctatcatgatgtagagtgttgttatggccttgcatgagcccaagtgcctctcacaaaaattagagttcagtgtcatctccagctgccctttgagtattagtagtggacgggacctcagtgttgggagtggtctaatcagcagtcgtactggtgtttcaagtctcctgtacgcctggtatgaacccagccagaggggaagtcactccatggcctaccgtacgaagttgtgtattacttgcttagggtttgtccatggtggtcaactcgtgtttctaggagtttgcacattgggaactgccaccattgggtcaccttgatcagtaagccctccccttcaagtttgtacaaccatcctgttcacctgtcaaaactaagacaaaggcttgtgtttttgccctcaataaaagtaccaaaatgttcaccttgcttctagcaaatgacagtgagtcaaaaataaaatgattaaataagacaaattaaagaaagaaaaaacagtaaagtgaacaccaaattttaaagggtttggccccgtgagaatggtaatagcctactccccttgtatttgtattgacttgagacaagcgataaagtgttcttcctctcaaaagctcttacaatggtttttttgagttattttctctcttagatcactattctctcttgagtgtgtttctggattaatttttttgaccccctccatagtaaggttagggggttcatacatgaggaatggtttccctttgtctataataaataaaataagaaactacattaattctataattacaatgtaaagaataggagactaaagtatgttgtctctattctctgactcaatcccacaattatagggattgtctttgtatcttggaaatgacaagattgatctttggagtttccatcttacacacttcgttcggcataagtatgtttgcatcttgctcagatatccgagtgttacagatgttaggtaccattaatgggtagctgcgaatactttcctctacccaggtatcaaaaatgtgggacatgtgtcatccattcttattgccacgtcaaggtgcaagaaacaggattgtgtagtgacttttttggaaaccaaatataatcagagagtaaaaaagataagagataatagataataaatagatagatttttacgtggttcaggcgttaaagatccttagtccacgagtctattgtttgacctctttggggaaatgtttatgagattataagatggttacaacaaagactactctgcttctcttaagagagagctttgttagaatttttgtagagtaattgtaagtgaaaaaccgttctcccccttctttaggaaaaataggactatttataggcacacattggtaaagggcataccctttacccacctagggtttcatgttggaattaattttaccannnnnnnnnnnnnnnnnnnnnnnnnnnnnnnnnnnnnnnnnnnnnnnnaacttctaaaacgataaacaaaaaaaacacataaaagttaagaataacttacagtgatggcagcaaaattaagtgtctccttccactcagatctctaaccctttattcctgtctgtagcagagtataatcaagatctgagcgtgaatgtccttcaattggatgtgatccttcacagtcnnnnaatctatgattgaggtactgtatgctgtgtgtgggcacttctctctcacaagcaattcgaaatttctctctatttctctcttgatttcgtgtgacactatagcttgaatatcaaagcattcaaaggcataccaagagtagagagggggc

SEQ ID NO: 23615 - DNA, 1888 bp, Cannabis sativa
acttttctacttttaaaaacagaaaactgattaaaaaagtgttaccaaacaccaccataataaaactaatttataatgaaaactctcttttgagttttgaaggtaataattatatttgtaaactaaacttttaaaaataaaagaaaaaaaccttcaaactaatttcattaccaacgaaaaaagttaaaacatagaatattttaaagattaaatattctgtttacatcatttaaaaaaaaaatctgtttaaatcccctcactgtgatttatttcaattatcattacagcttagtaagcatgtcatgaaaacaaaaatgtggcaactaatatcatccattatattgaagtgtttttgctttgaacttttattttattttaaaaatccttctgaaccataaaaattattgtaaatgttcttttggttgcatcatttttacttttttcaaacaattgaattagataaccatatgccacatatatagttgtagtatgagagtttatttaactaagttcattgaaatcgagtttattggcacgtaatatattagccaattgtttacaaaaatgaatggaatgtaatagaaaagacatatttgatacagtttagatggttttattcactaaaaaaaagttgagaagcaaaactctacaagagtaatagtccaggtgaagaaaatactagttattgttcttgttatttacatgttttgttatttgattaatgaaggctgagactgacagaggagcagggtctaacaaaggagtttcagaagaacaaattttcttaaagatttcctctccaaatgtacttaatatgatgcttgttgatttacctggcatcactaaagtccctgttggagatcaacctagtgatatagaggcaagggttaggaaaatgataatgacccaaattaggcaggaaaaatgtattatactggctgttagtcctgcaaattctgatttggctacctctgatgcacttcaaatggctagagaagctgatccaacgggtagggaattgcttcggggttgaatttttcggtcactgagtttactcaatctaccagctaactttttgtgcttcacatgattgttaaacaggttctcgaacaattggtgtaatcacaaaggtttgtattttttttttctgaagtatttgttttgattatactcttgagttgttataatgttgatgtttggttatctatgtagcttgatataatggatcgaggaactaatgcacgtaattttttgcttgggaaagttattccacttcgtcttggttatattggcgttattaatcgaagccaagaggtaacttttttatttttctcggtgaaggtattaagatgtgaaatgaaggaagaactactattgactgtataaaaagttttcttcaaacatctttgtggctttccacagatggggggcatttggtaatgttaaacccttccaacactagagtttcatattctcttagagttcgtagggtacgccgtattgtattgtagtattgtttaatacaatactatgtttggtattgacttatattaataggttgtgtaaagttataatatattttcaataaacttgactctaacactgactctaggtcgggtccaagtctggggtctggagtttgggatccgagtccagggtccggggtctagtccaagtttgggtccgtgatttgggtccagagcctggtccgagtccaggtcccatgtccagggtccgagtcccgattcatggtccagtctagtttgggttcggtctggatctaggatccattccaagtctaggtcaggttctgggttcgggtgccagttctgggtccaggttcgtgtccgtgtctgggcccctagatccgggtcggagattggggttg

SEQ ID NO: 23616 - DNA, 2532 bp, Cannabis sativa
tcatttctttggacagaagaagacataacattctcttttggatgtcttatattaaaaatatgtctccttaaaactttaccattaaaaaaaaaaaaccttgtaggaataaaattatagtaaagaaagaatacattatattcttatctccctttctttatagcgtttatctcaactagtaaaatctttgagttgacgtgtcttaattttatataccaacttctcaaatattattgtacgaagagcatttctaaacaagtctacaaaatcgtcacaagagcgtatttaatggacatctatttccctttttttctgaagctcatgcgtgaaaaaaagctttggtgaaatatgcttagttccatcacatttgatgaaacctccttttatttgagcaatacatgcaacattgtcttcgtacagaactgtggaaccttccttcttagaaatatgacatgattcttgaatatgttgaatgaatgatctcaactatatacattctcaactcacttcatgtagtgcaactatttcagaatgatttgatgaagttacaatcattgtttgttttgttgagcgccaagatatagcagtaccaccataagtaaataaataacatgtttgtgatcgagatttgtgtggataagataaatatccaacatcagtatatcccaccaattctgattttgagttcttggagtaaaataaacccatgtcagtcatttcacgaagataacgaaaactttgtttaacttcattccaatgtcgacgtgtgagtgaagcaatatatcttgctaacaaatttacagagaaagctataacaaaccttgtagaactagcaagatacattagttcaccaattgcgctaagatataatacttttgaaccaagaatttcttcgtgatcttctagaggatgaaaaatttcttttttaatatccaatgatcgaataaccatcgaagaactcaatggatgggctttatccatgttaaatcgtttcaagattttttttttatacaatttgactgataaacgaggatcccgcctgataagtgttcaatttgcaaaccaagataaaatttgatttttcctaaaaaaaattcatctcaaattcatttgtcaaatatgttattgcctcaataacctcttccagagttcctatcatattcagatcatcaacataagttgcgatgataacaaattctaatttggatttcttaataaaaatgcatggacaaagtgaattatttatatagcgtactttcaatatatattcactaaggggattgtaccacatatgaccagattgttttaaaccatgtaaagatctttctagcttaattgaatgcatttctcaagttttttttattatatgcttcaggtatttttaatccttcaaaaactttcatgtaaatgtcattatctagtgacccatacaaataagttgtaattgttgactcaaactcttaagtctttttgttttgatgattaacaaatatttgattattatttgttactaatgatttgttgattttgtagcacaattaaagataaataagattttaagacaaaattaactctaagggtaaaatagtaattttattaaaattctcaaaagtgacccaaagtgaacttaaaggcttaagaaactcaagataagactccatgaaggtttatttatatttcctagtcttgtacagtaattttcaagtccatacttaaaatgttctaagtacgaatttcagcccactaactagtgcaacaagttatttcataaaaattatatataaaatttctaaaattaatttttaagatcacatatcatttaattaagagaaaaaaactgaaattctgaaatcaaattaacgagtggaaagttatgcgcattttagagctgaaaaaatgagattttgcccctgtcctgttttcagtctaccgcttttaaacggcagaccatttttcacaaaaatagcagatcgtttttcacaaaaatggcagatcatttttcacaaaaatggcagaccgtttttctcaggattcctttttgaaaagtgtgctaacaactataaacgattagtttttgttcattcactataaaaactcattctttactcaaaattcaggttgactaagcatttattctatatgccaaacatattcaagtgattttaagagctccaaagtttaaaatctaataaaatacttttcacacacttttagccaaaattcgtaattatttattctaactgtgcttactaatcactctaggttattcattgtatcatcatacatctagagtgagtttatgtctaattctaaacacatttccaaattgtgattgagggaggttgagaccagtattgtaaacaatccggttagagtgagattaacattacaataatttgagaaagaggttgatagtccttggcggtggattactattataagaggtttagaaacaccttggtgaaaaatttccggttgtaagggttagtcaagctcgttaacttggctcactagtggaactcaaagctaggtcca

SEQ ID NO: 23617 - DNA, 2505 bp, Cannabis sativa
  modified_base (693)..(700): a, c, t, g, unknown or other
aatatagtaattaattattattttataattttttaaaattttagttaacatttattttagaattttgttaaataaaaaattatattatacaataattaattagtttcaaaaataataaaattatatataaaataattggtatataaaaatagtaacttgttatatatatttcatgacaactcattaattttaaaaataatttttcaaattatttaaatgtattttgaattataaactaccataatataagttaaaaataactaatttattaattactaagatgtatatatataaataagttttagaggtaaccaaaatatatcttaaattatatggtatgatataaaaataaatttttttatgtaattaactagtttcttatcaaaatcattaatatctaaaaaattatttttaaaaacgcaggattataaaaaaaaaaaaaaaacaaatgtgagagattttagaaaatgtcagatttatttaacgaacagggcatgtcaataaaaataataatgttattattgtaaattatatattattataaacttatagttgtatgaatagtggctttgctttacgaattttgagcccaaataaccataggtatagttcttataagcttcttagaccttcacgtttgtttaatatcaatccttaaaatagtgacaagaagcaaaaaaaaaaaatatatannnnnnnntatatatatatatatgatcatctaaatagaaattttagatatattactaattattttatttctaaatggagcctgggtacttaattttattggtctaaccaagccaactataaattatttaaattgctaatattaatttgtatactctcctaaaaaatatatttaactacacttcaatgcatttcactttctaaatttttgataattcaatcaactttttttttggatgaaatggaggatatcttgatcggagaagagaatgaaaacataccatatgacccgatatatctaacaagtcgcactatacgtcaacccacaatacatcttcgtttaagagagagagcataaaaggtttaagagagagagcataaaaggaataaaactaatacgtgtatatatttctattttgatttttttaggataaatatcattttggacattgtgttttgcaaaagttaccaactggaccctctgttttattaaataataaaatggaccttgtatttttcaaaatagtataaaaaggaccatgaattgagtttttgtcaaaaaaaaattagtaataaattgatctaaatgtgttataagaaaattgtttatattttctgtgtctattcgtgttaggaattgttttcaagtttgttatttaaaaaaaaaatcgaaaattaagctcagggtccgattttactattttgggaaataaaaggactattttgtcatttaataaaacaaagagtctaatatgtaacttttacaaaacacaaagttcaaaatagtatttacccttttttttttggatttactttaatctttgtttggaaaaatagattttgtgacataaataaaaaataaaaaataaattgggaaaaattaaactcaaaactattgaataagcgtgataccttttaagggattgttccattactaaactatatagggataatcaacttgaccgccaccatacttgtttaaccaatttctgaaaccaattacaagagcatctatacatattttaactcaactacatacaagatggtttgtgaaaaaaaaaatttctctctagtgagagtgttggaatgtccaacttgactggtttatagtctgcttttggtctttttcgaatattctcctgcgttgtagtttctctcaagtatggatggaatatctgaacaaagtgagcgagaagtcattatgatcaattcaacaactgaggactctggaggggtaggtggtaacattaactccattgatcctatgacagggggggtagttaatgaagggcgagtagctacagaggaagtaaatacaaaggtcaacgaaaaggggaaccaattggtatcaccagatgcaacaaagaatggacaaccgtcagaggatttggaggagcttcgacaggactttattcaggcgatgtccatggatctggaaccggattttgaacttaatgaggagattaccagaaccggcattctcgccagttttctggaaggagttggggtatcaagaaacagattgaaggatatcctgggcaagatttggaagctgaaaggaacttggaaaatgaaaaccctcaaaccagggctttggggaatattttttgatctggaggaggactgtggtgtggtgcttcgcaatagaccttggcttataaatggtaagcttctggtcattaaaagatggcctgaggatggtgcatgggacagggtcgacatgacgaaaactatgttctgggttcaaacgttggggttgcctacaccttatcttaatcgttccaatatcataacgattgctgctaaggctggaag

SEQ ID NO: 23618 - DNA, 3004 bp, Cannabis sativa
tctctctctctctctctcttctagcatcagcggcctctcttttattcattttttcgaaaaaaagccttcctcccttagctccgccgcctacagccgatggggatactgagccgcccaaccttctctcatcaacccaactgccgcccctcctctacctccctctcatagtgcattaatgggtaagtattttttaaaatattttgttaaataattataaaaaatatagtatattatcgttagatctatgtggtttttttaatatataaattttgatgaaatcgtgagatctcattgttcagagtactatgtatgtatttgtatttttttcgatgagttcttgatgggttctcgacacttatgtctcaaggtcagggaagacctttctcgacgggttgtcgatacgttttcgaaaggttctcaacactaatgtctcaatgtcaaggaagacctttctcgatgggtcgtcgataggttctaaattatttgccgaaatggaaaatggttttgcatttccaactatttttggcatattatctttgtgttcttgattgtttattaatagtttttttgatggtgtgaatatttgtaatttccaactttcttgccccatattatcgacaatttctcgacatgttctggactattctcgatgattgaatgattatttttttcaatgattattaattattacttttctataggttcttgattggttctcgattattttttgacactttcccattattgtaatttttttattaattttgctattctgattcagtggtttgtggttcgtattgaattgcaggatcacttgtatttctggttgtaattttatgatggtgcttgaagtgttgagagatttaattgggtgtataaaagtgaaggaagtttgatgagcatttattaagcaaagtatacctacaaaaatcaataacaccaaaaataaaattgtattagtttatgagtatatattcatatcgataactccatcaataataaccaaactcccaacttttttgcaaaactagtgaaaactataacctgtcgagaacatgttgagattctatcgataatccatcgacaatccaacaatgataacccacataggaaaagataattctaactcatattgataacctattgacaactcgtcgataatcaatcgatagtcaagcaataataattaaaaaaaattacaattcttttgcaatgcttcaactatcgataacttgttaagaacatatcgataacttctcgataataggtaaacttaatgactaccaccaaaagataaatcttattgacaacctaccgatatttaaatgagaatcagccaaaaaaaaaagaaattacaaattttttggcaatgcttgaactatcgagaacttgttaataacatatccgtaacccttcgataatacataatcatttgtccattggtgaccttcaaaatagctttgagtcaataataattaaaaattaagtagcattacctacccatttaaaagattaattttgttcaatatgaagtaaaaatatactaattaattaaaaaaaaagattaattgataaatcattaaacataaaatgtaatagttacagtagaataagatagaaagggaaacacaagcaccaatacaatacaattagaaacacaaacgactctacaattgaatacaaatacaaacaactgaatcagaataacaaaaaattaaattaatggaaaatagtgtcgacaaataatcgagaacctgcaaaaagacaatgaataatcgttaaaaataataatcaatcaatcattaagagacagtcaagaacgtgtaggaagtttaaaaacacaactatacacaccatcaaaaaaccattgacaaacaatgaagaacgcaaagataacatgtcaagaatagttggaaatgtaaaataattcgctatttgacaaataattgagaacctatcaaaaaaccttcgaggaaaatctttcctaaccttaggatattcgagttgagaaccttttgagaacgtattgataaaccgtcgagaaaggtcttctctgaccttgagacatccgtgttgagaacctatcgaccacgtatcgagaaatatcatccctaatcttgagacaatggtgtcaagaacccatcgagaatctatctagaaaaatacaaacacacagaatactccaaaaaatgagatctcgtgattttagcgaaattcataacaaaaacaaaaaaaaaaataataaccacatagatctaacgagaatgtactatacatggagcaagcaagtttacaaaatactttcaaataaaatgtttcacaaaacacttacccattaatcaacaatgagagggaggttgggcgaacgtccttcacggcgaggggcgaccgttgggctaatgagagaaggctgggcggacatcgttcatggcatttggttgagtatcccagcgatagttcgggtggttataggttttttttttttgcaaagtggttctcggctaatgaggttagagagagattggattatttttaggttttttaggttttgaaaaaaataaatggtaagggtattttgggtaaaatgaggagctattaggatagtatttgttgacctcgcttctagcaaatgacagtgagttaaaaataaagcaattaggtaagataaataaaagaaagcaaaaacagtaaaataaagtgaacaccaaattttaaagaggtttgaccttgtaagtgtggtaatagcctactccccgtgtattgtattgacttgagagaaggaacgaagtgttcttactcttgaaagctcttacaattgatctctgagtaactttctctcttagaacactctttttttctctagagtatatttctatagcaattttctcgatccccttcagggtgaggctaggtcactatttatagggacttaatacatgagggatggtttccctttttcatataatgaataaaataggaaactacattaattctataattacaa

SEQ ID NO: 23619 - DNA, 3093 bp, Cannabis sativa
attataaatatcaaccattagatatttgatccaatggtcaagaataaaatacccatacatgggtaatatccattaagagcatacccatatatatatatagattagatacatcatacattgtaatcacacgaaattattaaatagtgtaacatatatatatataagatatcagattcagatttagtttattatatttattataatatagaaaaaatatatatcggtacatattctctgcacgtaaatattatatataatattgattcatctttaaaaacagttgattggtttagcttaaattcaacattagtgtacgtgtatttttaatacaattaaagtgtatatatatgtgcatatatagcattatattaatgtgtgatgtatgcagagtgtagccagaaattctgtttacgaaaaatagataatatttttttttcattaataaaaataattgacgtcatataacaaaaaaaatattgaatagagaaaataaaaaaaaatgcatttaaaaaaaatagagaagtgaaaactcatgatgtcaaaaaataaacaatacaaaatatgtgaatattgtgaagatttgtaacgaaagtaaagaaagaaatcgtgtatattgatcaattaataaaaggaaacaaggtatttatatagaaagattcatgagttaaacaaaactaacaagcaaaatattaacatgccgcttgtaacaagaaaaagatagcaaagcaaagttagttacaaactaactaacaaataaaactagctattaacatgcccctcaaactaagtgatgtttgagcttaacacacttagtttgtctctaagaatatagtattggacagaagcactttgtaagacagtcaacaaatttgattgtcagtagaaatatgttgaacttaaatctctttgttgatgaccttatccctaacaaagtaaagatcgatctcaatatgctttgtgcgagcatgaaggatcagattatcagccaacattactaagtttatgttgtcacaccaaatatgaggaatagcaggttgagaaacttgtaattcagtgagaagagattggatccaagcaattttagagactacaaccgctatactcctaaattttgcttcaattgaggattttgagatcgttggttgctttttagattgccaagagatcaaatttggtccaagaaaaacacaaaaatcaattgtagaccttcgatcatttggattagatgcccaatcagcatcacagtatgcttgtagatgaaaagaagaagctaattgaaggtgcgaactaaagtctaatgtgccaaccagatatcttaatattcttttaacaacaacctagtatgcttgaaataaattatgcatgaattagcaaactttgttgacactgaaagctatgtctagtctggttatggtggcatactgcaaagcacgaactattgacatgtaaagagttagatcagccacaacatcattgccagaactagacaatctaaggacatcattcattggtgtgctgttagttttggccccttacaaccgtgccttgcacaataaattttagaggtatttcttttgaaaaaggataataccatttgtatgttgcaacacttgaattcccaaaaataattgagttatcctaggtctttaagagcaaataaggtgctgagagatgtaatgagagaagtgatcacttcagtttcatcactccttgtaatgagtatatgatcaacataaattagaacatataagcaactgttaggagtggctttaatgaatagagagtgatcttttttggcagtggagaaaccaatgagaagtagaatagaagagagcttttcaaaccatgcccttagggcttgcttgagaccataaatggccttttgcaacttgcaaattttgtcagggaattctggatcaaaccaggcggttgcaccatatatttttttttttttcatgcaaatttgagaagagcattgttgacatccaaatatcttacagagcagccttgagtgagtgcaaaacacaaaataagtaataaccgtgccagaataaatatataatcatggacaaaattagcattattctcactatttatattggcatattgttgagtaaattctacttataactagtccttatacatcttatccacatcagcatacaacaacaaataatagaaaacaagattaaacctaggtggctttgcctctacaagaccaagaaccagaagttagttacaactgttttgtaactaacttccagcctgatcaactaccttcactactctataaataagctacaaaaaatagaagagatacagtacagaagagagtgagagaaagtacaccctagttcgaggcttcagctccaaaatctaaagagaaaggtccaggcagagagtaaagctcttgtggtgaggaggtttgaaggaaggaagtacatgcactaagagaaaaacaaagttagatcgagtagttgaaaagagaagaaaaaaaaacaaaactgtaaaagagaagcaaccaagcctcacctaatcaaattttgtgataggaagctccaaaagttgtaaatcgccattgttgatagtggatctcaagccaaatctctgagatgagcttgatagagatgtagccctaattgttttggggtgaactttgaaataatttctggtgttttctctcctttctctgtttgtttttcattctactaatttctatgtgtgtgtgagtaagatcatagggttttaactttggatcgagtaagttcttctcaagaacttgcgctgctaggattttaagtttcagtacaaatgtgtttgtgtgtgttgtgtttgctgaattagggtttctagacttttcttgaaaagtttctttcgccttaggttaaacgacacaagaattgtggtcattttggtcaggtgttgtcgttttggtctaaattcatttagacaaatgaaatttcaaaattgaccttgcatactgataattagtgtttgttggtgtagggttaaaacagtaaaaattcctacagtggtatccgagcctagtttggttaagaagatcaacaaaatcaagaagaaattatcaggaag

SEQ ID NO: 23620 - DNA, 3794 bp, Cannabis sativa
aaaaaatgtcatttttatcttggattttagctgctctactacttcaaggttcagttcaggtgtatagtcgaaaagtcgaatacctatattccctagttttacgtgctttggagttcctttctcagaaaaggtttgaattttgttattttttttttggtaatatgctttctgagatttaggagataaagattcttaatgttgtttgatgcggcataggtgaaaccgaatatttctgtacatgtatgactaaatactctttgaaccttaatacatcttctaatatttgtgttattaaatttggcgagcagacagcaagaacaatcagaggggacatctctccagcctcaagaaaatgtaggtgctgagggagttggtgatgaagaaaatgatttgttttggggtttagatgacatcccaggtagtttttgcttttacgaagttatggtgattggtgagaatatattgcaaagttaacagctttgagatatcttccctgcagttgaagcaaaaacttgcttagatgctcaacatgacaatgattcttcttcaaatcattttgttaagcctccagcaaatttagttgtaatcgaaggtgattgcttggataatactggtgatggggaattggaatcatatctggtattgcagctgaatccatttgtttagatacttatctttaaaaatttgaaattttcaccattaatctttattaaatatgcttgcagttggccactagtgatctttacagaggcttcattctattagatccttgtgatgcagtgtctgtgcatgagtatttgaatggggataaaactggaaggggtcagaatagtgcttttaagggaagttctcgacgcaaaagcttcctttcacctactaagtgttctgggggagcttcacataagtcatcagttaggaagggtcagaatgttaatgccaatcggtctccattggttggttgcagctttgagcttaataactctaatgatgtgcctgatcctccttgccccagtatgtttaatgatgggaatgatggttttgatatggatgatagatattcagaacctcgggactttgatgattcagaagaagatgatgatccttggaagcctttgaatccccatgaattgggcaacttgaaagttaaaccttttagaaaaggtcatatgagtacttttcttttgcttgctgtattttatcagttttctggctaggcttctaaagttataatttgcctcttgttttttgttttccttcccacaaagcagttaaagtttttaaaaggaatcgggttgcttctacaaagattgtgtcagtatcaacactgtttcctcctgcaagattgcagggtactattagtccatatctgaataatttgtgggagatgcaatgtcatgcccgcaaaagacagagggagtctgagtcccctccaatttatgaaaaggtatttgtttatttatttgaagaagctagttctgctgcaatttggatggtaaaatcttggcatttgcttttctttgttatccatctatattttatacagctacggcaatctcttatcaatgggggagatcaaccttttgatgacttttccaattctgtggatggcaatgatgaaaatgaaaaccactctgaatttcctgattttggggtacctgatgatgacatgcctgataatgtatttatggatgaagatgtactttttaacaatgataaggtttggctgatattattttgtttattctataactataatgtagcatttggtgatttactttgattgattaattatgaatctatgtgcagcatgatggcgatgactttggcgctaataaagcttttggacacgaagatgaagatcctcatgaaagtttagaagatctctgtcgctcacatctggtaagtgttgatctataactttttatatggattatgctaatagttattttgccttgtaatgcatttgttgtaagagaaaaatactgttactatgtttttttttttgttgcttagaattatgcatatatataatattttttaatctagtcatatgggctgataatttttaaaaacgtaaattgtgaatttttgctgttgtttggttagttaattatgtgccatcatataggatgctctccttgctagcatagctgaaactgagaagcagagtgaactggcagcaagggtcacaacatggaaacagaaaattgagcacaacctcgatgagcaagtaagtcttaatacgtcactctactttatttagcttaaaattgaatattcgtaatataaatacaactttaattcttgtaggactcacatccggaatttgatattcatgtttatggtcaaagaattctcgataaactatctgttgaagcagaggatcgaaacgttttatcgtttgctgaagttgtagaaggtcaagaaaaatatgatgtggctcgaagcttttctgcactattgcaattggtactttttcttgtttttgcttatttgctgacatttccgttcataacattgtttatccagaagtttgtgtataatttttgtttttgtatatctaaaagttgatgttttcttttcttattatactattatcttcaggtgaataatggggatgttgagttggacaggagtggggtgaatggtggttctgtttgccacacagcagcaaacccttttcatgttcgactccttaggcaagacaagaaaagagaggaaacccagtttcgtttgtcaagaaagagagtcaagtctccaaaagtaaaacataggaacggagaaaacgaaaaccttagaagaaagaaatcttctgttgatacttccaaattacaaccaaattgcaaattttctgtgcaagatggtaaaattaatggtctaaggtgcactcctgacaggaagaagagaaggtctcggttagttgagccagttgatctacattccgcaggatgacacatgtggttggcaggttagtttccactgtttttaccataaatgcaatctatggttaaataaaagcagctaggaatgaccttaaatattgtagctgtagttataactaacaagggtagcatcgttcatgtactatatttaacatcattactccaatgcaatcattagtactaccaccattgcttcatttatctttggttctatgccctttaataagaccattttgtattatgtgaaggtaaaagaaaagcaaattttcttatggaccaagtagctctccctccctatctatctctctctcatgacatatttcatttgaatttaagatgctaggaaatcaaaattgctaagtaaatttggttcttaactactacgtatattgatttagttgtccccaataaatttaaaaaaagtaatgccactaaatttgtatgtaaaatcatttagatggagcagttggtctcttgatttgacatgttattataattttgtttccccacttttacctcttttggtatttacttgctccatcctcgtgaatgggccaaatgagccaatttcattgaagaaacacttatgccccaatgcaaaagtataaaaaagtttcaggttttgacaaaagcgcgttaggtaaaagaaattctttgtacttttgcttattggactaaggtttcaacgagtttttgtttgatttttccaacgacttctatgcatttcattattgtttgttggagggtttacttggaaagtgaagagaaatgttgtataaaatcaggggtactcatgtcataactaaactaactatataatcttgtattgccatgtaactacaccataaatat

SEQ ID NO: 23621 - DNA, 3278 bp, Cannabis sativa
  modified_base (1923)..(1924): a, c, t, g, unknown or other
ttgtattaattattaccaccaaaaattttatacaatgtatgttgtattatttaatacataacaaatagtccctattagtttctattataatatttacaaaggattcacagtcaacacgaatctccaatccagacctgggacccagacccgtacccggacccggacccggaccccggctggacccgaaccccggacccaggacccgagactcggaccctagaccccgaaccccaaacctggacccttacccgatcccaaaccccggcaccgaaccccggacccagatcccaacccggaccccgaccccgacttggacccatactctgacccggacccagacccggacccgaacccaaactcgagacccgaacctggactcggaatccgatccggacccgaacccggacacagacctggacctagaccccgccccggacccagaccccgacccagtacctggacccgggaccgagagcgggaccgggactgggaccgggaccaggacccgaattaaataatactaatacaattcaatatattaatacaagtcaataccaaacatattattatattaaacaatgctaatacaatatactacaacataatccaacacaatacaatacgtcatactaaacgagcccatcatgtattctacatttcaataatacttgctcattttatagaaaggggttactatagggatatttttgtacatccttcaaaattttgataagtataaaataatttatatgtcaaagaaaaagtattactataaaacattagtagtatctagtactatttaaaggtagtatcttttaaatagttaacaatattttatattagttattacataattgacttaatatctttcagcaattttttttaaagaaaatagtgttcaaattatatatacttcacaaacgtataaaatataaacagtatgtatataataaagtgtttaaattttattttcgacgcgtttgattattttgaatttcttaaaaaatttaaagtatatcttagataattataatatatattgtcatataaaaaaaaaaacttaaaattaaaactatctaaacatcgaaaacacaaataaatacatcaatacacaaatgtttaggagatgcaaaatagatttatcttaaggtacaataatgtttattgtaataacaactaaagtacttctttcaaacactactacaaatatctaaattcgcgacggtcttgagaacgattttttttgtggactctcgctaaaaaaaattaagtaactatttaaaaccgtcgggaaaaatgagtattctcgaaagtttttaacagtagctaaaaaaataggcgacgtttattattaaaaacgagatttttttaaaaattatttaacccctatacccggcggtgtaaaaccgtcggatatagtatagccgaaggtatactatacccaacggttttaaattgtcgggtataccccatttaatttttcttttcttatatatactacaaaaaggggaattcccgacagttcaaaaccgtcaggtataaaatatcacttacttcttgctacattttccacgtgccaacctacttcttttctatttcccacaggcccaaacccatacatttcttctctatttccacaccctaaaacgaaaatctgaactctccaaaaccccacccacgcctctgcaccatcgccctcctctcttgtcctctttctccctctctcgatctccctttcttctcgtctctctcgtccatcgatctccgcccacccctcctcttgtcagtctccctctcctctctgtcgcatacgtcggaccaccaccatctcccgtcggtgtccctctcatcttcatctcatacgccggactaccaccacttcccgtccatctccctctctctctttctctctctctgagctcnntataaatgcatttatttatttatatacttttttatttattatatatatttattttgttattgtataaatttaatatgttttaaagttaattgttattgtaatgaaattaattagttgttttattttaatttaggtaaaattataaaactagttcaggaaaaaaaaaatgggagaaaatacaaatttttgtattttttttctcttttttacattctcgacagtttaaaactgtcgcgtataatagggtataggcgacggtttaaaaccgtcaagaagtccacattagcgacggtttttaattgtcatctattttgcccgttttgcgacagtcgtataggcaccaacggaaatactttaaacgactgtttacaaacgtcgggaaaaaccatttttgtagtagtgaaaacactgtactacaaatttcattttctttactttgtcttaaatcattacattaccctatattttttttaaaaaaaaaataccacaaataaaacctatactctttatatcttttataaattatatttatttcaaagatataatatcaatatatatacatacacataaaaaaaaaagttaaaattgttagttttattttttgcattttttaatttgacaacaatattttattttatttattataatcgatagtatatatatatatatatatatcttttttatatattgtgattgatttatacattaaaaaaatagatatgttaaacgtttctatgaaaagtttgacaatatattagatttttaatgttataaaattaatttaattgtggtttcccttgattgattaattaggtattaaatggtgaattttgaaattgaagtcttttttttttaaagaaaatgtccattcataagacaataaacctcacggtcattacaacaaatgttcttaggaatagtatcaacatcaatacaaccatagtagttatgggtaaaagcccagttggccacgttatgcgccataaaattacacgatttggccgtaaaataaaataaacatgtaatgaaggaaggagcgattcttttacaaaataagagtagatttcaattttccatcgagggcccaagtcgttgagagtgttgatcactatctttgaatcgctttccacaaggataaattggcgtactttgtcatttgtgacctcaagcgccaagcaaactgcaacagcttctccacacagggcattgaaaaattccattttgcccgtaaacacccaaatcagcctgcttaggtgatctctagcaaccactgctacgcacatatgctccctatcaaccttagcatcgcaatttatttttatccaatcttgggggagggttccagttagtggtg

SEQ ID NO: 23622 - DNA, 3044 bp, Cannabis sativa
  modified_base (386)..(386): a, c, t, g, unknown or other
  modified_base (1381)..(1381): a, c, t, g, unknown or other
tttgttatctttttacaattttttgaatccaccatgattcactttgatttgagtctaaaattactcttccaattatgactcattttacaagtttgaatctacttttgatccatttgttattgctatgacaagataaatctcataagtgtaactttgatagttcactttctcatctcataaaatgagataaaagctactaataaaaaaataattccaaaactccattcaaaaaataatgaatacattttttccatcattatcactattatttttatcatatatactaaatatgattagttacacatatattattatatactaataatatatataactctcatgcataaaattataacttccaaaattttatgctaattaatatattntgtatgttactatcatctcatatataacatacacataatattaatatacatcacaacttatatttacatatttcaatatatataacatatgtattttaacgtgcatacacatcataatatatattatctccacataatatatattatatatgtatcgcatacataaatattctcatcataaatatatattatcatatgttcaacatataatatatatatatatatatatataactcatatacatattatatattatgcatatctcacatataataacataaaaaatctgtatcttagcatatatattttattatataaaaaatagtaaatcataaaatatcacaattcttacccttgtattatcacaagttgatttcttaccttctattgaagcaaagtaggaaattgtaagcttttgattgttgaaaatttataggtgcttcaatagaaagaccaatgtcaaaatacaacactcaaaataaaaaaatacaataacagtaatattgataaaataatgttataattctagataaaatatacacataaatatagaaaagaagttgaagagaagattataaaaacacaatataaatagagtatatatttatagatgtgagaacaatctcaacaccactaataccaagtgtcaagtaggagaatcacaaaacttgaacaaggttttacacctttgtccaaaagcttatttctccctaccacaagcacttaaggaagaaagaaatggaaataggtttcttgaattatcaagcttatagcttctagcaaggtactctctttgatagaaactcacaaaattattttttcacaagtgaattaaagacctctatttatagtgttttaagataacatattttgaaattcaaataaactacaccttaccatttcttaatggggtgtaaatgggtgatttggaggctatgagagttgttaaaagacatccctatagtaaaaaacgttcaacaattaaagctgaaaanaacagtaactagttactagttaccaaatttgccagcttttgcaaacaattctacaaaacattacaaaccattccaactttattttatatcacttatacactttataaatgacaaaattcaatctccaacaactatatttgaattatagttttaaatttcaaaaaattaagttatgtaaccactctttacacacttaattaatgatcatgtggaagttacaaaatatgagtaactccacctcttatgttacaatttaaatgaatattagatgtatgtaactctcaattacattatatacattaatctcatattaatatataatatatcttattttaatattttaatcaatcttatattataacaatataatataacatagattaaatggagggatatgttgttgattgtaatagcaccaagttattaaggagatttgtcctatctaaaaatgcattccactctattaccaagagtagcaagacatacaaagtttgaaccttcccttggtcttacatatcccaattcctaaccctccttatcactagaccaaacctagtaattttaatatgctttaactttgtgaatgaatcttgtttcatccaataatatatatatatatatatatatggtgtaaaaaaaatgtaattaatgctaagaaaagtgtctataatattattaattgagcctatgtatctcttaattaattggatagtatcctttatctatatgattttgtggaagctatgagatatttacatggtagatatttatgtgtattattggaactgaggtggctttattaatcctagaagaatacaaatatctatgatatacatgagtgaaatatctgagcatgtagatcgactttaacgtactacattaattaatattaaacccatatcatatggtagctggttaaagcaacctcaaaagcgtcgcaagtctatgcctcaagagtttgggatttaattatataacgccggtgttataaggggcaacttaatcctttcactacagcagccttatgacaacatgcaaaagcttcattcacttaaaaatttctatatatttttttttagaaaaatgaaaaagcctttcattaatatatagaattacattacattgcaattgatgttaagcgcaaattacgtataattaatttttttaattaaatttaattaagtgatattaattacaatatatgtatttttaatttttttaattaagtaatatatttttattttaatttttaaaatagggtttgagattttgatttttaagaattttttttagctattgcagctataatagctatgatgtgctctttaaatgtgattatatatacgtactttatatatacaataaaaaaatgaattaactactttcaaaatacatcttatttattatgcccaaacatatatttaaaaaaaaaaaaataatgatagtgatagatacaatatttttaatttgtacttaaagattttgtggttataataataaagtatgcaaattattagaaatatatatatcattaattatttttaaaacaaaaaggtggattaaagtttaaatatatacattttatatatagatgtgattatatagatgtaatttttatttttaaatatataaattaaaataaatttttgtatataaaatattt

SEQ ID NO: 23623 - DNA, 894 bp, Cannabis sativa
aaaacaaattaagtaattatagtatttaattataagattgaattaataattaataattaattaatgattattattattatttttgtgtagtccattgaagaattcttcagaattaaaggattatttggggacaatatatgcaacagcagcacaatacaatagtccaccaaaatatccagtgaatataatatgtgaagccattgataataatggtgatgatgatatacttgataagatcttctcaggcctttctgcttataatcctaacaaaacttgttatgtcaatccaccaaaaattcctactgaaactgatcagggttggaaatggcaggtataatatatatatatgtgtgaaattactaatttaacccttgtgctaccgaaaaatacatatgtgatcagttgttatattttgtcaaaatgatgaaattgatgatcatactttgattaagctcaaatttagtcaaacaatttatctgtgatgactgtaatctagctaagtcgaacagtgattgaacacaatattaaaaattatgttgaccggaattgaacacatgcatcaatttatttcattttgtaaaatacaggaaccagtaatttatatagggtcgggcctaagttaaggcgggctcggaccccggatttggacccgaaccctgacctcgacccgggacctagacccgaacttcaaactcaaacctcggcctcggatcctgaccctgaccccgactctagatccagactcgaacctcaaccccggacccagaccgagacccaaatcgggactcggacccataccccagccccggcctcgaccctagacctagacctgaattcaaaccgggatcgagacttggacctggacttggggatttggacccagacctcgatcct

SEQ ID NO: 23624 - DNA, 3975 bp, Cannabis sativa
gtaacttttatgatttttccaaagctaaaagtaacaaatgataacaagaaaatagaatattaaatatcaattagtaaccaaataaattattagtaattgcttacgttcaataaataatttttttacacactttctttatctaataataaagaaaaaaatacatattatattaattttatagaaaagaaagtgagtataattaggtagagaataaatcataaatatttgttacttatgttatttatattaaactatgaaaaataagtaattaatttctttattatgtttggagatgtaaattttcttaaattttgtgttaaatttggctcaaaaaataagttaatgttatacagtaagacctctattcaagaatacacttatatgcaaattatattttaattgagaaattataactaaatacacagtagaaagaaaaaatcaacgcactaaaatatcaatgtcacaacaataacaaaaaacaatctaattaattagatattggcatctccggcagtgatctgaaattatgacttattaatatcatcctctgtaatctttcttatataataaaacttaataaataaagcattgaaagacttgcactgaaacatatactattatcagctgcaattaatctccaataaaatctatccgcaagaagattttttaattgttttacatctggattttttatttgataagaaagaagatagtgtgtaattacttaaatctggaaaataaggatacaaagaaaataatagacatgaagcaaaaccaagtcaagcgatcacccaacttactgttaacagctgtgttttttttttaatcatttcatacagtagagatatgcaggttacatgcgctgtgtttttatttttattttttcaaataaaaaataaacgggaaaagcagttgaactgtagcttagaaaaatgaaggttcatacctgcatttgtaatctagcaatatcctcattcagattcacaatcatttctttagctcgaacctgcagaaacatcagaaaatgacaagtaactcaccttattgagcacaaaagccgaatattcaatcaaaaacattatggtcctgtaaaaactctccttcctgccaagaatatgatggagttatattaccctggggatcgtaagttctatatgcttcatgattggctaaggtagagtcagggaatcagagctaaagctctactgggagatgaccagtcaaattatctaggaagtaggaaccatttcaagatttctctttgtaatactctatttccaatttgataatatgattacttcttttgtctttatgctattttctactttggttctatcagacatatagaaaaggtcggcaaaaaaatacctcgttcagaacccaggactgtctctctttttctagatgttcaactctttcttgtatgcttacctgtgaaaaatttataattataagataatgacttagaagttagaagtattgattcttaaaaatatatttgcactcaagtattattgattcttatagtgtttcaaatttcaccagcaacaacaagaaacagtgatttggtaaaagaaacataggagcccacattgaagtatgagattggttagtcgtatataactatttgggcaatcttctctcttaggctagcttttgggagtgagttttacccaagtggttgtatcacatgacaagaaccagtgccaacataaatgtcgattacaagaaaaagaggagcgtggaaaaaattattcaggaatgaagttacctctttcaagaaaaaaaagaaaatcgtgaaacaaatttctattaataagattgaattaaatataagtagaggataaggttcattttttctcctctcttttactccattcacaagggagagaggatgaaaaaacttatgaaaaaaagattgacctctttcagataccaagtattcttctcatcaaccaactgatttattttctccaccagctgaccctgccaatgacagcatcaaattagtcccctcaaattctcaatttgcttcataaaatgttgtaaataaaaacaaactttattttgtgtagagaaagagcagttgaaagtacatatcaacaatcaacattattatatattgttacaaatttacgtaagtaatatctctctgcatgtgtatttcagctatatatgtatgtatgtatgaatgtatgtatacgtatattttaagaaaattctatacttaagatcacctctttttgaagccataaatctttttcactctgtaattgaacaatttccaactctagactatcctgtgatttgtaaattaatcagtcagctacacatggaagaaagtgcataaattccaaccaaacaggtaatgaactacacttctaaatccatacagaacttttccttattttttctcctaattgtgtgtcatcgttctaatcatattaccttgttcaggatacaagaacttttttcatcttgtaattgtttgatcacctccccataggtaaactgaaagagaaatgcacaatatcttaagcagaacaaaatgtttataaaaattcaccaacttagagtaaccacctctttctgtaaatgcagatcattatctttttgtagtttattaattgtatcttctaaggaagcctgagaaaagggaaaatggtgagtctcatcatctaaaccccaatccaagcatgatataatagtaatatatttttgaattaatctcaaaataaaatgtacagactgcacaatacctctttttgtatgtgattatcattttctttttgtaattgtttaattgtttcttccaaaatagcctgtaaaatgatagtcagtatcaggtcaaatctatattcaaaagaactatctagtttggaaaagtataaatcagaattaaaaaatagtttactactaatatattctattgtcaatagaatccccagcatttttcatcatattctattgaaatgaattgaaatttaaaagaagctggtcggtaatgcataaacatataattgttctctatatgggtatgtatctatagattgagcaacggtgtgcaccaaacctgtttctgaaagtgaacatctttctttgtctgtaattgtgcagatgtttcttctaaaatagcctgtaaggtaataataacggatttaggttaactgaactccattacaaaagccgaattgctcagcaaattggaaaacaaatgtgtacctcttcttgatgcgactgaggcacctcagattcagctgaaatggactgctgaaaggcatgtttgcgattcagtcatcgagattacaaatatataaatatacattcaaattatttatgcagaaatttctttaaattccgtgcctagttttagcagcactacaactgttctgtaagtatatgtttcctaaaagtgtacacaataaattcccaaataataatcagtcaaaaggatttcttacggaatttatagtagcatttagaggagcgtcgtgttgggcatggccattgacagtagcccctccttctacttctgtctccgcaatcttactctgtttattcttctttttcttgttgtttttcttcttcctcttctcgtcctccattttcgaataattatttcaaaatgtgtcctccaatacaataaaccctatattgtaattgtaaaacaaaactttactaatttaaaatgattctgaaaaaacactaacacgcgacatacagatccactttctgcctattatcaaatatagggagcctcctccagatccagttagcgagaatgcgatttcattttgtactttgttttttctttttagttttcgttgattattttcattgaaattgagtatgtggccgtctatctactactctttcgcacgttttctcttgtccagaatcagggctgcacatttgggtctctaactcggttcccacccaataccccccggcccgaactcaaaaaatccgaaaaaa

SEQ ID NO: 23625 - DNA, 4208 bp, Cannabis sativa
  modified_base (4181)..(4183): a, c, t, g, unknown or other
gtaaatcgtacttagcaggtaaaatttagccaagtcctctattttttagcaagagtattgttgtaaatatgaaggccttgtgcgctccatcctaagaatggtggaagctggtgaaaattatttgtatcttggacttctaaatactatgagccacaacaagtcagtcgtgttgggctttcttaagaaaaagatgaggaagcagatcgaagggtgggttgttaagttttcatctaaagttggtaaagagttttattgaggtggtgcaatctctccccaactatgttatgagcgtttttcttttgcctaaaaaagtatgtgacgagatagaaaattaatgtgttctttttggtggaagaagtcaggtaagaacgaaagtgacattcaatggatgagttgggaccatatgtgtgtcccaaaggttcatgggggacttgggttttgaaagcttcatgattttaatattgcgttgcttaagaaacagagctggcattttcattctcgtcaagattctttagttagtcgtgtgttcaaagcttgttattatcctcgtggatcctatttgggggcagagttgggaagcaatctaagttttacatggaaaagtatccatgaaactcagtctcttatttagaggaatgtaaagcttattttaagcattcatttgttcctctcaatgtctaacgatatatggcattggaatggagagaattttggtgtttatttggtcaagagtgcgaatcggcttcttcaagagcttaaggatcatttaattggagttggtaactcgatcttttggaaagagttgtgggatttgagagtgcctcctaaagtcaattggtttggagggctacttctaattgtcttcctacccgtgtctaattaggcgtgaaacatgttcctcttccctcgttattgtgtccaaggtgcttgcgagttggagagttttttcttattgcctggtggggtgttcgtttgcttgtgcatgctggcggatggggggtatttcgatggtagagattggtgacaactcttttgtgggagggctttatgattgatttcggtgttgggattttgggatgaaacatagagttgttatgctttgctgggcgttgtggtctgtgcgaaatgacaaggtatggaatggtaagaataagactgttaaggagatggttgcgttggctaagggcaatttcgatcaatggagatgtgctcaagataaaacttttggttcctctttgttctctttacaagaaggcaaagggcacgagcattgaattgcaccagttggtaatacgataaaaattaatgtagctgcagctatctttagtaatctaaataaataggggtatggttggttggcgcgggattcttctggtcagcttattatggtttagacagtaagtcgaatgagggtggttgatcatattctcgctgaagccatcgaggttaaaggggtgtgtgagttagttgaaagaaacaaggtgacatgattgttaagagtagaagagttagttaatcctctcaactaactttctgttattttctctgtattcaaactcactgtaacaactttctgttagttgtgtgggtctgttttcttttcttctgcttcctcttctcttgtatataaatcattttgttctggcttctcattaatcaatacagagaattcttatcattcgtttatgtttacaatgatgtggtggtggagtaggacaattcagtcacaatccaaactttccgaaattcattagatatgccttctgtttttgggtttgagtgcaaataatatttttttaatttaaataatattttttttaacttattgtgttgttcattattggctaaagcttcgtaattaaatactaattatacctattcgaattctatgattccaaataatttacgtaatatagttttaagtgatttgtgttaataaaattgcatctttttattaaaaaaatatacattattatatataatatagcaaactttcaatttaaaaaaaaaaagaaagaagtctacttatagaggagtgtggttgtgattgtggcgtttaagagacaacgaagtcgtgtttaatcagacggctcatataaaacgacatcgtctctgtaataatcagaccatagcgacaaccctcgactgtgtttcgcactagccggaacaactcaaaacaaaagcctcgactccgacggaatccaccatttatgagagtgtggcctcatcactcttcaagcctctcattatctctggcctcttcttgatcgtctaaaaatggcgaacctcatgcaaaagttcgccaaaagcaaaccctcattacgattcctcacatccctaaatacccatctggtcccaaaatcagaccattctctcgcttcccagcacacccactccgccgcccccaaacccgaattcatagtttccccgattttcggtttgggcgatgacaaggttgagactgaaccttataaatgctcggtgattttccccagttttccatttgggtattgcttaaatcctattccctcaactgggtctggaccattgggggtcgaccagatcgacggggttgatagtgaggactcgcggacggtttgggctgatagtgtcaagaagaagaggaagaagaagatgaacaagcataagtataagaagcttcggaagcgtcttcgtcgaaaggcaagaacttgaagttgtttgcgaggtttagggttaagttaaaccttggtgttttattttaaaattgtttgaagcttatttctttttttgtttttaactcaagttcgaattatgcatctgaatttagagattgaactagaatttagtaatttacagaattttggtttgaaatatagtgcggaaataattgagattagaatgagagttatgagattcttttaacattacagtatattatgatttgttttaagtctagttcatgtattgaattatgaaaccacttcgttatacactgagttaagcatttttgttgttcttagattcatattatgtactctcaatggtaggtttgaactgtgattagtttatagtctcacacaataatacctaatttttcataatctaaagaatttattgagatgtgatatgtattatattgggacagtcttccactgtaacctggtttaatatgcacactttatagttatgaagcagccaatgagtagcatgtttgccttcattgttgagtaatgtatagaggatcatttgtatgaattgtaacatgtgaatgttttcttatgatgacagtcagtatagaaacgatggaagtaccacttggtgggcaaccaaggttagaagaataagttgggagtacctaaccttttgaaatcaatagttcaaaccattttttgtggacctttcttttgttctaggttctttctttcctatagagttgataagtaataatcttcttttaaaattacagtgctaacttgcaaaaaaacatagcttcattccttgtatagctgtttaaaattatgtagaatgcgtttgttcggccaggttcatctatggaatagtttgttgaataaaagattaggcctaacttttgtagcttagagtctttgtgtagtccagcatgtcttatcactaactgctgaaactggtgtggacaaaatggctgtgtgatttattcttcatcacttcccctcctgtgaaaactgaaaattattgtgaatattgaaatggagttgtatatgtacttgaatgactagcaaactgtgttaatgtattggacctgacttcccagattcagtttggcaaatatgacacagagagagattattaggatcatttataactaagttttgtatactggttgctatctatagatgacattcaatgttgaaattgtgcatttcttctgcatttgaaactatatttcgaagtggaaatgggctttaggttgtgaatagtaatagttagccacataagtttttttctctcccgccctccatttcacttcctgattcaagtaatcccctgtgcatcttttgttagaaattataacccatttgtgtgtgagcttgcttcactttcaccaacagacacatagagggggggtaccacatggtttttttctaaaggctaattagcaatttttcccccgaactttgacatgtactaaatcatgtcccttgaacttttttggccgttannnattccccctgaactattgagattgt

SEQ ID NO: 23626 - DNA, 9461 bp, Cannabis sativa
  modified_base (6503)..(6509): a, c, t, g, unknown or other
ttagggcacaaagcccaacagatccctaccctcctgttgagggatagagcaaattacatcttatcttttcctgtagagaggagagacataccaaggctagcctgtgaggtaagtgttcggatgtatgatttgtatcctcctttgtgtagtgctgaagggagttgagggtcctttaggaggcccagatgacactccgatgatagaggaggctagcctagggggaagacctacacctgagtcaaatgataacgttccccttgccaggttttccaagaatgtggccagaagggatcaaatccttcgacagtgtttagaatgagggggaactgtacagaatgcgtctcttctgattaggtttggaggccaggactttgttggccctattcgaccaaggcatgtgtccgagggcaaagtcaaagctgccgccattggtaatagtttagaagattcatcctccaaggatgactatcccctagagggtagtacatagtaataaattttatttatgcttgcatttagtacttataacttttatactaactttgttactttcctttttgtagacatggactccaagatgaggtacttagtaggagggtcgtttggtggtacttcttcagaccgtcctcaagccaaggtgcttggaccgctagatcatctgatgtgactcagtccacattgcctcctcctcctcatccagggcctgttttggttgactagctagtgattatggaccctttcccgaggagcactccgcccccacaagccttcaagcaaggagggccagaggcctagctgggggcttgtttatctatagtaagaggacgatagatgttgcaaagaattaccttggcaaatttttgccaagcattgacagggcgatccaagagcttgaggccaagaattttgagtagttgacatccacaccttcaaggatctttcatttgtaagttgtttacttatttttacttgagaagttgatttgacaggtgctggctggcctatagaatcttttggtcgaccaaggtgacacaattaagaagtaggctagcccatatactcccttggccgaccagacttgtccaacttctcacttggtttttctttcatttcaggccatgctgaagcttaaccttacccatgtaagggagaaaggctctactgttgttcacaggatgaagttgaaggccaaggaggctgagctcaaggcaaagaaggaggcatgcacccaagtacaggctgacctgtcgactcgcttgagagagactaaaaacttgaatgatggcctaaactgactgcttggtcttcgtaacgaagaggtgataaggcttgctgctatgacctccaggttcgagaaggagctcgagatggaatgcctggagaaacaactagcccttgatgggtatcaagccatcaaggatgaatatttgggcttaacctctgaggtcttgtatgaggtttatctacacaatcccaaggtttatcttgggtacatagggtctccattccgtgatagttcactttgttgggggaaggaaatctatgagagtaggttgttagcagagcaggctgacctggtggtcggccaggttgagggagcactgtctagcaaagttgacgaggctgtggccggctagcctatagagctagtggtcggccaggttgctgaggccatggctgaccaacctgttgaggctatggctgaccatccttttggagaccaggttgtagagccttcttctcaggctccatttttcccggctgatgctaccatccctcgctcagatatttcgagcccacctgcacttgtttatgattagacacttttcgttagtttttcatggttttgttttgcatattatcatgttcttatatgacttgtaggccttttacttttgaacaatacttgtggccttaaggcctttaatttttgatatatgattagccaggcagtctttaatccttgcttttatcttcttttgatagacatgtaagtattcagatttacttcttttatgtctagtcttaagtatgccttttgcacttacttagctttcaaatttttgcttataaaaatctttaaattttgcttaagtttagtcgtgcttgttcgattcttgtacggtgtgggtgccccccaagtgatcaaaagacttatggtgtcttggtcacttgcaattcaccatgtattatagacctttgcttgtgtattttcttagagggacctattgtacgcatgtggaactaaaaataaagaataactctaagaagttatcttgtagcaagttgtttgacacaatattgaactgaaacaccgtttttatttatcaattggtcttaaatatgtgttgttgctatgcaatgtacatttattgattctaaaagcttgcaacataaaaagtatacttctagaactcatatggctactcctactggacatgtcaggcaaggtttgtcactgaagagtgatgaatacttagctttctgtaaactaacccttataaatgagttgacaaaactattactgacgagtagagttcttacaagttggtcactcatagtactttttgagatgttctccattccaataccttggaaggagaactaactctatgttctcattgtacctgccaagcttatatgcgcccttgcttgttatatctgtaacttggtacacgctttcccagtttggtccaaaccctcttactacgagatctttggtatttaggaacactcttcggagcactaagtctcctatgaagaatttcctctccttgacttgtttgttgaagtaccaggcaaccttctactggaaggcatgcaatttgaggttggcttgatctcaaggtgttgtttacttcttggtcataagttatgagacggtggctccatctctacaagcatcattgcttcatagccacacgcaaatgcaaatggtgtttgccgattggctgtcttctcagtggtcctgcgtgaccagagtacttctgggagtaattcaagccatttaccttgagggtcttgtttatagcttccactttcccattagtttgacgatgagcaatgacggagaagcttttgatgataccgtgtcggttgtagaggtcagtgaacatgtcactgtcaaactgtttcccattgtctgacataatcttatgtggtaatccaaactgacatatgatgttcttgacaacaaagtcgaggaatttcttggaagttattatcgttaggggttcagcttatgtccacttagtgaattatttgactgcgactacgatattgtacacctcctttacccttggggagttgaccgatgaggtctattcctcacacagtaaagggccaaagaaattgtattagtgtgagctcgttcggtggagctctcaagatctttgagaatctttggcacttgtctcattttttgacacagtccattgtatccttgatcatggtaggccaaaaatacccttgttgtagtatctatcaatagtcactcgaattttgtctcagtgacacaccttaggagtggcattgagaagcctcatctgtacattattccatctaggattaggtaactagtagcttttcacctcatttttcttgcctcatttttgttttcaataaagactccaagttggaggtatgctaatatgggcatcatccaggttggactgtcatccaacattttaacctcttttggaatggtaattctttgttcttttcagaactttattggcatgaagtttgccttatcggttatggtgctgcttgctagacgggggagtgcatcgactgttgcattctcttctttggggactttccttattgtatagccttttagatgacttaataagtcttagattttgctcaaatcagctatcattttttcacctcaggttgtacactcacctaggacttgactagttaagagtcactgtatatgtttaggtggtcagcctgtacttcatgtgctagccataggctagcaatcagagtctcatattcagcctcattattggaggccttgaaatcaaatttgatttctccatgcagttagggcccctaggtttaatgagggcaatgcctgcaccacacaatttgtcggtgcatcttccatcaacgtgtaatttacatgtcgattttcatgctcttgctcctactcttgctctcacttcttctctagctcttacttttcccttgaatcttttgcagtttaaggagatatgtatatacattgagcaacaaagtttgcaagagcttggccttttatggccattcttggttgatatgttatttcaaattggcgacctcgatagccctcttgagtaatcggcctaatgcttcatgtttctataacacctgtcgcaatggctagtcagtatgtcaacttctccatgagtgggtatcgactttcaacgtcaataagttttttgttgacgtaatacacaggatgctagatgccatcttcttctctaatcaagactgcactcacaacatactctatgacgaccaagtatattcctagttcttcattgtctagagcttttgataggatatgaggttgagataattgtttctttagctcttggaattctctttcacactcctttgtccattcaatttttttggtttcctctttgtgtgttgaagaaaaggacacacttgtctagggattttgacacgaatatgtgtaatgctgcaatgcgtcccgttagactttgtacttcttttatttttatgggcaacttcatgtctaaaagggcttgagttttatttgggtttgcttctattccactggcattgactatgaagccaaggaatttacctgagcctactctgaatgaacacttgagggggttgagcttcatgttgtacttttggaggatcttgaagcattcatttagatcatccacttgcccccaacctttttggacttgaccaacatgtcctacacatacacctccatattacgatcaatgaaatctttgaacatttatttaaaagtctctgataggtggcccgtgcatttttcagcctgaaaggcatgactttatagtagtacaggcataggtctgtcatgaaacctgtatgttcttggtttggtgggtgcatcttgatttggttgtaaccttaataagcatccatgaaggttaagatctcgtgatcagcgatagcctctactagctagtcgatcctaagaagagggaagcagtcccttggacatgtcttattcaagtaggtgaaatctatgcacaccctccacttattgttcagtttgggtaccaacatggagttggatacccaaagcagatagaatgcttcagtgatgaagtcattggtgctcagtcttttgacttcatcattcagagcatgtgcgtgccccttatccagtaacctcctttcctgttgtactgttggaagtttggatctacgttcagtgcatgggtcatcacaaattggtctatgtgaccatgcaaagaggtcaatttacccttagaaattttatatagatttattttatttcttgcgctaaaccctttccaatatttaactttcttgttggaagagtggggtgaatctccacctcttccaagttatacctgaaattcgggtaccattcaaagaaggacacgtgtcaaattggaaagaatacgaatcaatgaatgtaacggtaagtatatttgaaaatggaataactcattaatgcggaattgacagagtatatttacaactcgatgactaaaaggtcttatgcatgataaagatacaccaactgttgcctcgtacattaacgagaaactgtaggaagacaagacatcaacctcgctatgcattaggagacaagacatggagactggtaagacacttagagtataatacaccttatacagactaagtataacagtcaggcaactaatagcgaggcacctatctcgccataggaaggcgcgctcatggtatcttcattaattagctcccaacacctttcaatagggttcacagcttcgtcgagttagctctctcagatagaagctgacacataaatgatattgactgctgaggtccactttgtcaccaagaactacgatattcagatggaacattatgtcttcgagtgcagggaggacgaggctaacatcataaacctcaaagaaacatgggaaaagctccagcttgctacaaaggttattgatggtgtgttcccatcgagacattctagaacgttacgatttacaatgtgtttaatacacgtttaccttgacccgctaaaagtgcacccatcacagctgtgtgattttcaaatattaaccacatttattttacgtggtatgtaatcgaatcccacgatttcaggggataattgttgtaaagatatcagtcaactatgtaattaactgtctgactatgtaattataaatagaggcatgctacactgaaaaagggacaaaaaaaattataagagaaaatagtcctagaactgtatcagaaatctaataagattnnnnnnnggactatgcagaattttaactacaaaaccacgtaaaaaacctttgtgttcttactttttctgtaccatcttttaatttctatgcaagtttatcacaatttaggctcaaatatagttaacgaaaattggcattaatagttcggttctttctttgagagccttcatgaaaaagctcagaaaaaatcactccttacatacaataaaaaaacaattttcttcatggctgacaacacagagaacgttgacacaccacatgaagaaactcctcaccgtcctagaaaagagtcaatgagctctaggagacgttcaacctcacaatctaaacagaccactccctccaggaggacccaacctgagggtggccccagcactcggaccactcgttctagggaaacctaacctgagggtggcccgaagacatgaacaacacgtttgagaaggactcagcgtggaaatggccaaaatcctagagtgagggatgaaggacccaatctcggtggtgctcagcccatggatgagggtgcttataaccctacaagataaatccctatcgtcgaattggaaaattgccagctcaggcgccgcctggaggacgcaaaccaacagaatgctgaattggagcataaggcggtcgcagccagagcagcactagggaaaaatactcaaaaccaacctgaccctcaaaaaagaagaccacgaggcaggcctcggcgctcacaatccaggagacaggaaactgctcaggagaaccctcaaagtgctcaagaagaacaacttggggaaacagagggacccttgaaaacgaacaacccaacgaaaatgaggttcccctgaaaatccaaatcatcagccagaaccatctaatagcaatgagaataggaagtgaccaaaaactaggaaataggaaattccttgtggaaacgaggaaaatcctgggacacaacctgggggacgtaggtcactaacgaggaaccaccagcgttcttcccggacccatagggaaggggctcgtacaaaacccagtgggggaaacacgatgaaccacgcctaaggggaaagaacagggcattaagaagcgagtgtaacttcgaggcgcacaagaacacacagtcgatcaatgcgaggaggagaaagtactcgtcgcaataatgatcgagaaagcacaggtactagtaagactacaagtcactcaaggacgaggtccatgagtaggacaagatccgtaagtaggatgcagtctctgagtagaacgaggtctactagtaactataaccaatcagatctgtgagagcacttgaaccagaaaaaacctgatcttcgcaaacaactcgatccaaagcaagaggatccaatccaattgcgaatatatgagttggacgataagtttagaaggtatcaagtgggggagttaggaaagaatctggatatgactcagatgaagaattcgagccataccatccagacatcatgaatactccttttccccagggatttaaaaaccctcacgtctcgtcgaatgataggaccaccgatccggtctcgcatttggataacttcaacactataaaccgagatagtaacgttacaaacctcactagttggagcagaagtagctggttcaataaatttacttatcattccattacttctcaggaacagttgtccaaggacttcaaaaagcagttctaggccacaggggataggcgacccagagcgtcctagctaaccaatagaaagcaacagcctagcgagacgcttaaggcgtacttaagttattttagcacgactgctgcaagagtaagaaatttctatgatagtacacaacttactgcccttaggcacagatcactactgatctttccaccgttgggggcgaattgtgggacgacttacagggtcgtccagtgaagaacatcactgagttcaacgagagggctaagtggttagttcgaaacgaagaagctcaaaaagagatgaacttgctaaaaactggctcgggaggcaaatttagcactgtttccacaagtactgtctgtactaaagttgataactcaagggcctctagctcagagaggaaagacgactctaaggggtggtccaaagataagaagaaacgaaagaagcgcgacaagtacgtgccagtttatactatttataccgagctttatgaaactcgggaaaatatttacctcacacatgagcacaaggttgccttcagtaaacctgagcccatgagggatgtgaggcagaaaagagatctgaccaggtactgaaagtaccataaagatattgggcacacaatagacgagtggcgtcagttgaaagatgagatagaaagtctcatcgcacgaggccacttcaagcaatatgtaaagagacagggcaatggacataaccagcccaatctgcccaaaaacccaagcaaccagggattacaacctcttcttgttgaaggagaggatatcttggttatctcgggggggctgcatattgcaggagagaccaacaatgcccaaaagaggtgcgtgaaggaaataaaaaatgagcagtcggcatttgctccagagccttccaagaaggtaaaaattgaagaagctccaattatatttttggaggaagatgagaagaacgtgaggtaccctcacgtcaatccattggtgattactatctaactcgccaataaaaggataaagagggtgctgatagataacaggcgttcagtgaacatcccttacagggaaacattgaagaagatggggcttgaaaaggccaaattgaggccttgcatggtaaatctatgcgattcattggcgacaatatcgcaagtcaaggtataatcgagctccattgaccttgggtgaggtagctttatttgtcacgattatgaaagactttctagttgtcgacctgccatcggcttacaatatattactggtgttgggttttatgccct

SEQ ID NO: 23627 - DNA, 2449 bp, Cannabis sativa
tttatgaggtaggccgggattcgctacctcagtgtcgcgacccttgaagcttcaaattaggcagtgagaaacccaggatccaatcccttgacattgaatgctaatgataaggtctgcctatggacttatgaatctcgacctttctattaaatttttgtcttttagcgtcttgacatttaatttttatgtcgtagcgtgatacacattttttactacaaacgtacactgttgtaatttcaaattgtaattataaaaagattgtcgaacccacaagaattgattattaagtttccctaattattatatttttggttttatgctttaattaaacagttaaaagtgaataatgatttcgaacgaaataataaaataattgaaaagtaaacagaataacaacgatttcaatcagaaaataaagatctagagcactaacttccctatttcaaactatgaatctcaaattattctataatctatagtttttatgaatcctaatgtgatctattaacctctcttgagtgatgaaatgattaacttaattaactaataagacatttctattcaatatcaatcaatcaatcaataataaaaaaatattattctctttaaataaaacgcataaaattagtggaatatctcattctcacacttttttttatgtcacacaattctaagtctaattttagattacctctctcaagtgtaaaatctaaattatctctactaattaatagtaattaaacattaacaagattataattaacgcgaaattgcataaataaatagcaagaataaatataaaaataatctaaaaattttaattcatattctaaaatagttccaccaatactctagaaaaaatgtttagttaataatcacaaacataattatcacaataactatgtttataatcaaataactaaacaataaaataaagaagaagaaaaagaataagaaaatgactctaatgatgatttcttaaaatctcctctctcatgctcttcaatgtgttttctaatctcaaagttgttatctgtatctctctcgttgtccgaaagtcgatttacgtcattctttatgtagacccaaaatatagaaagactacatttagaattaggatttaaatttaaaaatatatgtacaatgctatagcgatgtgcatgaattcttaatatcacccacgtgctaaaattatattttttctccgttttatcttttttttttttcaggagcagcgctatacaaaccattttttgtcgctcttttactgcttcaacattgctcaataaatcatgcataatttttgtgtccggacttcaaaagagatgatttaacttgttttgaaaagttgggaatgagctctatcattttgggtttcataagctcttcgagaaaatgaaaacaatgtcaagaattagctcaaaggtctcaatccatcatcaaattgtcttttaatcacaaatctacacacttagagaaaacacatcaaatttatacaaaacttaaaaaaaatcaatattgtgctttagcgacaagattttacttaattcatcatttttccacatttttcacgaatttattctattctactaaatttgaaaaatattaacaactaaagcgtaaaattacacaaaattctttaaaaactactttaaaaagtataacaatatcctaacaaatggtatcaccagtcatatttcttgcaaacatttgatcaacctaacctaaatagtatgtcaaatagttttgagattgaaccctataaattttgttagggtaaatactattttagattatgtgttttgtaaaagttattgactggaccctctattttgttatataataattctgactcagtattttctaaattgtacaaaatagaccatgaactcaatttttcgtcaatttgttttttaatataactaacctgaagccagtgtacagcacaaacagttgtaaaaaatgtaatcagtcatcataatacctctaagttaggttattaaaattctcaagcctattttgtattattttaaaaaatataaagtcgaaattgttatttaacaaaaagcaaatctaattagtaattcttgtaaaacacaaaattcaaaactaattggcaatgagaggagtagcccattcaatatatatatcacaatttatttccacacgttaccaatgtaggactaactcttaatacaccctcctcacgtttgggcctggaaagtgtgggtataacgaacgaccttaagagaccacaagaccgaacgtgacatttgaaagaatcccacaaggcaaaatattgggaaatttgtaagtgtacacgtcgggaaatttcccaacatcagaagtataacgaataacaagtggctctgataccatgttagaatttagggataagatgaatgaggttccatctcaaaattaattggcaatgagaggagtagctcat

SEQ ID NO: 23628 - DNA, 1764 bp, Cannabis sativa
ctctctctcatttgtcttcactgtttgacctccaccatattcacccctcaacaatcctaaagaaaactactcaaccccggctggaccttaaacggagcttagtccgacgtccaccactcaacaaaataataggtaagtgtttttcttaaaaaaatagtgttgtttttttgttgtattctatggatctgaagattattagttataatttgttatttttgtgtccttgaaatggaggtagagtttgtttcgaactactgtgttttttcatttttttgcgattttgagcgacattttatgatttttgtgcgatgccatcagaaatcagaggttagagatgacatttatttttttggcaacaataaacaatgttcttgcgattttgtttgcgatttttttgtttagcgatttgtgcacgataccatggcagcattatgcaatttagtttatgtacgtgttaacgtagattttctttaacgataagaaagcctctttttcgtgataggattagtacacaaattagttgtaatctaagaaataataataacgtaagaataatacaaagtttttacgtagttttgtggttaaaattctacataatccacgagtcaatcttattcagattattttgatacaaactagggttttttccctcaagatttttccgtccctttttctgtacattctgcccatatttatagtaacatagagtgggagttaattacaatcagatatgaatcccaaaataatatttccctgaaattgtgggctttaatttcacaccacgtaaataaatgcagttagtatttgaaaataatacagttttgacttatccgcctttaatgggtcaatgctcacgtggattcagatacgctgcaaagtgcatctcgctgggaacattgcaacaataatcctaggttgataatgtaaatcccgtctcttctgcgattgaagacattacgctccatctgacaattgtagttcttcgttacaaggttaacttcagtagtcaacatcatttaaatgtcaacttctttctgaatgtgttgactcgacggagcagtggatctccttaaaagatctctggagctgattaatgaaggaaactggagtgtgccttcctatagcgagatggacgcctcgccatctatcacttaggttcttctagctgctgtacttagttagtataatgcttatcatacgcaaagtgttttaacagtcaacatgtctcttcatcaccttttatacgttgcgaggttgatacctcgctatgcattattgatgtgatccttatgattgtgtattctgacgtgaaatggtttctcatcaatatgtgaatcaattagttcgtacattcttgtctcgcttaagattatacattcagcgagttttatatgtacgccatcaactctgcatttaatgagttattctattttaatatcctttaatataattgccattataattgttgattcgtattctccaaggttgacgtgtgtcatcctctaaagtgctagccgaatttcgggtaaacaattgctccttaaaaagttctttttagtgaaaagtgctttttaaatgattactgagggtattttttgtctcaaaccattttgagaaaatgcatgtctgattttggcagttttatggttttgaggcacatcagcacttaataaccatcttttccacttcttttttaattttacccgttggataaattgtctccttaatctgatggagatcaacccaagagtataaaatgaaaaa

SEQ ID NO: 23629 - DNA, 2955 bp, Cannabis sativa
  modified_base (1053)..(1060): a, c, t, g, unknown or other
aaaaaaaaaaaaaaaacctactgaagccaaaatagtcgaataaatatatatattcctactgaactgaagcctcgattacatatggagcaagttcaattcgttatatatatattcaacgaatcaatccaaattataattgacatatatatacgtttaatttatcaaaagtatggtgacgtaccataaccattaatcataaatagcccattaatttatctaataatttcatgaacaatatctgaagtcaataatcacaccatatatacaatacccaaaattcggctggagaacatgtgtcatgatgaaaagaatgtgaatcgatgaatatctttttatggaataactcattaattacgtaagtattataacccactaactgtaaagtcttacgtcttacacgagaaatcaatatacaaactgacacttaatatattagcgagaaaccatatgtcgctaaaggtgaatcgcgaggcaccggaaaaaagtgacacgtaccttagcttgaaataagcacactaaatgtaaaaatcagatcgacttaaagaacaagtatatgcgagataaccatctcgctgtgagaagacttcctatatctttattcaactaacaggagcgaggctcataaccctagcaagtcagaagatttctttatacccgcgatcgatgtaaaacatacattgtcgacctcgaaaagaagaatagtcccagctcgctattgggatcattataatcaagtttctgtcgagacatctccaggttcagcaattaaagacgtgtttaatacacgatatttctgacccagtaaaagcgggaaaatcacagctttatgattttcaaaatcataaaccgcgtttacattacaaaatatgtaattaaatctcttgattttagggataaaaactgtaaaattatttcggtcaactttgtaattaattgcccactatgtcattataaatagtggcaagcaatctcaaaaaaggacgaaaaaactcatatgaaagagtccttaaaaaaatacttagaaatctgtaagattgactcgtggactatgcnnnnnnnnaactgcaaaaccacgtaaaaattcctgtgttcaatttttatttttctatagcttttattttttccgtgtggaattattaccgtgagactcaaatttagtgaacgaaaatctgtgttaacgtacaaatatgtatatatatataagtagatcaaaaccttaatttttaaaatcccaaatttcataaataaaatcatcagatcttcaattaatttaacaaaaggtggctctaataccacatgttaagatttataaaacactcaagaaatatataaatcacagatttaaacatattcctaaaaatgctttaatatagaaaatcctaaatcataaatctatagaacctttgctaaattaaagaagaataagatgataaaagatgagcggaagtactaacctaaagccactgttggagattgcagagaaaattttgatcttccaagaatacactattttctaaagtatcttctctgatggggaaggaaataatacataaactcatgtgtttcttggggaccactacctatttatatactcatcttagaataagttttgggtataatttagcccctcaacaaattataaattaacttatagtatttacactttatttctatgacaatttaatatcttttttatatccataacataattgcttacttaattttgtatcacactttacattagttgaaaagctttttacccactctctatcatttcaaaagtccttcgtttttttttttttggtaatgtttaaattagtagttataagcaaattaagcatataaatttatcaaataagagtacattatgtttttgagttggaaggtggtcttttttttttaacattgacttttgataggaagtgatacttataattaacgtcaccaaaaactgtttttcctcaaaaagaataactatttgttggacagtatttgtttttaattagtgtacagtatctgaacaccaacaaaatggactattcattttttcattcttattatttctctcttaacaaaatcaacgattgagatcacttcacataaatcgatataatgctctttgaatggggagatcagcaaaatatgtcagtcattctttattttattttttccattattaattgttttatttattaaaatattgtgtatggcattggcatttggcagcagtcgcagtaattttacattactatttttgctctataggttggtaaaaattgataataataaataaaataagtgaataaatgtagcgtaaagggggctattggagagtattattatgtacgcctgaagtgaaaggtcacatacataacacatatacaattctattcatgtttttaacaaggttaatgagaaattaagaaaatgcttattagaattttgtttcttaattctgaacatatattaaattatgtttttgtaaatttttttagatcttctaatttttttttttcgaactattgagattattaaaggctcatttggtacgctgtataagtgtcgtattgtattaaataataaataacactatgtttgaattaaacaatgtattatatcaattattacgaccaatttttttaatacaatgtatgttgtattataatatttacaaagaatttggggtcaacaccaatctctgacgcggacctagacccggacccgggaccctggcctaaaccccggcctaaacccagaacctggacccagaccccagacccggactcgaacccggacccggacccagacccggacttggacccgggacctcggactaggacccaaacccaggacccagacttggaccccggaccccgtaccccggacccggacccagaccccggacccaaacccggacccaaacccaaacacggaccctggactcggacccgaact

SEQ ID NO: 23630 - DNA, 1780 bp, Cannabis sativa
tactagagcggtcattacatttactttctaaaaaaattactatttcattcagatgtttttctaaaaaagtctccctttataataagttcaagggctctatttatagtgagcccttgacactttacaaccttaccagatcccaaaatcataggataccaagtcactttcacacctaataacctagtatctcaggtggtttgatttatcagacatcttaagttacactaaaattacctcttttacttgtatcttagatgaaatgaacattgtctcctatacaattatttattatgtagtcgctatcttgtctgcaatttcttgcttaaacatctcgagcctcgatatcttctccttccttctatttgtatgagtatatcaggtacatgggaaccagaggctacgggtgtttgagttaaggaggccgctcgctgctgcatggaggagctggttcgtggagcttcctttggtgcatggagctcctcttggtgcatggagaagctggtgcgtggagctccccttgggtgcattttgaaatttacacttggcgaacttctagacataacactaatgactccaaagattacacttaaaaaaatttgggggtcaataaattgtaataagaatttatgtaatttaaattttacatcttaattaaagtgcaaattataaaatacatattttattattatattaaagatacaagagtaaggaatatagattgtttgaacattattttttatattataagttattctgaattttaaaattttgtgagatgttttaaataactacaacatacacgaccataagaaaatgactaaaaaattatcatagatgccaagacagtagggatgcgatgcaccctttttaaggagtgcactgtagaagcctcctgcgatatatactactattaaattttcaactggtaatcatttcaaaaagaattttagaaaaaaaaaaatctgtagttcaccactctaaaagtgagttcaagtagactctcttatctttttcgtgaattttttagtttatttttctttataatcgtgtgtgttatagttatttagaactacttgtaaattttttgaaaaattctaaacaatttataatgttgaaaataaaattcaaatattttgtatatatttataatattttgagtatattaatttttgtatatatataattacaatacaatattatttattgaatagggtatgagtttaaaagaattaaaattatttcaaaagaccaaataagtaagagaaattaactttgagatattttcatttcaacaaaatttattatttcttagatagctatattataaaattaaataacaaatgtttacaccaaaaatacttaaaattttatatttgtagtacttaagtacataccaaattattcttttagtaacaaaagcatttaaattacaatgtttctgtactaaattatttgattaccaacaaagcaacaaagatatttaaattcttatatttacaacacttaagtaactaaattatttttggaattatttcattaataaccaaaaataaaaaattacaaaaatacaaatttacagtatttttaacattttaaggactaattttttttctttactttttttacaaaaatacgaacagttgttttatgattgttctcgaaacaacattgttgtcacattgttgctacaatatactatgtttgagcaacttgaaaataatattgttttcagaagaaaaaaaaaaaaaacagtttaaaaataatatctgtaaaaatgtaa

SEQ ID NO: 23631 - DNA, 1374 bp, Cannabis sativa
ttcagtaaactaatataattaccgaaataagagctcttccatttatatattttagccaagctctaaggaaaccattgtttcacttctagacaaactagaagctatctataattaaggcttccactcaattacattaccgagttctatagatataattatgggttagtccgacaggtaagctggtaacaaacaagttaaagaactcgtatactacaattaggttaaagcttaatcatagcaggattgaaatcaatcgatctaaaattgaatgactttgacttagaaaagatataatattataagtttaagatatcttttccattaccagtgttggtccagtctgatgtatagtcctgatcaatacattcgatacaagtttactttgctgatgtcctagaaataaattctacttatctaagtgtaaccaaatcacattattgattatcacattagtgtaaattcgattcactaataaattatggaactaaataatttcaagcatataatcatgattatttttagttgtgttaacaacactataatcatgaataactatatgtttgagatttaataaaatttatatattaaacatataatcatgaaagtaacatgtgagccaaacaacataaattgattcctaatctttcattaattagtaaataaaattatattaaaatgaattttatttagggcataaaaccccagcaaactcccacttgttctaatataaaactaaaagtgtattttaatttatcttattttcttaatatccaaatcaattgtagtgtatgaattaatttttgtaataggatatgatgtctcatattttccttagttacaaaatctatgattttgtgaaatttacatgtctatagttttacttttcttagagttttagattatttattgtcttcagtatcgaccttcttcaccattacaatcttttagttatctttcacgctcaaaatcaaatgtcgaaatattttttcagtagtatttaagatagttacactataatctctgtaattttttgaaaaagtctgaatagtttcactactacaaatatcagaatttgcgacggtcctaaaaatgagtttttttttggaaccgtcgctaaaaaaattaagtaactatttaaaaccgtcgggaaaaatttagtattctcgacggtttaaaattgtagtaaacaaaataggcgacattttttaataaaaggaaattttttaatggacctttataggcgacggttaaaaacagtcgattgcgattgtttaaaactgtcgcctataagggtccattaaaaaatcatcacctacttcttgccacatttcctacgtgcccacctactttttttctattttccacatgcccacc

SEQ ID NO: 23632 - DNA, 2994 bp, Cannabis sativa
  modified_base (1708)..(1710): a, c, t, g, unknown or other
  modified_base (1980)..(1987): a, c, t, g, unknown or other
tcatgatttagaattggccgcagttgtttttgcactgaaaattttgtttttttttaatgatacggcgaccaccgagatctacactctttcttgttcgttcacacattccctatgagtacgattattattaggacactcattttgtcatctagttgtggtggttacctgaggatttcctgaacgcatatttaggactcgaggtggacgtcgagtcctgactcttccatcgacctcagcctgcaatgcttgcatttgttcctgcatggctatgtattgtgctgtcgtaagctggataacaccttcgaagactatggctggtgtgataggcgggaagtggcccacagtggctgctatatcgatgtttccccaacgtgaccagtagtttctaggaacagattgagaggggtgacattggtctatcccacacctccaatgattctatcagttggattagttccatcacctgggagtgggacattcattgttccaacattgaaagatccagtggtgctgtttttgtttatctagttcgcagccatgttgattctcctcaaacaaaaaagagaaaagttctcaaaaacaacgcaaaatgttgttggaggaatttggacaacaccaaatagaaaataaataataaatatttaatagaaagtagcaaactcgacttaaaacagcgagtattcgagcaagactgcccagacaatagagaaagtagtaaaaataatgaacataaagatatatagtggttcagtcagatcatagtctgcttagtccactattgtaaaatatttctatcttagtcttattcatgttggatcactcatttatatacaaagcaagtgtcctcggtcatagaactgttttacaataaatattaacattaaattatgataaaacataaaagaatagatgaagaacagtttaaatccatttgaataagtgcagcaacgtatgcaacttctatggtgagagttacctgttcatattctcgcacaagctcacaggtttaagttgtgttttatcattctaaagagggctaacgggccttgtgttaaggtatttgcattctaaatgactcacatatatggacacctcatatgcattgataacataggaaatgcgagtccttattgagtcatcgagtacgccgtgtcattcggactaattcattatttaaagaagcaatctttactaggtcgcagaagaaggctacttaatcatcgcatgtatctagggatatgcgcaacctgtataatccctcttggtcctacttattttatactacgaagcgtaataatgtgactagagtctgtcatggtcacatcatcttgcgagtttagttcaagcgaggtttattctcgaggagtcctttcttgaaagctcagcaatcctctagggatgtgagtccacatgtcactcttatgggagcctggtcttgagtttctaggcaaaaattcacactataacaatagagtaaactaggtttacgaccattccatagttctacaggtgtcttgaggactggttttgatggaacaatatttaaaatatcgtttgccatctgaacagcatatccccagaaggacattgacagagttgaatagattagcatagacttaaccattccaaaagtgtgtgatttcttctctctgtaactccattttgttgtggagtgctcggggtaatatattgggattcaattccaagnnnaattaaatgatctttgaactacataattatatattctccacccctatctgtttgcaagatctttaatattttacccaaggtgacatttttcaatggaccacctttggttaaattgtgaagtctatcatagcctatgtgaccaagtcataaatgccatagatatgtttcatcattattatcaatcttttgctttttatggtttctaggtttagcaacattaaaaagttcgttcatgagcgcaattggtatatttggtcttaaaacataaannnnnnnntccatgtgagcaacacataattgaatgccattacgagaaatagttgaaatagaactcaaaaaattcaattgaaaatttttgtgtttgtaaacatgaaacactaatcaagtttccactaaaatttggaataaacaaaacattgtcttaaatcaaaaatttattctgaaacttgaggcgagcttttcttctagctttgacgaatactaattcgccattaccaaccttgaggttcaactctcctggatttaagaaatcccaagtttcaagcagctgcaatgaagagcaaacatagttagtagatccagaatcaacaatccaaacggatttgtcattctctaaaacacatgattcaaaaacaaaagtgttacttttgtttttatggtttagaagtctaggacatctttctttaaatgtctgttctatccacaatgagaacatagaagaatacgtctacttcgctattctttgattgtctctattactgattcaatttgaattctggccttcataattgagccaaaagttgcagcactgtcgaagtaattattctcaatatcttcaactttccttttgcccttttctgcagtattggagtgggacttccttgcaagtgacaatgtccttcctttcattcatacataagcacgcaattcagcgtccaacttgtctatgtcagatgagttccaattgttgatcatacaagatacaataaatttattatactcaggtgataggctattgagaataaactgaacccattgatcttttgataggacatttcccagcaaatttgctttttggaatttcaagttcatcaaaagtaagtgtgaagtgatactctgatcaagagtcatcttcgcactatggagttcgtttgcaaatgcatatactagttgagtattggggtgaggatcgttaaacaacattttgacactacaaatatcaataaacagaaaaaagtaacttggtttaaataaattcatacacatatttagaaaataacaagt

SEQ ID NO: 23633 - DNA, 3310 bp, Cannabis sativa
  modified_base (1011)..(1012): a, c, t, g, unknown or other
agtttgaataactttctagtgcctttcaaaacaattaagttattttgcttcactggtggaactaaattattatagatgtatttttacatccttctagaataattcttctacccctagagtaagcaccatctctaatattaagtattgagttggtgtagataaaagaattctaatatacaactctatcatcttacatataggtcacttttagagattctttcttaattgtctcccaatgtttcttgtttgattacatcttagatggctctcactcaatagtaggagtctagttaaatttatacacatgcgtgcatttaacctcttactattggtgcttagggacctcttgttgtgatattttatcttagtctggaacattaagttccttctagactaagtcatcaacacagcattctagtattaatgtaaaatacttgcttaagattaagtaatcattagagataccttaaagcttttcataaggactagagattttgcttaagtcattcgaatagacattgtaaaaatttcctatcttattctcataattctgataagttattagtatccatatgaatagttagatttacttccttagttttaaattaaagttcctatcttgaacataacatagtaggctatcactagtatcatccaaatcatttattggcatctattacaatagtggaaaatactggaatatatacaggatcaagaataagttctactagtttgctagttattttatgatattatatccatgtctaatcaaaatatgtgtgacatagagatactgtgatgtattgagtatagtctagagttcaaagagttgaactacatatatcaataacttcttccacccctaagtgttatagagattttgtagagtttcgaatataatctagagttcaatagatataaaagatatttgaactacatatattgtttcttaacttctcccacccctataagatcaaaagatctttttattaagcaaaatcttaataattnnttaagaaatgataattattcataaacatcgaatttaaattctaaacgtttatgtggtattatctctttgtagagattaatataccatagattttgtatcattaataaatacaaaaacacagaaaacatgataaacatataaatataatatggtattggcatacaagttaaagaaaaatgaagctcaattttataaaagtaattcataataaaaatttcttaaagagaaaattttattaatactctgaaaatgtcataatgaattgtctgcaaaatatgaaatagagagtaaaatctcatactaataattgaaactaaattgttcattaacaaagatccagttaaaatatggcagttggcttaaagacaaagatccagtgcccaattgcattagtgctcactcacaatagaaggaaaaaacgatatttgaagctgctcaaacaactgtgccacgaggaagcagactttttgagtttgatcaaactggtatagaacatgagatcggggtctcacaagtagagagctagcgggagacagatcatgggctgatcgtccaaaaacatttaactcagaccaagactgttaaggaaacggttaatttcgaaataagaggagcacagggaaaagtagtggataaacttcaaatgggctttatggaagatgggcctgggagtaatttgggcccacatgtgaataaaaaaggtgagtgtattttgactgcacctaatatgcatggacgtactgaagacaaaactattgtgtccaagcccatttcgcaactggatactgatgacccatttgggtgtgagtggtcaagagggggtcctcgtaaaggggtctgtgggattgagaatgatgatgagggcgaaggagattctaaaaaacagaagggtgggtctgggcaaattattgaagatagagcacgagaaggaaaagatggggaaattgggcatggggataaagggaaaaatattgttgatacgattcccttctcatattcgattggtaatctaggggtagaaagggtgggttttaagggaagagagaatgacaaggttcgatcaaatcatggccaaagaaagaaactctctatcaaaaatagagcacaccaggttcatggacagacttcggtggaaaaagctccccaaccaggaacgaatgtggagatgtagagtatggctaggggagggggtgacacttttatatttggaacgtctgcaggggcaaatgggactgagttgactgcagctagattaaacaatgaggtgagtatttctcaaaacatggatttctcacttcaggacactaaatttgaagctgcgagccttgctctgcaagaccgccaagcacaatgataatgctaagttggaatgtccaaggaattgggaacccttgaacattacgtgctcttcaatcccatatttgagaatataacccgagtattatctttttagcagaaagtaaattcactagagtgcaagcggaaagattgtgtttggttcttcaatttggtgcgaatttttgagttgtggacagggtgggtcttagtggtgggttgcttttgatgtggaaagaggagttaaaggttcgtgtttcttccagctcctcgggacatatcgtggttgaagtggcaggatatgattttctaccttggacattgacttatttttataggcatccgaatgctacacagaggaagttcttgtggcaattgttaaggaatataaaaggtgaggtgcatgggtcgtggctatgtattggtgattttaatgagattgttagtttagcggagaagacaggagcgaggacgagaggtactggcgctatggaggactttaaagaggtaattggtgcttattgtttgattgattttagttctgtgagattggatttcacttggtgcaatgagcatggatcaaatcaaatcatggaaagtttagataggggtctttgtaatgaaaaatggatgtgatgttttgaaggagcttacattcgtgttctcgattggtgggaatcagatcataggcctcttcttgttgatatgccaatggatgcgaattgggaacattgtgaataggttagaaagaacactcgatttcactttgaggaagcttagtgtgaggatgaagagtgtaaagacatagtggaaaattgctggaatgaagatcgggggtctggttctgcaagagggtttaggaggaaaattgttaaagtgagtagagcgttacgggaatggaacaaaaaaaaaagaaaaagacactgaatggaaagattgctacattgaaaaaatctttggctg

SEQ ID NO: 23634 - DNA, 1780 bp, Cannabis sativa
tgataactaatcagattgtatagagttttatttagggcataaaacccaacaatattgttaacttagggcacttccaataacaatatagaagaagtatctcgacaaattgccaacctaagtgttcgtcacaattgatatttcaccctaataactgttgaacatctccgagaactggtgaacaactttaccaaaactaagaaaatggctaagcgatgtcaacatcacttaggcctcaaaaaagtctaggatgtttttccacttaccgagcgtccaggttgacgccaggatgtcaacctgggcgctgggtgttgaacaactttcagtaaaatcaccataactcattcaatattcatctgaatgacaagattaaaattgtattttaaagctctttcagagctttatcaagtaaaatctcacaccaatgttacaattctaaagattttaagtccaaaatttgtactcaagacaaatataattatttctacagattgcccgaaaatgattcgacgaacaagattcaaactctaaaaattgacgattttcatcaagagtttcaccgttagatcatcatcaatggtcaagatcaggccaaagtaaatttttcatattttttgtattattttataaatattttaataagacgtcattccctataaatgagagctcctcaagctcaattaacacattcttctaagaccccataaggtcagagtatttctctctactttctcactcttaagattagacatcttgccttagccagttttcttgtaatttttatgagcaataaaatctcgaagtagcatagctccaataccgtcgcaacacaatgagtgaactactataaattgcatgtgtctctctatttattacttaaacttatttgtcctcttgccaatctagtaagcgaatgttgaccagatttttgcatcaacattttagtacttcctttgagagccacaacttgagatcccaatcaagatggttgcaactaggtcaacaagtgttgaaagaagcaccacaattggtcaacccattaggggcacgccaattgttggagctggtgatgggacaacacctgtatctcaaatgtcaggtggaggccacgaaaccaattccacaacttgtcctccaagatcaccaacaactagtggttttgaggccagtagtcaaaatccacctagagatccacacgtggagttagaagatcccaaggaggacaatcctcaggctgaaaaacttagccaagcagtggctaacctaggagagtctcttgaaaagaaacatgaacattttcaaacctagctcatggacactacaggaatgttgaaaatcaatatgtcgaacaagagcagcgaagaaaaaatcttatcaacgaatcctgcaagcctatagatttagcaatgaaacagctcatccatgagttgctttgattagagctggaaacaacccttgtgtgccaactagccacgtgagaagaagcactcaaggggaaacccttaatgcacgtggtacttctaccgttcttggtagccgtagttctcaacatgtaatagataatgagtatccctaaagggatgcaaactagagagagcgttcgaaaggacttagactcgggaacacaaaccaatgagccccccacttgctgtggaacggtcacctattagggaaacggtctacaagcaagtgtctagaaggacttagactcaaaagcgtggacctacagggccaccacctgccgctgacaagaccaactgtgtgttagaattttatgccctaa

SEQ ID NO: 23635 - DNA, 3049 bp, Cannabis sativa
tgtttatgataactgcagggaattactaaaggacttgttgcagacaaagtcctttctatgatgatcaatgaagggaagctagtagattttgtgatgtgcattggagatgacagatctgacgaggacatgttcgaaagcatatcaagcatagcttctaactcatgtctccctacagttcccgaggtattcgcctgcactgttggccaaaaaccaagcaaagctaagtactatctagacgattctgtagatgtcatggcactgattggaggcctagctgcttcaagtcttaaatcaaggtcgaatacagctattcaagtttctctagaaaatgttgtttaagaagaaagcagtggctcttgtacagcagcctttacaactacaacatggattaaaacagttttataattggcgagaattggttgcgtgattcggtgtttcatcgaaaaaggaagacagtacaaggaagtgtactacggtggttggtttgtgtcaatagtgacttacaaatacttgaatcttcgatagtgtgagtaccatatagatcagtaagtgcacatttttaactttgtagttttcagcacagggctcagattttattatagttagtgtttagagataacaagagcatcattagtttgtaaatggggtgtctgtatgtatgctctttatatgaaatacgattcttttcttcttgaaaatgacagttattcttttagtgaaaatggctcaaaactacaatttttcttacttgttagtttgaaaactacatactaaagaaggtgtaagctcaaagcatatatcagcatgcttttcgtaaaatgttattggtacattttttttttacatgatagaaattttacatagtttttcaatgattcttccaaattaatgataataatttttaatcctttcaactaccattgagtttgcaaacagtcgtttgttgatattaattggggatttaatataactatagacctttatgtatttaattaaaaaaaaaaactataaaaagtattatgacattttttttttgtcaaaataccgaattgaaaagatttgtaactgacatatctaatcaattattatatttatttataaaataattactatatttttcagcaaaaaaaaaaattacgatatttatttatagaataattataaaaataactattattattaataataatcattacataagatacaatataaaaggcaaaacactactgctcttcaaattttaaatttgcatacaaaagtgaacagaaaaatgaaattgacgttaatttttgttgtcatataccttgaggtgtatatttatgttttttcttttatgctgattataacattttgtcatactttttataaaacaaattatacagattggccaaaactctatacattatttttttgtcacactctacactatcattttttactgttatttgatgcaaaaatgacactaatactaagtagtatacacgaaagacactaatattaaggtatataaaaatgatactaattatatcgatcctaactatatatgatactaatagtacatcttttgaaaaaatattcacagtgaacaccgaaaagaaagacaatataacggtaaaatatttcagaacactttttgctaaactggattgaaaacatctcatgttgacaaaatgatgtcaacttggcactcgaccctttaaaccgagcacatgagattctgtttttgatacttctaaggcttctaaacttgaggaggggtctcatcccctgtttttgaccatgtcagattcaaaggccgcataaaatttgacatttgagcaattgaaggcagcgttccaagttgattgtcaacctatgcgttgggcccagcaccaggtcaacttggccctgggccatgtttctagggacttgggtttgtggttttctccccaagtttacttgaatcttcgttatttctaatgacgataaaaatgtccaaaacactttttgctgagctggattggaaacagcccaggttgacaaaatgccaatctaggtactgggcctgcccccaagtgtgaacctgggctctgggtcccaattttaccccttcaatttttttttttggttcatgaaaatagttgaatctcaatattttctgaagacggagatgattgctcaaaagaattcctgaaaaactccactttttgtggcccatgttggcaaattgtcaactagggcgttgtgccttgtcatttgtgcccatgaattgctgtttttcttctaaaaggatctattccctcattttttatgaagacaaattcaatgcaaaagtttgatcattgattagacacttggaaggcacccagattgacagattgtcaacctggggctgggtgctcgaggccccaagcctcgagtgctcaaaaatcaacttgctccaattctgattctgatacctcaaataagtctgtggtatgtctagttgatttttcaatgtaagtcttaaccactttgcactaagacggtcctagaaattgaaaccctagttgaggatgtcaacttgggcaccaggttaaaccctatgtgcccaagttggctttcgggttacaggtttgtgtaatttcagctctcgggtcctggattaggttgctccatgtcttcatggtacagaatactaaagatagtgagctgaatttaagttattaaaatccgaacttctattccaaagttcccgaagtcaacctgggcataaggctagggacccctcctaagttgacttgctatgactcaggatcacttaactctgagatatcatcttttttgccatgtgtcaaatattcatgtccacatcatcagcgctactcttggtgtaaacattattattattattattatcttttaaaaaattgaggttatatatataagataaacattaaaaaaaaaaataagggtgttcatcaaaccctacaaactgcccgcactgcaccgcaccgcataaaatatgcggtttgaaatcgtttgcggtacggttgcagtttgcatttttgtcaaactgcgcggtgtgatg

SEQ ID NO: 23636 - DNA, 7459 bp, Cannabis sativa
  modified_base (1709)..(1711): a, c, t, g, unknown or other
  modified_base (3709)..(3709): a, c, t, g, unknown or other
  modified_base (6183)..(6197): a, c, t, g, unknown or other
ggtatttttgacaagtgttgctcaaaatttattgtatttgtgatagtttaactatttagtgatagtctaaactacaaaaaccgcataaaatacatcgcacaatttttacagtgcggtttttgcagttttttagtttcacggtacggttgcggtttgtaaaattaaaaaaactacatgtgtatgtttgttttaaaaaatagtcaaaactgtaccaccgaccgccccacgaacacccctaattattataaaattattcttttagaacggaatttattattatttttatgattgcgagacacttaaattgcatacaatatctaaacataattattgtataaataatattatgtgttaatattattatgtgtaaatattttcacataataataattaattatctattattttttgaagaagaagaaaaatagtctcacttgatagaaacttgcgagaagatgcgattgagagaaagtttatttgcatattatgcccaatgttatgggctcaccttttcagacagcgaaatatccgtgcgacaccttgacttctctaagccaaggtcagccttcctagcatttgagtaacaatggactcattttttacgcgatcgtgtgcctcagatggttggaaggttgatcttggcttagagaagtcaaggtgtcgcacgggtgtttcgctgtctgaaaaaggtgagcccatgacagttgatattagagctaagttcatcttagtgggaggtaaacctggttggcctatcctagaggggatgtaggcgtgtgaaaggatcgagatggtctgaatgctggaataagatgttgttgagcctgttagtctcctaatgttgatcagtagacttagatggagttgagactgtgttgcttttcttcgtgggaatactggacaccctagagaggagacgatgacagttgctttgagttaagttcaaggattctagaaagacaactaccacgtgcaattataaagatgcgcaacaaaatgttaaaaactcgttggtatagtacaaggttgattggatagtccatactgtatgcttggtacactagggagagtttgcctgagtgacatcataagccgcaggaggcacttttgttgaaaaggaagcttgttggtagcggtgtggaagcattacaggagccctcaaactcttgttagtcacgacaatggtcgagagtttatgactaagatggtttaaattgggatagacatggaattcttcagttgctacatgggtgtgtcaagagggacacacatggagaccaagggggtggaggccgcaatcgtcaaaagatgatcatacttggaggaatttccatgtgacttttatttgatctatatgagaaatgtcgtgacagttgagtgggatgtgttggcttgtaaaagcgccagtaggtgtaagtcacacaaagacatcgatagaggtgtgaagttgtagaatgaatgtatcaaagaagccatcatggctaagaagaccgagtgcaagcattaagttggtgttagagtttgagtggaggccaaagggcagtgccagtgagagggctggatcattggaacttagtacattgagggagcctggaagggcgtgatgctagagcgaattagttggatggttgtgtggataacacatgcatatagaaatcaacaggggtgttgtatgagatagttgactcgagagtcacatcctgtgggannnacttttagatggcatggtgtgcataatgagttgggcggtcaggcattcacatgtgggcatgttgtcaaggatgccaatagatgaagtaggggagagaccctcatagttcacttagcagactaggtattcattacaagcatcgagatgagtatcatagagatggattatggtttagaatgtaaagtcaagaaggctcaagacacaagcagtgccggttatctagggtgaaagtctgcaggactgaagtagtaagataacatcgtggcaatgttggcctaaggcaaaagtcagcaggactaaggtactaaggcaacacaaaaatgtcgatgggtgaagagtcaaaatgactaaggcactagttcaatatcttcatcaaggtgacatttggaatagagggatcgtatgtgagtatgtcgttagcttgcgagctataccttgagaggtattcttctaagagagagaagttcttcccaagttaaagtgggggagcccactaattccatatgtttgaagaattagtgtacttgttcagttttggtgtgtgaatccagagggaaacactacaatagataggttgttcaaggtaaagacttgcatgatttttgcaagctacagatagataatatgcatgggtgtaggctgagatcaagactgagctagcttgcgccatgttatgggcgtgctttgtgtttatgggaacactagtgttgtatggaacactgtaagccgaatggttcagagagcatatgtcgatgggagatagcagattgggatgactttaagtcttaagagtaagactttgtattatcaagtttatcaaagtttagagagtcatcaagggatgaagggctggttttgggagatggacttgtgacacagttttgagagccgacacaaataggagccagagggtaaattcgtggttttaggtgattgatagatcatttatcacgtgaaagaagctttgaggagcaagtatgtagtgggtcaaaagggccttttgcatgaagtcgtgggtgtgcggtagggccggagggccaatcttgagtacttcgcgaagtgattatgtgaaagtgagcacttggtgctgcattggatgaagttggattgcaagcctcgtctagaagggatgcattaattttatccttcgataagtgtcttgctcaattgccaccaggaggatggtgcgccaaagagttggcatgtgaagtttccagggggacttgtccagagggactaagcttcagtggaagcgtgttctgtaggtgccgttgggtacgattagcttgtgaacctcacccctaggtgtgcaccatacttagtccttgtcaaatggagtatgcatttggtgggtgagctactattagaggatgtgttagcttcagagtcagtgttgcaagggctacttgattgactagaggggcattgtgatgaactcagaggagttcatgttagggtaagtattctttagagacactactccatgggtgattctaaatagcgacagtggcataagttctttaatcaagtccaagagtgggcgagggagatcatcaccaaaagggtggttctacgaagatagaggaacaagtgcataattaggattcgactgatgaccatacatctacagagcaaaaatcatatatgttcctggtagaaggctaaaagcatagaatgctctttaaggggggagttcatggtgtcagctctccaccaccctttggcatcttggtgctgagtgagctactactagtcaatgggactagtagggcgggcatatgaggaccacgagaggactcatatgtctcagtgagttggaatactcatggacactattgagccgacctaatagtgcatctaagaattttgccataggttagcgcgtataattccaatggcttgccagtatgtcgcttccacgggatgtggcctaaatctctaagagacattatggtgtgccttgatcatgagtttcaacacgagatgacacgggtagtnattcgtgggctagtttgcatgcaccatgctagaaagagacagaggtctaacgtatgctactagtttggtggcttgtctcgagggcctgccaacatgcatggaggcatggtgccttgaggattggaccatggacgtatgagagtccttggacgatgagggagacggtttggacagtattgaatgggcatgattagaagcgttggcacgtcagcttagtgttggcatcttaccacacatgctaccttggtcacgagtgactaggtgagcgtcggtgttgagattttccttatcatagtgagaacctatgaacagtgcgagtatcttggctagagagcctcgatgcatggatgtaattatggatacttacgagcatgactcggtgggagttgttcgagagacagaagtatgcacgaggcacacggttacgcaagaaatgagcccattattactcggattgttggaaggctgaccttggcttagagaagttaaggtaccgcacaggtgttctgttgcctgaaaaggtgagcccgtgacacccaacataattaaagtaagataaaaaaaaagttagcacttaccgcgcatatattaattatatacgataaccaagtacatctcacctacgtttatacataaagattgtatctttatgtacatgctgtccgaaagacaagtaaacgataactcattaagaacctgtaggttctatgttgtcgatacatgaatatccagttacacgaccaggataatcacaagcattctaccttataagatagtttcgatgttatatttggtccaaagaccatatacgcaaacaaacatcatagattctgcgagtatgtttgtttggaagatgaatggctaatatgtaatttttcaagtcgaatacgtttaggtaattaatcaagaatagttgaaactgctctttcatttattgaatgtaactaagcattcaataaagggactcctttcttacttgaatgtaattaatgtaataatatttctatctaaccagttatgtaatccaaagggaccccttctttccatataaaggggtgatctaaactgaataaagggaccaaaaatactctttcaaaagtggactaagttgtaatgccctaatctatagggacctcacgcgtgtgtggttttagaaattagtatagtaatagtaggttaattatttatttaaacgttataataatattaaaattttcactaaaataaaatcctagtaatgaacaaattaacattgctaaaaatgttctgcgaatctattgttacaaaagttttaaaaaatgactatataccataataagtcaaaatgcacaatagatacagcctaaatcgactcctgacaacccgactatacaagctggataagtcaatatgcacattttcttaagaagaccatcgtctcatggttgctctaattgtttcttgccattacttgcaccaccaaatactcgtgagtcacaaagactcaacaagaaaagtaacaaaaaagtacataaaataattgaatatctaaattaggatcatatataaattaaacaatgatactctaatagatataaaataaaacaagccacatttatttattcataaagtaaccatttttattattgcctaataagagaactctgatgccctaaaccgtcatccatatatcacatttcttaataaggtgaatcgatgcatgcccttagcatccatataactctaccattgcctataaatcactagggtacccatacctcaaacatcgagaaaatagggaaaatggagttctaaatatcaccaaaaatgggaagccgtttagaaaaaaaatgattaaccatttttggggtttcgtggtaggaaaaatgattaactgtttttccaaaatggtagaccattttctgcatgaaacgagaaccccaagttttacacatcttgaaactctatcaaaacctatccaatgcattcagaacttcacataacacatatagaacatccatacaataattgcaacgtaacagaaataaaaaaacaagtcttaacatgaaaaacatcattaaagatcaagctttgagcttaaaactcaaacttgattcattttcaccttacagccagcaaacctatcaaataagcatcataaacaatcctaaaacatctttaaaataaaatccaaggctcaagaaacccccaacaataacagaacaaaatttaaccccttaaaaccaatagctcttcatgacatgaaacttcaaaaaaaattgagctaaaaccttagctcaagctttccccttcaattgtctatacactcagctactactagagctagttttgggtagaaaaacaaagaaaaatagtggtggtggtggtggtagttgtttggcttgcacgagaataagagaaaaaaagggttaggcttaggtttttctaaagtgtaacatacgcatataatcaatttattaataataataataatnnnnnnnnnnnnnnnaataataataataataatttagttaataaaagttattttgttattcttagccactaagaaatctctaatcttaggatattaggtcaaccctaagtacctttaaataccaccagcaattataatactaacataccataacactcctattacaaccactaacttaaccccttgtgatatttttggcttccaatcgagtctctaaggtcgttaaacctaaaaatatttttattctacaaacaagtcacattatattcacatattttaaaaaaaaaatcttcataattaataaattacgcttacttatccacttatgaaaaaaattcataatttatgctgaaaatatattagtaggatcataatttaactcattactacatgattaactgataatgtataataaatcctaattatttacaattaggtttttcaggatattacaccaatcccctccttacagaaattttgtcctcaaaatttacctgaataacttgggatattgcttccgcatttgcgactctaactcccaagtcgcttcctcaatcttgtggttcctccacaacactttaactagtacaattgtttattttcgaagtattttctcctttcgatctaaaacctagacaagttgttgttcataggataagtctgtttgaaggtcaatgtcatcataactcaaaatgtgtgtcggatctgacacgtactttctcaacatagagatatgaaacacaatatgcaccccaaacaatgcaagaggtaaagctaaccgataggctacgttgcccactcactccagtatctcaaaaggaccaataaatctagggttcaacatttctttctttcgaaatctacgtatccctttcataggcgatactcgaagagatacaaaatctactacttggaactcgatatctctacgtttcagattagcttagattttctatctactttgtgaagcaagcatataagatcctttttaatggattcactgaccaattcgggtctaaggtatcgtctttcaccggttgacatttttactgtataacattatttaaagtgtcataccaatggtactctaataactgttattaatcagtcactattaaagtgtattgatggagatgaatgtgattatattctttgagaagtgcatagtggtatatgaggtaattgtgaggttatttttagtattaaatttagattaagtttagtatgttggattaaaatcctcaatatgggctcatatgtatattagtgtattgcta

SEQ ID NO: 23637 - DNA, 2551 bp, Cannabis sativa
  modified_base (2256)..(2256): a, c, t, g, unknown or other
gcttgaaccttcgccttgggacagattgtcagcaaaggatgttgagttttggttacggcacctttttaagaattgcctcaaggtaggtgagtcattgtgtcttttaggtgaattagcaggtggtgtgttttccttgccttttgatgaaaaattacgtgagtgggctgctactggtgctgtggaataaacggtcggtttagtgtttgaaaaggtgttgatagcagtagacaaagttggggtagaggcagtagaaagtgtgtgtggtgaaagtgagaaagttgttggtgggtatgtagcaaatggcataaaaggtctggaaacatttcccacatcaggagtataaatgtgagagagattaatggctttaagggagttgttgctattggtgggtagtggggtactggtggtgtttgtagtgtacatagttgtaatatttggtggctgatggtgtatggttggatgggtttacagtagtatgggttacaggaggcattgcagtagtatgagtgtgaaaggattgatgaataggagcaagaggcgtagaggattcaccatgtaacaaaacaccaggctgaggttgtgcaagatttttcagtcggggaagtgtagacgtaatcgatgatcgtgccaagcgggttaagagaggccacgcatttcctttagaaaaatcagtacgatatttgtcatagcccgttgatggaagtttggcacccttcatccaaggtccaaaaggtaaatcgtcatcatttcccgaattcattctttccataaaagcagtacacttctcaaagggatgtccaagtaacccacattcgaagcaaaattccgggagacgctcatatctaaagtcgacccaaaactcatctcttactttcggtaaactgatcatgcgccctcttggaagtggcttgttaacatgaattttgacccttatgcggagaaaaggaccccacccttcgtccaaagagtcttcgtgaacatctatgaattcaccaatgagatttcccaaagctgcagccaaaggtttagacttgcttaagaaaggcaatcggtaaatttgcacccagaatggtacaaaattaaaatctttcttagagatattctgcagagcaattgtgcatcacaataaggtgattttggaaatgccaaggctccttattaaggactctgattttatctcctgcacaatggaatacaaccttgaacatatcctctccataatctgatatttccacatgaaaacgacccttccagtggccttgcatttgatctatgaaagtgggtttatgcacataattctctgaaataacagtagccaacagaatgtggcatgttgattgtggtaatggtggtgcaacatcctcagagaaagcaaacaaagaactttcttcctctgtaagtgaaagggtggaatgtattgagtgtgaaagagagtccatcacagataatgaacaacgatggagcaagaaaaaaagaaaaaagaagagaagggaagagaagattactggagaagaacccagaaaagcagttggtggaggcgtgtatacagggagggagattgggaatttgaaatgtggtagttagaaacaaaagttagttaaaatgcatataactgcaacagacccaaaaaaaaacgggcacttacaatattttttatgtttttatgtttaagagaataaaagttaaagaatcaataagttttcttagttaaaattaatcaacaaaaaattatcaaaggtacatcttgcttcttggaacaaaatttaccttccaaaggaaggtagaatttgtttcgaagacagttttaaatagaatagagccattttagcaaattcattatttcagaaaaacaaaatctcatttgggtgaagtgtgttcataacttataggtaataacaagtaagacttttacgagtaccaactcaaggctgattcgagttggtattgcgcaagctctgtaatattcggagtttcaacttagaagatattgtacttaggggtgcataaaatatgggtcaaaccattcaacccgaccaacccaatttattttttatagtaaagagttatgttaagagtaggtcatggctcattgggttgaaaagtgataggtcatataattatgggttggttatgtgtttgacacattttaactctatgtaacccaaacaaactcatttttgaaagatgttccaaatttaagacaacttttatacataaaatatattttatattcacaaaatatatacaaatatacantttacgttttcataaataaaaaaattatattgtgataaccttagaacgtgaattaaccaaaacacatcactaacatgtagtgtatagttatcctactacttctaccaacaagcctaatgtgagaatcaatcactattattaattttgctactcatacaataataccactactatcttaatttttttaaaagtactatattacacacacacacatacacatatgtatcgcttttatgtgtatgcactaggttgaataattttatcctgtttgtaacataaatattaaagtttaaaa

SEQ ID NO: 23638 - DNA, 6374 bp, Cannabis sativa
tgtctcgcattatacattggcaatgaaacaacgagataaacaatgtatggcaagatgataaagatagaagtcatcttgggtataacaaactaaagctatataattggaaagggtagataattagttttttaagagcttgcaacttttgtctcagaatctcaaaagattaatccaagagttattgtgaaaggctatagcaaggacaaacatcttaactagtatctcgcaaacacgaccaactatccctgaacaccatcaaataatgcaagccatagctggagtgtgtcatctcagtaaaggcaaattgcttccaataagaacaaaaagcagttatcaacagttactttattttatccacatttaagtatgaaatgtggggattgtccatattttatgaataattacttagataagatcaaaggagaataagtgttattcattgaacccctataaattggacgtaacttaagggaaaagggatctatcattgaaaaaagaccatgtgtgattgagtgaagtttcatagttattcctctgtattctaagtataatttcaagaaataatcagagataataatgactcgtggagtatgtagattttaactacaaacccacataaaaatgatcaagtattccataaatatatttattaattataagtgttaattctttatttacaaggcttcatttattattaacaaaaatctgagttaatagtttggtactttcattgagagcctttgtaaaaaaaaaaaaaaactcaaaatacatctcccatttgtttcattacatcatggaaaatactcagcatgacgagtcagtcatggaagaagagacaacacgtcaaccagggaaagagtcaggggtaaaaactcagaccaaccaaggaaggggtcctactgagaggaacactgaaggaagtgactctgaggaagaaattcttgagagaagggagtcagatgcatatgaccccacaagatacgtccccattgtggacttagaaaatcaaaaactctgttgaaggctcgtagaatccaactgaaggaatgaggagttggaacgggctatggttgtagccagagcaactctaaattaaacatcgcgagtcaaggaagagtaacatgtacgatgaccttgaggaaggccctgtggttcacaaattagaagggcataaggacccaacatcaaagaacaagatccaaataatcccactcaccccaggagcaacaactacgggaaacaagggacattcctgttgatggacgatgtccccaaaatcagagtgccacaacttcacagaaaacatgagtaagaggaaaacagacatctcaaagaaataatgaaaattcgaacgatcaactgcctaactagtctggtcatcctccacgtccaccacaaggatgtaggagataagaaagggatagtacatatacatacttgaatataggtaaattcgctaacttatttgaaaggtgaggacctgcttaagactcaccacaagaatcataggctaatacaactcaaagtagattaaggagtcaagggcaaactcgatccttgaggtcacatacatgggataacccactgtgtagggagagaacacctcggtatgaatatcgaggcaagaaagaaagtataagtaactttcaaaaatactaattagaaagtatcttcccaagttgaccattgagcagtttcgatcgactccaaaacatgtgtgatcaacccaatttgtgagaccatataaattgaaggcgccctaatcaacacgagcggataaacaaaaatgcaccagatctcagagagatattgaatagaaattctcaccgagaaaatgagaaaattactcaacatgtcgataactccatctagaaatggataattcagttggaggatcgatttaagaaatatcaggatagagaatataggaagcttctagggtatgattcagacgatgacccagaacctttccacctagataatttgaactcgaagtttccaaaaggatttgagaaatctcatgttgcgtaatatgacagagccacaaacctggttgcacatttgaatacctttaataccatattttgagcaattaatgtttttaataacttatgttgcataatgttccctacattcctgacaaaggcaataggtttgataagtttacaaatcattccatcacctcgtggaaacaattgtctaaagaattcaaacagtaatttcaagctatgaggcacagaagaccagaggtatcttccttgaaaaatatcaagcagtagcctaagaaatccttaaaggtatttttgattcgctttagcatgacaccagtaaaggtgaaaaacttaaatgacgatattcagttaacaacactcgagactgggataattactgacttgtctactgcaggaagtaagttgtggaatgatttacaagggcacctagtcaaatcaataaatgaatttaattatagggcactcatctatgttaggaaggacgaggcttggtctgaattaaaattattaaaagatggctcggaaaattaacccagctcaagcaatgtagcaacaaatgttgcaaacacgagcaaaaaccacaaaccacatgggaaaggaaagatgagtccaagaattcatccaaagacaaaaagaaatagaaaaaaatatgagaagtacatcctaatttataccgtgtatatggagctgaacaaaatatgggaaaatatattccttacgaatgagaatagggttgtattttacaaaccagaacctataaggaatgcgaggaataaacgagatttgcatctttcataaggacattggtcacatgactgaagagtgttgacaactcaaagacgagattgaaagtcttatttctagatgttacttttgacaatacgtgaagaataaagggaatgtatagaatcaaccccaaaacaagaatcaaaatcaaaatgtccaacaaccacctacagagggtgagaacatcttggttatatctggaggaccccatctctcgcgaacaagtaacactacatagaagagatacataaatcaagtagaaaaataatcgttagtttttgcacctatatgaaaaaacgagctaagactgatgaatcccctataaatttcactgacgatgatgatgtgatgcacgtaaggtatttcctcatacagatccactagtgataaccattccgctcacaaataagagagtaaaacgagttttgattaataatgagagtttagtgaatattttgtaggaagaaaccctaaagaaaatggggttggaaggataactctaaaaccatgcatggtaattaatttatgtgaattcacaggagatagcgtcgtgagtttgggaatagttgagctccccctcacaatgggagacttgcctttatcaataactctaatgcaagagttcttggtggttgaccttctctcggtctataagttgattatgggtcacacaacactggctaggatgggggcaattagctcaataaaatattgtcattaaaattcctaactcagaatagggtagaaactgtaaagggagaccaactttcagcacgagaatgctacaacattgagttgagagaaatagcctagtctcgttaaattaatgatggttgtgataactaaagcaattgagaaaagggaggaggatctgaacctgagaattcataaggttatgtttgggttaataatattgaacattgaagacttatttgtttaatgaacctaagagaataatatatttcatataaaattagcatatggcacttccctgatctctacacttttttaataataattatagacgattaaaggttggtaacttgttttgtttgggtagctagtattcaaagtcgatcattagtaattgataaaatattttagattcttgattgttattttatttttcttccaaaattttctctattcataaataacatagtagaaaaattttactttttagcatgctttttatttcatatattttcctttcagtttttctttttcctattgctagaaataacaaatgtttttcatataagtcatttttgtaaagtagaaaatgcctctgtgaatttcgaacacggagtacagaattgatatactttcatgaccaagttttttgggtctttattttacaaaactaaattttataatattgtctaaaccaattttttgtaatggaaactggaaagtatgactattctttaatgttttgacttagggaaattgagatcttttaagactcatatatcctcgtatgcttttgttcttgtgttccacgaaggaaatatttctaccttaattgaacaagtaactttctgacaagacaatattattaataaagtcatgggttatttaatcttttttaggtaaaatataatgatggggttactagtaaactttcaaaggatggagctacttcaacaaatgaagatgaaattttctcatctgctttaagttcagaaaagtttttctgtttacaacaatatatttggttcaactcgcaaggcagccaagaaacaaaaaatgcagaaaataaaataagaaatgaagtcaagtatggatgaacaattaagtaaaataacaacacattatgaagccaaatcatgtgatgctttgcaagtgaaatgggaggcaatgcaactaatgtttgaaaaatttatgagagaaatgaatggttctcgatcgcaatcacacaatgactcaccaaattctttatttgaggaggatgtttacagaagacttggtctatacttaatgggttagtcttcgtacttgatgatttttttttgtttatattattctataactttccttattttctttctctttacaaagattaacttaattagtatcttgcttctcttatatatcttgaacgtgactcatatctattttacttgcttttacttaaatttttgcttattttattacctaagctatcataagttgtttgtaaatttaaaattagataaatttagtatgagttgttagggacaagcaatggtgactcatatctatttttcttgctttgatttgaatttttgcttattttattacctaagctatcataagttgtttataaatttaaaattggataaatttggtatgagttgtttagggacaagcaatggtgatgttacatgatgcacagatgggattggaacaacaagcattgtaggatggagcttggagaaaaatattatgttttgataatttggttatttagtttgatttgatattacttagattttggattgaatttcaggagatcattaaagggtcaaattgatgaatgaaccattttaatcgagttgaatttgtttgccttgtttttatgtgacttaattttgagaaaaatattgtaatatatttaaacaaaattactaatgtcatcgttatttaatatctaccttaaaaaatatctacatagtttatttttagattaataatgagttacaactaaaagaatattagtgactataaaaaattgtggaacaacaagcattagtgataaatttttattgtgattaaagaaattttagtcacaattttttgttgtgactgaaaaagtattagtcacaattttttattgtgactaatgaaatattagtcacaattttttgttatgactacagaaatatttgccacaattttttgttgtgaccaaagaaatattagccacaatttttttgtggctaaatatatttagtttgtggctaaaaagaatattagcgataacaaaagctgtcactaaataaatattaatgacaataaatgttgccatggtaaataatttgtgactgaagggtggttgtgactaattgttgtgacatttagtcacaagaattagttgtgagtaaaagtttttagtcacaacattatttttattgtaactaaaactttgagccacagactttttagccacaatgccgtcacaagaaaaaattatgactaatgcttttggtcacgatatttttcacttttaaccacaacttttgttgtgactaaaagtcaagttttttgtagtgatcacaaaggaaaagagaaaaaaaaagttgaaagtattaagttgcaaaataaatttcatgaaaaaaaaaaataatgtagtagtacaaaaagataaatcaagttgtcaaaattaagtaaaaacaactgtaataaaaaacatattgagaagttgatattattttatatattgcaattaggtcattgttttgttatttttcgttactttgtagttatctttttgttattttatagttattttcatgatgtttgttaagttgttttttagtggctattttttattttttattttactgaaactcaatattttttgtaattttagaa

SEQ ID NO: 23639 - DNA, 2839 bp, Cannabis sativa
ttgataaatatattgatttgatttggtataatataataaaatttagatttttgtttgattatttgtcgacatataaacatacagaccttggaaatgttgtattaaatttaaacgtgtttcagtgtttgatagaatgaaaataaaaacttgtaagatgataagcataaaccaaatatataattttttttttctaaagtatatataatatatatatatatatatatttatgtatttaggaagaagaagaacgggttttcccagctgtcacaagtcttaaccgcttttaccaatggccgttgttccattaattatgaaccatgggaaaaatggttcagtgatagtaacaccattttaatgcattaatattacacatggttcagtgatgtgtttggagatttgtgttcagctctgggagtacatgcatatgcttgtaaagcttcaatttgaaactcaaatgagagaatttgagcttctttacaattaggtacatatgccacaaccacaagtgaaggaatagcaaatggtgcccaaacaagtgagagtgatttgtcttctccaagagtttttgtagttactgatatgggatttttgagcatgaaagaagcttgtttctctgcataatagtcatataagccactagcacgggcctctaagaatattagtgaaccagcagggtttgaaagtgttaggaagttatacaaggccccaaaactcttcaatccaaatagctcagaaactgcagcaagcaacattgcccagtgggaaccatacccaagtcctatcaaaacagtcacaacatagatttgccctggccatcccatagcatagtagaaaaacccaaatgccataatgacttggagtacagctttagccaatggtcttggataggcaaaatctctggtaaaaataagtaacaaaaacatgtgaatttagcagcagaaaaaatatatcaaagttcttgagtctaaagatgatgtcaaattcagtttcacatgattatgttttttctgattggttccgtttcttttacagttaaaaattaatatttttacccctttcgactttgaccaatacaaaattttgcctatttttattaaaaaaaattaattttgaaaattataatattatatcttttataaagcaattataatattctattcattcaataaaaattagataaaaatattaaattaattaaaaaaatattaattttactcaaaaaaaagaaaatattttcaaactttattttatttatcaacacgtatcttaaaaaatcaaatcaaaagtattgagaatctaataaataatttaactaaactaagatttttttaaaaaaaaaatcaaacttatttatatttataaactcataccttaacaaataaaaaaaataattaaaaattcaataaaaatataaaaaaattttaaaaaaaagttataaattaatcttaaaaaatattatgtttacttaaataaatttacatttttttttataaaaacaaaatatatttaagtttgttcttgtaaaatttagtttttaatatatttttacaaattaaatttttaatatcaaaataattattttactctcatggcatttgctattctatcttttcactctaaaattgtgctcaaccttttttcctagttctacataactcaacttttgtatgacaattgacaaatatcatcaatcatttattatttttttttttttaaaaaaaaaaagaaaaaaactatagttggtcagaggaaaacgtcgacagcagggttcgaacctgcgcgggcgaagcccaacagatttcaagtctgtctccttaaccactcggacatatcgacattttgatagggttgataatcatattatacttaatctaaacaaaaatatgcattttttattttttattttataaaatagaacgattttgaattaaatcaaatatgagagagaagagtgtacaccactgaaatgatgtgacatatcacaatacattttatcttttataggtttttttagtaagacttatctgaaaacaatttgtgctttgatatgataaaaactgaaatagagaataaattataggaggagatttataataagaacctacttttttgatactcacatgtacttatcaattatcatccacacctttcaatttgattattataacgccaacattagtattcttgtatccatcaaaaaataaataaataaaaactaaaagtattcttgtataattttaaaaagaaaatcttaaagaattttattgcaatgaaaatcttatgtattattactattttattttaggataattaatatttttgttgtttaattatgtaccttttaagatataaggtttgtaaataatttctctcaaaaatttttatattaacgttattcttttgtgataaaaattagttgttaaatagattgaaattaaatacttctttactatttttatgttaatgaacaatagaataaaatattttaaaaaaaatatatataaaaagtatcgtaattctatcccttcgttattcttgtacctatttaattcacagcactacttttttcacaataaaattaaatagaatataatgaaaggactatattattgtaaaagataaattgcgacataaatacttaatattttaaattctatacacttaaataccttatttttatttttggaggtaaaaatacccaatgttacaattatcttacacggttactaccacttccgtaaactcataaatatggacacgtggagggtccaaatgcattatatttatttattttattttaaaatttaatattcttaatatcaaaaactaaatactactt

SEQ ID NO: 23640 - DNA, 3055 bp, Cannabis sativa
gattgatctatattttgttaaggacaaagttttgcatcagctcatccaagtcaagcgtgtctcagtatatgggtcaacttattgacagccttacaaaaccaacctctatcactagaattgcaaaattaagaaccaaactcaaaattgtctctaggctaggcccgtgcttaaagtccactcattttagaggtccaaataaaaaaatacctcttagaaaatatgcatatttttttaataatttttaataatactatttatttttatagtaaagactcaatttattttttatttatgacctatttttactcagaaccggccataaatatcatataggtattaaggctttcataatttcatgtgaagtatcaaaaaatatattattaattttatttgcttaacactatattattacatggcctacacacatgggttagcaggcagtagaaaagtaattttgaaagggtccatcgacatcgcggccctttgggataatataatatgctacaaataaaggtatatatgcatcttcctaaaatattgatcgtgttttatggaacagataaatccttattcccaaaaggttttatgattaatttcttgatccacataaacagttttttttttttttcttttactaaaaataaacttttttatgtttctaccatttcctttttcctaaactatacagacaacatacacaaaatagacagaaaaaaatagacaggtgctgtattagcatccacgtccacgtccacgtccacgtccacgtccatcaatccccctacccaaaaataccacctaaaaattctaataaattgagaaattaataaatatatgtatgaaagcactatgcaaactaaagactgagataggagaatagcatagagagagagagagagtgatagctatcacacacctttgaacagacagaaagcaaagccaagctgttatttttttattttaattatttttcgttttgatattaaattttcataaagctatacccagagaatcttggaacaaatctttcacagttcagacacagcaaaagatacacatgggtcactaccttacattattattatttttgtcaattatttttaaagaaacaacaacaacaacaagattataattattatctttagtataatttaagtgattttataatttgggtcttatcatacaaaacccaaaacgcatttccactgcaaccatccaaaactcaagaatatatatcaataaatatatatatatatatatattttctcccttccctttctttcattcaagttatatattttctcttttgttacatgggaagctctcacgagcgagtgaaagaggccgtagtggtcaccccatccgaggcgaccccaacttgcgttcttccactctcagccattgactcccaacccttcctccgattcaccatcgagtatctcttaatctacaaacccagcaccagactgggcctcgaacacgatgggtccactttggcttgtcttcttaagtccgccctatctaaggccttggtcccttactaccctcttgccggaagagtacgaaccaggcccgacggttcgggccagctcgaggtcgtttgtcgggaacaaggtgcagtcttcatcgaggccgtatctgaccgtacaatctccgatttcacaaacaaggccccaagacacgtgacccagtggaagaaactcctctctgtccacgtgtcggacgtcctcaagggggccccaccacttgtggtccagctcacattactcaaggacggtggagccgctctcggcgtcggcttcaaccactgcctaatcgacggaatcggtagcgccgagtttctaaacttgttcgctgagttagccaacagacgagtcaaatccagacccgaacctgtttgggaacgcaacttacttgatccgaaacctgggaaaggaattcctagtagtacaagtagcttcgttactctccctgagttcaactctgttcccgacatttccggattcgtaacaagattctccagtgaacgactcactcccaccactgtgacctttgaccgtacatctcttgtggagttgaagaatattgcacagtccacgaggcttacttactcaacaacattcacttcgtttgaggttctctcggcccacgtatggaggagttgggctcgggctttaaacttgccaccgaaccaaaccttgaagctccttttcagtattaacgttaggggccgagtcaggcccaatttgccatctgggtactatgggaacgctttcgtattgggctgcgcccagaccaatgcgaaggaccttgaggagatgggcctgtggtacgcggctgggttggtgaaagcggctaaggatagagtcggagacgagcacgtgagagcggtgattgaatcggtgagtgagtcgagggcgtgtcctgactcggttggggttctgatcgtgtcgcagtggtcaaggttgggtttggaaaaggttgactttgggcttggaaagccggcccacgtagggcccatttgctgcgataggtactgcttgttcctacccgtacctaatcagagggaggcagtgaaggtgatggtagcagtccctgcaagtgctgttgacaagtatgactacctcataaggaaccattacacgtgaggttcacccaacgtgattatagctcaccccgttgactttttctattattgacttcctttttttttaaatcttttgagaaaaaaaaatgagaaagatagtgagagagataataataacaattcttttttattattagttttttttttttatatatatatacacttaatttaataatgctgaaaatgaactaactaaaaatcctaaaaactaataatcttaagtctctatctcatgatgaatttaagtttttgagtatgtttaaattttttatgagtaaaatttggtgttacactaattcccccaaggtaaaaggattcattggaaagattggaataaattttgcttacagaaaagcaaaggggggtttaagttggctatattaggaaaacaaggtaggagacttttga

SEQ ID NO: 23641 - DNA, 1544 bp, Cannabis sativa
  modified_base (28)..(30): a, c, t, g, unknown or other
acgtggcttggcacgtaacaatcacctnnnatatatatatatatataatcattcttattcttttgttattggtattcgttgaagaaccaaataatgtatagtttaagaaaaatgatgatataacctggggttgactgcattgacttgaatatatattaatccaattagttatatatgtcattcaagcaattaattaagatataatataagtatacacaacctagctaataactatttttaaaatcctaaactgaatttatattatatatagagcatattatcaataataggcaccaataatacttaatattattatttatttttttagaaaaaaaccccaaaagtaaaagctctaaaataaaaagaaaagatctcgttaaagatttatcacatttatcacatcaaccataaaatagtgatgaatataatttgaatgatctggctaccaaattttacaagtaattataaacaaaacatacttaataaggttatagggaataatattaattgtcttaaaacaataaagaagactcatcacattatagaagaaaattatactataatgaatgtcacgaaataaaattaatcttagtaacgagtccaatgttactttgttgttgattttattaaccacattcatgtaattaaataaaacatgtcaaattatcaaaaaaaaaataccaataatgtatatagcatatcatgagatatcatatagttacaatttaataattatgttaaaaatactaattatttataaagtaacatttaatagtaatagttgattgggtttttttttttttttttcaagctgaagttgttaaagtttttgctcttcgtcatgctggcatctaatgtcgtcttttgagtttggataatattcaattttaatgtaattacttgaatgtggttaataaaatcaacaataaagtaacattcgacttgttgctaagattaattttattttgtgacattcattatagtatagtttttttttttataatatacatattcatatatggatatggtagtaaatgaaaaaatatcaatggaatttttttctttgaactacatggatttttttcattattattattacataattattattacttccaaatgtaaaattagtttattattttcttgaaagaactctttcttaatttattcttcttcttacttacattatcttttaaaataaaatacatatgtttatgtaaaccagatttatttatttatatgtatacacataacattcatatattatttgacttagtatatatatgcatatgtcaccactctaatgtctaaaaaataaataagatccaataaatataagtaactaatattagtttattttattttacaattttcttggatcatatatatggctcaaattgataattatacagtagctagtaacatttctctaatattctaatgctataattccctacttaattagtatctcttatattttaattagaaaatattatatagtttactttccacctcctacctaacactttttttaattaccatag

SEQ ID NO: 23642 - DNA, 2053 bp, Cannabis sativa
  modified_base (1813)..(1821): a, c, t, g, unknown or other
aaaccgcataaaccgcaccgcaccgcactattttttgcggtacagtttttagtttcgcggtgcgagtgcggtttggaaaattaaaaaaacgatatatgcgggttggtttgaaaaaatagtcaaaaactgcaccacccgcaccgcgaacacccctacttacaattttccctttgaaaaattatggtcaatgaataaattatagtacatgaaagataactaaaaaaaattgaaccaacaaaaaacaacatacactgagaatgaccatagtatgaccatatagccaaccagagacacacacataatttgacacacacaaagatatggtttctacattctcccccttggaaaattatgattaatgcaaccaacaacataaaagagcatgactaataactaatgaaaaaccaacaaaaaccaaagatgctaagttgtcacataatagtcaccaataaaccaatatctcccgctcattgagcataatgaaacactcccatcatggaaactctcctgggcagagggctttgcaggtggaaaaaaaatagaacaacatcaagatgctctccctggatttgaccagacctgtgaacactcaaatgggaaaactctccttggacaccaacaaagggaactaaagaaggagcagatggaagttaacctgacaaatctctatacgttattcatgcccaaagagcaaggaaaaaaaagtgacacattgggagacacactaaagatctatgcttgttaaaaaaatgaaacaacagatttagaaatattaaagccacaaaataaggaattcccccaaagtgaccatccactcttggggctttgtccaaggggagcttaaagaaagctttttgaaattctgtctctgagaaaacttcactaagcatggctttgttactattgctcacccttgagtcaatgccttccagggcaatgctgatgttaagaggtgaagagattttcaaaataattgttatctctgaaaggatctcatcatcagcggtgagtggccttaggctatttcaagcacctttacactattaagagatttcctgtgcgaggcaaatttatggaaacaatttgtgtggcagtctccatgattaagccagtggacacaggagcactatttccaaaagatttcttcttgatgaagcaagtcatcaagttgattgtggagtctattaatgtgatgaatacgatcagggctccaatgcctattggattgaatggagtccaaatccctcgtgtgtctgtcgatgcgacttttgaattgaaaagtggatttggggttccaattttagaggtgattagccaaattgccttgcaaatccacgaggtgagtgatgggattggagatgttggtaaaaggtttccagttctcatttatttggttgtcccaattaggattttggagccaaacgttttcaaacaaaaaccttttaataattttcatttcttttgtttggttgcatcagggccggtcctgaaatttagtgtgccaaagggaaaaaaaaatatttttgggccctcatttagaaaaaaaagtgatattttttaaaattgataaaaaaaatgtgtaattttaaaagttgacaaattttttttaggcccctgagctaggttgaccctaggcacaggcctagcccgcctatgctcagggccatccctgggttacatattaaagtattgaaatatcattctaatagaatgatctttccattattttggtggaatgactattctattttgcaataaaaagaaagaccattacaatacaaaaaaaaattaataattttttatcaattttttnnnnnnnnnttaaattttattccatttcatttttatttccatttatattcttatattttcattcctcccaaccaaacgtcactttagtattttgcattgtgaaaatgctaaggaaaagtttctctcatataatcgatatcttttccattactatgctgtgtgtcacgggctcaccttttcaggcagcggaacacccgtgcggcaccttgacttctctaagccaaggtcagccttccaacca

SEQ ID NO: 23643 - DNA, 2273 bp, Cannabis sativa
aaaataatatttacccaacaataaatctacaaaaaaaattatttttaatatctttatttagtagggatgcatattttcttcattgtcatggtcccaatggggacctgtctttaaccgaacgaggattttctatctaaatggagaatgtggtagggatgaagttttttttttgtcgccaaatgttagtagaggcatgatagcactctccacaccaacaagacttgtttaatatttttttaactaatcaacaggtcgcgcttcgcgtaaggttatttataatttttttaaattatatatatgaataatatttgaataatagaatcatatcaaataattattgagttttaaataaaatactattcaatgtaattttatttatctatcaataaaagattaaatatcattttgactattgtctattgaatagttcacatgtttatttcatgattaattgtttaatatataaattatgataaatctcgaatatataaatattcacaattatagtgttgtcactatagtagaaaataattgtaattatataattcaaactatttaagtctcatgatctcagtgcactgaatttacactgacgtgataattaacgataatgtttacttacacttggataagtgaaatatcttttccaatgtattagcaagaatcagaagtataggatttatatcataatggactgatattgataatggaaaagatatcaaaaacttatcattatatctttccagattcaatatcaattagttaatcatatatcaattgatctaaaacctgagatgatgaaggtaattgcactataagagttctttgatttgttcgttaccaacttacacattggtctagctcatacttacatattgggaacttagtagttgaattgattgggagtattaatcatagatatgtaaatctatagctttcatgattatttagaagtgaaatgataatttcttttgagcttggctaaacgagattaaatggtggagtacacattttagtaatgttatccacgttttcgaaacggaaacacatggcattcccaatttaaaaatcaatcaattaagcctgattagaggccttatccagaggacaggcccagcctgtacggaaggatggatctaagcccatttgaaacctaggatatacacttccaggactgggtttatccgaatctggaaaggcctctcgctctcatgagaagaaataattgaaacctttcgaataagcatctgggacacatccagagagggcattctaagaggtgccttgaagacctggtacaggatgacatggtaaccctctgacaccaaatcccatagaattagggtattatcccttatgtcagatcctaagagtgtatgcaccaccaaaaggaaatcttccttttgtctaacgacacaattctaagactacaatacataaaaatagtgcatgcatgacatctgtcgaagattgcgtgatccctaagtgtacagattgccttcgccccatgggctgccctcagtctataggcccccagtcaatgtttttttatgtatttacctcattagtgggcaagtttgcatgcaaaccctagcaggtcatagatatacttgaacctatatcctagcctataaatactattctataccctcaagtaaggggttggaaaatcattgtgtaaacactatagcaagaagctagggttcaaaagcttgtaaaaacccattgtaatgcattaaagctactcaggccaatacgattgactcatgtactagggtttattaatacctgaaccacgtaaaaaatctccatctctactctttattaatttctttagcttctcaactcttattttaatcaatttttgaaaattccagtaaatattttggtgctttcattgagagttgaagaaaactttgaagctactttgtgcctgcaaccatggtggctaccaaaaaaaccaccgtcgtactatccactgcccataatcgagatgatgcaatggacgatgtggacctatgtcttgcagtgcatgcctagttgggcacagccagggatagggaaacatttgaagttggcggccgtcccatgaatacgacccaacatcgagagaaacacgtcaataaaaaccccatcaacgaagacaagatggaagaccctaagggcaaaaatgatgacgaggataatggtgaagacgatgataaatttaaagatggatattacaaaaatgggtattattatgagcaagatccaaatgtactctggatgtttgt

SEQ ID NO: 23644 - DNA, 3882 bp, Cannabis sativa
atttttgtaattttgacttgagaagggtaaaatcataatttatatgatatatcctgcttatggactatattattatatagtatgtttattttgtctttatgcaagtgttttctaacaagtcgacgtggtatagtcacaaccgcgtgttttgggctgaactgggtttggagctcaaaatatatttttggtattttatgttggcatttatttgatagaggaataatttcaaaattattgtgtgtgttatttatgataattatttccccttgttgtatgcatttgtggttttattagccctaggggctttttagtcatttgaccacttaatcatattattcaacaaaatgaatttagtagaatttagaatttgaatttatggatttatctaccctttggatgcaccgctctctcttctttttctatctttcctttttcaatttattggtttattttggaaagaaattaaagcttaatttggagtggaattgaagtgttggtgcttgaagcttgaggtagttgcttcacctttttaactctgaatttagatgctgaatattgtgttaatattttgtgctcaaggtgtgccaaggtttttgaatgcatgttggtgtgaattcatgtgaaattggtgatttctttgttgtttatgtttctaggtttataagatatgcatctagcatgctttagtgaaattttagggttgaaattgaaatttaatttttgggaattatgatttaaattttgagtttgagcttgaatttgtggagtgttaaattgagggtttgaagctttgaattttgagtgtaaagcttttggtttgtaatgatttttggagagcttggttaattgcatattttggtgttgttagagcttgatattcattctttaagcttactattgttgttggttaggttgtgagttatgaagttgaatatatgcatgttttgttaggatttggtgtgtatttgaggtcatttttgtgttggtagaagttggaatttctaggttctcaacaaaggagtcttagcatgggttttttgtgccgcgacccgcctgttagagtttttgggtttgttagctagctcccgcggcatggcttctgcatgccgcaacctgctaggggtttcttggtagattgtgtgttaactcattttgtttataactctttaatccgaactttgattgggatgttccatatcgttggaaagctcgttctgaggtctaaatgcctaactataattggaatgcaattatattaagatgtgaaagtgaattttgggattaaccctatctgtaaaatcttaagaattttgactaggattaccggcacttgtttaggagcagccggggattcggaatctacacatacttggggcactaggtaagacaacagttagtatgtagagttaagcgttgtggcgctcatgtatgatattatgcttgtgatttaatgaggaactgagattagggttattattctaaagtgagcagttatatactctagggttattaccctaatgattaaatagttttaaatataatgccatgctttatatgttgaaataaagaattatgcgttgaatgcataattaggttagacttggtaatcagaaccgagataaaccattctaaggccttattgtaaatagatgtgtgagcttaacacgtgggtctatgctacatacacataaatatgcgtgtgagcgtaacacgcaagtctatgtcaaatagacaataagtgaaatggcatcaataatgatttgacttttgtttattgatatttatattgtcttgctaggcttggctcacgtctgctctactgtgcaggaaagagtaaatctatttgtaattagccatgagttggagggcttggaggtggattgtacatgttcaggccatactagaccaagcgggttgggtcaaccactggatgtattttttattctcggatttttccgtctggatttgcatgttaaagtaacttgtaattttttgtgaaaatttttatgcgatcctgaaatagtatagtattttggaatggtttgtaaagcataaattattacaagttatgtttttattccgtaagtaagtcaaagtttaaattttcacgctcttattttctagtaatcgcaatttaacgggattaggttatattattggttgtcatattttgagttatgaagcattagaacttcagccagatctttcatacgaagagcaactagtgcaaattttagacagaagagagaaagtcttgaggaacaagacaatttcactgatcaaagtgttatcgaagaacagtaaagtagaagaggcaacctaggaactcgagacggatatgcagtagaaatatccagagttgttcaggtaaattttgggacaaaatttcttaaggaggggataattgtaataccctaagattaagaaagtggattagcaaccctaactagttttattttgtattaatgtggaattatattattatataatttaatatatggaattatactgataaattgcattttcaaaacccgttggtgtactagggccattttcgtaattttgatctgagaagggtaaaatcgtaatttatttgatatatcgtgcttatggactacattattatatagtatgtttgttctgtctttctgcaagtgttttttgacaagtcaacgcggtatagtcacaaccgggtgttttgggctgaatcgggtttggggcccgaaatatattttgggattttatcttgtcatttatttgataagtgaataatatgaaaattattgcgtgtgtgatttatgacaattttgcccttgttgtatgcattatgcatatgtggttttattgccctaggggcattttggtcatttgaccacttcaccatatttttaaacaaaatgaattttgtagaagttagaaactgaatttctcgatttatcctaccctttggctgaacccctctctcttcctgttctatcttttctttttcaattttttggatgattttgcaaagaaactaaagcttgatttggagtggaattgaagtgtgttggtgcttgaagcttgatgtagttacttcaccttttcaactcttaatttagatgctgaatattgtgttaatattttgtgctcatgatgtgcctgggttattgaatgcatgttggtgtgaattcatttgaaattggtgatttccttgggttctatgtttgtaggtttataagatatgcatctagcatgttttagtgaaattttaggtttgaaattgtgatttaatttctgggaattatggtttaatctttgagtatgagcttgaatttgtggggtgttaagttgagggtttaaagctttgaattttgagtttgaagctggtggtttgtaatgatttttggaaagcttggttaattgcatattttggtgttgttagagcttgattttcatgctttaaacttattgttattgttgcctataggttgtgagctatgaaattgaatatatgcatgttttgttgggaactggtgtgtatttgaggtcatttttgtgttggttgaaagttgcaatttttgggttttcaaccaaggagccgcatcatgggttttatccgccgcgacccgcctgtagtttctgggtttgttacctagatgtcgcggcatggcttctgcatgccgcggcccgctaggggttttcttggcagattgtgtgttaactcattttgtttataactcttgaatccaaactccgtttgggacgttccatatattaataaaaagctcgttccgagctctaaatgcctaagtgtaattggaatgcaattatattaagatatgaacgtgaatttcgggattaagcatatctgtgaaatctcgagaattgtaactagtatta

SEQ ID NO: 23645 - DNA, 1874 bp, Cannabis sativa
aataaataaaagatttggacatctacataattattaatatttataacaataacaataatattaataattatcttatcattttttagtcactaagaaactttcatttttagggtatttggtcaactccgagtaccccaaaataccctgatatttttaaaatccacttatcccaataatcccaacaatatttctaactaataccgttgtaacatttttggcttccaatcgggtctctaaggtcaccgaacttgaaaatatttttatctcacaaataacttacattatatccacatatttcaaataaatatccataattatcaaattacgcttatttatccacttatagacaaatttacaatttttgctaaattaggttaggaggatcataatcctactcattactacctaataaatccataatatataataaaacataattattcataattaagttttcgagatattacaaccatcccctccttatagaaattttatcctccaaatttacttgaacaattcgagatactgctcaagcatttacaactctatttttcaagttgtttcttccaccacgccgtttctctacaacacttttaactagtggaattgtcttattctaaaatactttttctttctagtccaaaacctggacaaactgttccccataaaattaattagatcaaaattgttataactcagaatatggattgggtccggtacatactttctcagcatggagatatgaaacacattatatactctggacaacgcagaagttaaggctagctaataggctacctagcgtatttaccccaatattaaaaggtataatgaatttagggtttaacttccctttctacatatccttttcatagacaatactcggagaaagctaattctcccatttggaactcgatattcctacactttaaatcagtgtaacctttctatgtattcaatgaagcgagcatataattcgaattcaccctaggatttttataagttccgtagatcttttcggtccatttttattcttttctcacttgtattattccagtgaataggtgtttaatatttctctagtactacacttattaaagtacctaaccagtggtacatttaatcactactagaaaaacggattttagtgactctaaacctgttcagtgataattcattgcgcgtcactaatgagggtgactaaaaaaaaagtttttagtaacccttcacgcatgtcactaaacctttttacactcactcactgagcgtcattgtagacgtttagagtcaacttttattagactaaaaaaataacagcaacacatgaaaagcatcactatatcatttttgttattttttttattctttattattattttatagatgtacccacaaaaagggccattgtattattttttttaaaaaaataataatatttaatttttttaattcaaattttatatattataatttttaattaattaaatgtgaaatttataaattttacaaatataattaataaatgtaatctattattacattaatccatttatatttttttgaaagtaattattttttttatataaaaattgtattttattaaaataaaagcctaaattaatttgcaaattaatcacaatagaaatagacaaattcttccataacaccatacgttaacactagaaaaaagttacaattttactatacaatcagagataaacaaatctcaaaatgaagaaaaaaaatgtgaagattattaataccattaataaatcaaaactaaatctgtgaaacccaaaataaatgtgaattttttttagcagaatcatatagagcatgtttggtattgttttctgttttttgttttaaaaaat

SEQ ID NO: 23646 - DNA, 2386 bp, Cannabis sativa
aagaaagaggaccatgaagaaggtaaaagagagtcgccgacccaaggcagagaaaacggagctccgatcaccggagtgtgatttcggaaaagggtatagaaggaaagtgggtataggatttaggggtgggtggaagtggaagcggagagtaggaggagggtcaccaccatagaaggaccaaagcttaaataaactccatcattctcgtcctcatcccctatcccctaaagagaaatattaaaatcacaacaacactattctatttttaaaaataaaactataataattttttaattatattatataataataagacattacattaaataaatatataattggccaatttgggtgctaacaataaatacccttgcttaaagaattaattacaatacgccaacattttttgtctctttctccaaacttgtgtttggttggatttatggcatgtttatgggaaggtgttttttttcaatgtgataaggtgttgtttgaagatgttatagtttttttgtttaaattttcggaagcagttttgtctcttgtggctcgcgattaggattttgcagctcatggtttgacaaaacatgttcttcggttagacgatgagctatcctgattcgagaaaattctatcatcgattatggtttgctgctttgttaatcatgtgtgattttatttactacgtagaaaaaagaattaccatactttgtttggtataaaaggaaggaaaaatgttaagggcagggtcgggtttgagttaaggcaggttaggcctgcgcttaagacccacttagtttaagggcttaaaaaaaaattctaaataccgaaataaataagaaatgtacgaaatgactcatatagcatattatagatttttctaaatttttaaatgttttcttaaagagattatctttgttatgaacaataaaaatatttaaaaattaaattatttgttttattaattgctcaaaaataattgcttgataattcattttgtattttttttaagattgaattttcaaaactctttaaatttgtatcgttaatgatagggttgtacaccaggcgagtattctaaatttatggtttttgggttttagatgtggaaaactactacctactaaactcactcgttttttgtgtaggattttgggtacccgagtttcaattgggtataaaagatttcacttggtacacttgaaattaagaaaaaaaaaatattttttactttttaaaatattagtattatattagaaatatgtgcaaaacacatttacttagttatattttgattttttattttaattatacatatatttagttatataattagttcttttttatatagcttcggttagagcaaagcccaaaatggcataaccaaatgattgtttagccaatgatggatttcgcgccacggaatgaattaaagtgttatccaataaacaacattatttttaattaaaaaatatttaatttaattgttattcataaaaagaaaatataatattattcaaaatttattgttaattataatttttgtttaatcgtaatacttttaattttataatactttttattttttagaaatattatatactttttctatttttacttaaaaaaaataatagaaatatatttttttgataactgcaataggtaacgatgtttcaatagtgattctttaaaaaaatataaacattttttctattttattgtttaaaaagaaaacaataatagatgttgccctgcttttctctcaatatacgtggcaactctatgaccgaccacgtggcagttaaggcttaagattcggaggtgcttagggatatcttaagaaaacttatgagttgagcgaatataatcgaagggctcctcctggagttatggttgaaactagaggggtcaacatttttgctcatctctgagagctagacaaagttcagatcgatcgagcgcatggtttcagagatttttattcacatgcattaaatgcagtaaggaggaaatgtctacagacaaatataaaaaggcgtgtcagacacattaaatctattctttagctattgcgcgttaaacgaggatattagtgacgtctacataatgaactgtcacgtcaatcaaggaaggataaaggcttatctcacctaaaccctatgtgacttactatgtagacatgcatattttattttcctaattttggaacttgtgcaaagccaaggtgaacacttgggacaatagaagccttttttcttctctgaaaaaagctataaatacctccaaccacattcggaatggggatcacaaaaaatagagtagaatattctctgtaaaaaaatacctccatattaaatatcagtgactcgtagactaaggttcatta

SEQ ID NO: 23647 - DNA, 4372 bp, Cannabis sativa
atatttattgtccttttattgctttgttcgttagtggagtggtgttttgcctggtctcttcttattctttttctttgttggctaatgagaacattaacactaagctagtcaacttcctaatcagtggcccttgtttgtaacataaagtgaatttattacctttacctattgttttgtgtcccacttagaccatcaccaaatttggaacccaaaaaaaaataaaaataataagtttgtgatataagattttggtaattgaataaaaactatgtttggtgtttggtgtgattttattaaaataaatatgccacattttatgttcagctaagactatatccaatggtagaagtaaaattaggctatatttgacataaaaaataactttttaataaatttgtattaatttttaacattttgctttaatctattattgaaaaacttaatttaaaatttaatatttaattaatgtttcattaaaaatataaaaactaataactttatcatcaattttattattattttaatatataaaaatataaaaaaaaataatataaatactttataatttaatattatagttaactatactaataaaataagagcaatactattcggcaccagtggtgcccatcaccttctataagtggcgcctcacaatttgttaacgatattctctaaaaactatttatatgagactcaatatttaattacattaataacggtacagaatgttaggcaccaatagtgctttttaacaattctaataaaataatataaatgtcataaatgtaaataaaaaataatatatttattgtgatacaacttttgtagcatagtaaatttgcacgttttagcatactattggagtatattatttgcatctccatttataagaccattaaaagttaatttatatttggtacaaataataattttgtgacattttacatcaatttttattattatgctccaatatataattgcaaaccttgtaaaatttaatatgccatttaatatttatctaataacttattaaaaatataaaataataataatcatacaaaagtaaatataaaatttaataataaaataataataattatgaaaattatttaatgtaaataagcatgctaattaaattttaacaataaaatattaaaaatggcataacgatagatataaaatcataacatttattgtgatacaaatgttacatcatgctacattgtgatctaaatttggatcactttttgttatgtaagatatttgcatcataatttagcacactattaaagtagacttttgacaaagtgaattatattttacatttacatcacttatttgcatctccattagagatgctctaatgctctaatatttttagaccatatacaatatgtgtgggagattttagtaacttgggtactgttgttgttagtatcatctagtgacatgttagatgttgtaggtatgtccagttagctcccgagttagttattttaatttactaactcaggtacccctcatattgagtttcttatataaggctttgagtagtacttctttaggtaactcaggtacccctcatattgagtttcttattatttttaaaagattacttgattttaagcataactccatcaatactaatctaatttagatgattcaagttgatatagatatctgagaaagagatatacgaaactaacatgtccttggccgaatgacatttcattgtcttggccaactaatccatttggtgattcttgctatagaaagctaagaaagagatctaaaaagttgagatgtctttagtcatgtgacatttcattgtctttgccaagtgacttccttgaagccttgtaccccttctgtattttgagcataactctatcaatactaatttgatttgaattattaatattgctatagaaagctaagaaagagatctacaaatttgatatatccttggtcaagtgacatttcattgtcttggccgagtgatttccttaaaaccttgtacccctttggtattttgagcataactccatcaatactaattcgatttgcatgattcaagttgctatagaaagctaagaaataaatatagaaagtttagatgtccttggccgagaaacttcttaaatggtcatgtccaagtgaccttgggtcaagcatggtcgagtgacattctctcttggcttggccaagtgactttaaggtcctcttgaatggtcattgttgagtgaccttaattcaagcatggtcgagtgaccttcttcttcatcatgaccgagtgacttcaaagttaccatggttgagtgacttcattcttggtcatgttcgagtgacttcaaagtcaccgtggtcgagtgacttcattcttggtcatggtcgagtgacttcaaggtcattatggccaagtaacttttcttcttgccaaggctaagtgacttcaagattgccatggccgagtgacttcattcttgatcatgatcgagtgactttaaggtcactatggctgagtaacttttcttcttgcaaaggttgagtgacttcaaggtcacatggtcaagtgacttcattcttggtcatgcctgagtgacttttgttcttaccaaggtcgagtgacttcaaggtcaccatggccaaatgacttcaaggtcactatggtgagtgacttttcttccttagcttggccgagtgacttcaaggttgtatggccgagtgactttctctcgtggccattgctgagtgacctagggccatgcatggctgcgtgactctcttccttagcttggccgagtaactttaaggttgtatagccaagtgaacttctctcttggccattgccaagtgacctagggccaaacatggcttagtgactctcttccttagcttggtcgagtgacttcaaggttgtatggttgagtgactttctttcttggccattaccgagtgacctagggcattggcggacctagaatttaaagtgagggggtgtaatttctttttggtaagtgaggggaggcaaaagtaaactaaaaaagaaaaaaaattcttttggtgagattagaacccttgtcctctaacatatacgctaattagcttaatcattacaccaaagttaatattatatttataaatatcatcttttattacaaatatatgttgtaactaaaatgcatatatattttttttcccgattttttgttcagggggcgactgcctcgcctcgcttatacgtgggttcgcccctaatctagggccaagcatggctgagtgactctctctctctctctctctctctctctcatggccgagtgacatctcaaacacatggccgagtgacatcttaaggctcgtgattgagtagtctttcctcaaccctggccaagtgatcacccaagctagggtttggtcgagcagtcccgggccatatgtgttgactcattcattcctcgactgactcttaaagtcaatgtgtcttgcttcgttatactaaatgttgactaatctcgagagttaaccctactgatttttggggttaacacttgcccctagtctataagaactcttttaagtgttcttgtagactatgttcgacaagtgctttccctttcacttggtatcgtggttgtctctttagacgcttgtgccttgagatcttttgtacgagggaatcttctgcatttgggctttcttaatctcttatctggtgtaacctcattattaagggagtatagactctgtgagcagtctcaacctcttgctggttacttattggatgttaaggggagttgtatagccttttgggccgcgctcaacctttttcaagtttcccattgaaggttaagggagttgttttgcctcttgagtcgcgctatgcctttttcaagttttgtgatgctattgaaggagcttatagcccttaagcggtactcgatctcttgcattacattcatggcacttaaagtgctttttgaatgcgagaaaataggtatgtattatttaataaatcataataattaaataaaaaaatgtagaatttattgtgagttaaatttgacacagttttaagtatgtattaaatttgacacactttttaaattactattaaaataatattttctttaaatgtactaaaatatggtaatataccacttttttaaatctctaatggaaatgcattagaatagatctcccaaaattgataactatagtgatataccagttagagaattaataactatgtgcagcagtgtaattttttttctacttttttgttaagttgtaatttttcgtttattcctaaagattataattttgctgcccataacgtagctaaatgggcgtttgctaacaatattac

SEQ ID NO: 23648 - DNA, 2123 bp, Cannabis sativa
atatatatatatattacaagtaaaaagtataaatgactaatcaaaatcgtttttaattgttttcaaatatagttattacatatcagctacgctagaaaagacgttggaaactattggaagaacattatgaaagatcaagcgatgccagatgtaataataggccttttccatgatcaagatcaagttcaaacatacctctccggttccagtaaacaagacaatttagtcaaggattttgatattcgtcctaatgttatcatataccacaaacagagtcatggatcataagtctcgtcaagaacctattaagaaaatttgtcgtgtccactgaaaattactattacaaaattagctgttattattacatttataaatattgtacttatacttagtagtatatatttataagttgcttggactttcggggtgtcataacctataaatcttagcctcttttcctcactccagtttcccttatttattatttttttttagagagtgatttgaatcatactatgacaatcatcgacgcgaaacaaatccagccaaccagctaattgtctagccaaagatatataaagtcaaaatacgagtcacaacgagcaaagcaacttatataagaccaagttatcttggaagtttagacaaaacaacttcagaccaccttcaagtagcattcgatataaacaaccaattggaccgaaactacctacaaaataaatcgatataaaagatggattagtacactatacaacgataataatgtaaattttaaattaagggtaaaacacaatagtaatttaaacgagagaacttatccttgaagtttttttcactcagcatgtcaccattatatagaaactaatttgttatgtctaactattggatcgagcaaagtcttctaaggtagaaatataccagtcaattaaatctgcaccatacataaaatttaagatttgagagattaatcaaatttaataaatcaaatctccactaaaattaactattttaccaaaaaagataataaactcaattagctagcaaacaatgacaaaataaggatataaaataaaagaaaaaaattcctcaaaattattttttataattagaaataagatttaaacttatttgtaaaaattcgtagtagcactctttgagattgtattgactatcaacttatgtatttaatcaatcgtgtttgacaatttttttttatcatatatgtagggaggtagatgtgattgatttgctattaaatttggtatgttgaacgtttttcggtaaaattatttctgtattgaatttgtctagctagtttctttaaaaaaagtttgtctagctagagaagtatgttcgtcttaattgaagttttttttttttaagatagatttatgataattgagttaaggaaatttaggattagctttatcatcggtagattagtagatttgtagtgtcggtcggagacctataatatatagaccttttttttagaaagtttaattggcctcataaaaccacctgttcaggattgtattttgtttagttataattaaattattaaattatattaactttcaaattttggaattttaatttatataatattttaaataatatatttatgagtgattctacaatgcacctcttaaaatagaagtattaatgcaccatctacttatttcggtatctagaaaaaaattttaatctaatatttttttttcatattcatgtacgttataattatttaagatatcctacaaaattttgagaaattcagaataacttacaatataaaaaataatattcaaacagtatatttcacacacgtataaaataaaataatcacgcttgcaacagactgtttgaatgtaattttcgacgtgttaaacttttccgaatttcttaaaatttgtgtaggatgtcttaaataactataatttacataacatgagaaaaaatttaactaaaaaattatttcgatactaaaacagatagagatatatcaatgcatctcttttaaaggggtgcattatagaatttttataactattgaaaaaactttcatgcctttttactataaaaaaatattgtaaagtcttaattttcttaagaatttttag

SEQ ID NO: 23649 - DNA, 2061 bp, Cannabis sativa
tagccataatagaaattacaaaataataatttccataaaagaaaaaaattctattggatatggaatacaaaagtactacatgtaattttagtgacctattttctatttactaaattgcaatttttaaccatatatctccaaaaaagactcacaataagagtatctttaaagttttttttaataaattaataatatcatcaagatacataaatatttgttgagaaattgaggggggccatggtcaccccaacccaaagaatacctccgcccctgtgtgctacaatccccatggttgtcgacatagtgaagggatctcgtccattatgactagtgacagatttaagatttttattatgtgagggtttaattattataaaaaatatttatttttatttttaataaaaattataactattttgagggatttttttcactattttgttatatagttatttatttaaaatgaaaatattaatatgtatttttttttactattttgttatattatttaattaaaatatttaaaatttaatatgcttggggagaggagagaggcatatatatatagtaatactgtataaagatagagagagagagaaagaaagagaaattagattttttttttgagagaaaaacaagaaaattagattttttgtttgttattattttataataatttttaaatggtaaattggtgacggtggtggtagagaggtggttacgatgtggtggttgtactgatggttggagaagaagaggaagaaaaagaaaaaaaaatattttgataaatataatttttaattatttttaaataaataaaattatttgtatcaatacaaatttaggacacgtaatcttctatgttggcacatttaataaacattattgaatgatatttggaatatgcaaatatataatttggatttttttataaaaaaaaaaagaatatgcaaacataactaaagattggaatgttttgctaaaatttaagaatggtgggttttttttatgtgaatttaagaatggtggttaaacgtaccaacatatggagattggaggatttttcaaccaacatccatattttgtttaaaaataacatcatttatatactttcattttcgcacatgtgcactttttctcttaatcactctctcattcattgttttttatttgcaggtgcgcatgagtgtccattgacaagggtattaggatttatatatatacattataattttttcacacattgataatatgaaatttataatacttcttgagatagtaattattttctactcactaattttgaacaactaactcataaatgattttttttttttgggtcattattcctgaatcacaaatgattcttttttaggtcactatccctaaatcacaaatgattcttttgctatactttttgggctctacttttttttttttggatcgaatactttattaaatatttttgtttttagctttgatactatgttagaattgtaagatacatgcaatttcatctcaaaattaattgacaataagaagcgtagggtaggtcatgaatcttatatatgctataatgtttccacacattaacaatgtggtggactactctacctattagtcattaatgataattgagtttgagataaaatctcataattcttgttaagatgatttcgaaccatgcaagtagtttcacacatattaaaattaggagtgttcaatcatgaatcatgatatgagtattgtggttttttaactaatttattagatcacattgtatatttagattatttgggaatgagtagaaaattatatatatatatatatagggagagagaattaagcactctcattgggtaaggctgtataaagggtgtataatgtattataaggtttaaagacagtatttttaccataataattgaaaaaaaaaaaaaaaattcaattgtgaagaaaagtcttaagaatagagagcccctaaatttgaaaagtttaatcagccacctaaactaaagtaatctaaaaatgaggacttggtactggatggatgctgtctat

SEQ ID NO: 23650 - DNA, 2026 bp, Cannabis sativa
aaaaagaaaaataaaaagactgagaaagcctagaaagagcgggcattcaaaaccctaactcagcctcactctctctcttcttcttcttcttcttcttcttcttgtacctcttgctttctctgatcttgcaatagcttggaccttttatcatactcaacaatgtcagccatgctggtactctctctctctctctttctctcttttcatttcatttcctgtattcattttttttttgtttgtatgtaactgactctgtttcgccaactgtttgtgaaaatgcgtcaatggaaaacaacaacagcaaccccagatcttattgcttaaggaaggtacggatacttctcaagggaaacctcagctagtgagcaatattaatgcttgtactgctgtggcagacgtggttcggaccactcttggtcccaggggtatggataaactcatccatgatgataaaggtagtgtcactatttctaatgatggtgctactattatgaagcttcttgatattgttcatcctgctgctaagatcctcgttgatatcgccaagtctcaggattctgaggtaatttttgtatttggttgtgaaaatgggatctattaactatcttccctgatttcaagttttgtttttgaattccttatttgggttttctgtggttctgttgttgggatttttttttagttggttgtagaaatggtggaagtaggattagattgctatttcattattgtcacgttgttgtgttggaattggaaagatgactggcttaaaatgtaagtagctttagtttatttatgctaagatcctcgtcgccattgctaagtctcaggattttgaggtaatcttatgtttgttatatttggttgtgaaaatgggatccatcaaccatctgggtctttttcttttactgtgtagtgatttcaagttttgtttttgaattctttatttgggttttcagtggtttattttgaggatttgtttttagtgggttgtagaagtggtggaagtaggattagctatttcattcttgtcatgttgttgtgttggaattcaaaagttgactggcctaaaagctaagtagctttaatgtgagtggagaatacttgggccctggatattaacaagcttattgatattgaaaatttagtagctgtaaaagatcatcaaagggatgtttttcttagtttctatttgaattcacgagaaggtttttctattttgttagtagttcatatagagaaaaaaaggtttgaagtagaatgggacacaaaattcatgaaatttctacaattttatgtctctcgggatcatcttcattgcttcttagacttaataagaccgatttgggtaagtgttgtttatataattctccgattaagaaattttttagaagttaggtaagtaacttggaagagaactgtttctgatcacttgcctttggtttggtttcaagtccctttaatttcatggtattcacaagatcgtaaaatgttcaaggatgataagtggcttttggtagatttttttttttcaaaagtagagaactggagtgatagctcttacaagaaagaaactatgaagggcaggaataaagagtggtcgatgatggttgggcttttaatgtggtgactgacagttcttgtagaagccttggaaatttgttatcatggcatggggattgtttatttcataaatagtgtcaattagtttgctggaattaagaaatagagatgatgtgtctttgggacggaccttggtgtgtatttagctctcttatttgggctagttaccaaagtttgtagcatttttctaatcccatatctttggtagtgttcttttatgtgattcagtgattgtggtgaacacttttttttctggtctctttttcaaaggtggattaggtctagtgaaattgttatatgttattgaagatttttttcctacttttactttgtattggcaagtgcattttgaggttcacccggttccaatctttgtcaggcattctttcttttcttcactgtt

SEQ ID NO: 23651 - DNA, 3708 bp, Cannabis sativa
aaccgacgccaaaaatgagcatttttcagtttttttttaattttatataatttattttaattatatatttattaaaaaccaagcccctgatatgtcactagtggtggggatttctgccagatttgcctgagaatttttagtgctattgtcactatttgtgttgcctaaggaggagggtccactaaataaaatatcgaacctatggtaacacttttgagcagtgtgtccagcttttccacatagctgacactcaggtcgattgcctcttcctccacgattgctggagcaacctcttcctcctctgttattgcctctttgaccatgtccattgtatcctcctatgtgattattgttcaaagaaagattggctatattaggttgaacattagcaagggcgtctgtggtgtgttgattaatgcgaagttcatgactatgtagcataattaaattgcacttcttgtaggctcagaggattttcacgagaggttacattaacaataacatcttcatattcttctctcagaccttcaagaatatatatgatataaggtcatcatcagagatttgttatccagcagtagcaagagcatcagcatagctcttcattttcaagaaataatcctcgatggatgatgaacctttcttggtggcctgaaggagaccacgaacttgcataactcgggctcttgatcttgaagcaaagatttgagaaaaaatgctctagatctcatatgaagtttgacaattgatgttgtgtccaagcataggttcagaaatagagttcattagccagtacattaggaactgatcaagcctcatccattgaagataaataggattagggagattaccttcaagatgttaaggtggtggagggatcattcctaagatgtatgtaagctcttacagctaccaagaccaaagatctccaatcgtaggttaagcaaaagtagattgttgttgggaagtcctacttgtggagcctctggtgcagggtagatcgggtgagcaacgatcgaaggagctccattgtcgttgacttgaccttgattgtttgaggagttagctccattcgacgtcattgttgatctctgataccatgtacgaaagcagagagaaagagagaaacaaagagagatgaaatgatgaaatggctcacatgaaaacgatgagcacaactacttttatattaaactgtaaaagaaaagtttgttacaccagctagtataaagctcagcaaaaaacagttaaagaataacaactaacaacaaatggtattaactgaaagtgtaactaatttatccctaacaaagttcttttttttttcttcataaaaatcttaattttaatgtccctgtggtgttaggcattgagctccgattgaatgctatcaactttctatagatttatttaagaaaaagtatgtagattgaaaaaaaatcaagtataaatttattcaaaaattagtattttaagcgatacaattcacataagtttaaattctaaatcatagagtataaatttgctcttcatggaagttaagaattgagaattgtgaaaggagcatttataaggaaaaaataacataattttaaagaagaacactatattatatatatgaaatatttttgatatggagtacaaactaaacatggaaactcaaatatctcaatctttttgatcatatatgcaatatatagacgaatatgcatgtgtatggatgaaatttaagaaaatttagtgtgtttaaataaaattcaaataatcagtaacacatgtaattttttttttttcattttactatatatattgtaattttttttttttaaattttacaatatattttaaataattatgttatacacactattaatattatataaaaaaaaaaattaaaattaatttaaaaaacacaaagaaggtgtacatcagtttacatcaccctaaaatcaccgagaaagattaagagatatcttaaagtgtcaaacatcgtaaaaaatggtaaattgtttattggtacattctaatatttttaaacatgagtattatgtaaattaaccatatgctttaattggggaccacgagctacttgagaggtagcatcaaattaactttgaaatttgtgaaattgtgaatggttgttttcaatgtacagcaaagtgctgatactgaaagataccttatgatgatgataagtatatatatatatatatagagagaaattatacatactaatatttaattcctattattatatgtacgtatattttgaaatgatcaaatgtactacatatattttgcctgaaaatatatatggtacgtacaaaaaaacagatagtacagtcaattataaagagaggccctcccttctttttttttcttttttttttttttaaataaatatgaattaaacttcacgtcattacagaaaatattgttccaaaaaaaatacatatacaatcataggtaaaaatggacctagccacattattatagatcaaaaaactacaagttctgttaataaagaaaaaattacaacaattaaaaatcgagagagtctattacaaaaattagcatagttctaatatctcaacggaattctagatcgctgagtgaattgataactaccctagaattattctctattataataaactttcagctttcatctttagcaacttctagaaccaagcaataggttgtcacttctccacaaagagcattagaaaactctaatctagttgtatgcaccccacacaccattctaaagtgatttctaactacaactgcaatgcacatactttctattccaaatttaacatcacatttaacatcacaattaagcttaatccactctagaggagaaggaaaccaaccaactacagaaagagtgggaaataagatgcactctataattttcataagagtaataaatatagtcaatacacataatttactctctcacacactgcatttatttatatatgctttttaatgttatatatcttcattttattattcttaatagtatatgtatgccttagtctaaacacaacctaccctattttatgcatattgttaattagtatgaaaatatattattaaagcatgaatatatttatatatagatatgttgtttccctatgctatatacgtactggggtatatattaatcatatatatcttctaaagcatgcataccatttaaatagattattgctgtaaggcatatgcatgcacaacactttttataagtgtcgttttataattagttagcaatatttttttttttaaaattattttcttataactagttatataagactcaatatttattaattatactataatagcagtatgacaccgatgaatgtactagttagacactagtgatgccttttaacaattctcatatatatatatagagagaattgctaaaaggtactcggtgtcatatcgttattagtgtaattaagtatcgtgtatcatataacttaagaaaataacttttaaagaatatcactaactaattatgaaacactgcttatagaagatattagatactactaatgctcaataacaatgctcataaatatatctatataatatatattatattataatttttgattattgtacacattgtatcaattatatatgtacttgtaaagtcaccacaaaaaaagttacactacaaaaaatcttact

SEQ ID NO: 23652 - DNA, 3283 bp, Cannabis sativa
ctgcgtatataattaatttaaaattaaattttttttttatatatttttaaaaaatcattacattaaaatcaactaatgattaaaaaaattacgtaaaattatatttaaaaaataaattattttttcaaattaattacacacgtgacattgatatgatactgatgtgtcaactagttaagtattcatgtattattttatttgttaggtatgacaaaaacttgacagaaaatctatttataatactgaatacttcaagaattttttttataaaaaaattcagaggtaattcagaggtcacaataatacataaggcactaactaagtatccatgtattattttgtttgctaggtgtgataaaacttaacagaaaacatatttataataatgaatacttcaagaactttttttataaaataaaaaaagttcagaggccacaataatacataaggcactagttaagtatccatgtattattttatttgttatgtgtgacaaaacttgacagaaaacctatttataatactgaatagttcaagaaccttttttataaaaaaatttagaggacacaataatacataagcaaaaaagtcctccataaatatattatcacaccttatttttttttttcttttttttttaattataatttatttagtccaaaaattcaaaaataataatataaggaagaaggagaagaagaagaagtcataatagttcaggtgaaattttccatttaaaaagtctcaatctcataatacaaaacatcccaaagtcgaatcccatcaacctacgccacctgaccaacaaaacatactcaaatccataaaactctttttctttacttcaaatccataaagaatggaactttctcaacttactcatcaaactcctcttacccttttcttcttcctctgtttcatcttcaccaccaccaccattgccaacgatgaatcagccgccatggcagaccttctggcctcaatctcacccaccccattaagctggtcaaactcggtcaactactgtgataattggaaaggaatcgagtgcagttcctctggaaaagtcaccaccattaacttagctaatcactctctaatgggaactctcccttcaaatcttaattctctcaaaaaactcacttttcttaatttacaaggcaattccttaaatgggtctttgcctttgttatctaatctctctttactcaaacaaatctatcttgatagtaacaatttcacttcagtaccttctggatgtttccaaggacttaaaagtttgttaactttaagtatgagccagaattcaaatctcaatccttggcaatttccaactgaacttgttgattcatccaacttggttactctatcaatctctagctgtaacatgtttggttcaataccagatgtttttgattcatttcccaatttggaaatcttaaagctttcgaaaaatcgtttgacaggatctttaccacaaagttttgctgtaacaaatattcgaatcctctggctcaatggtcagcagagaggtttgtctggtaccattgatgtgttatcgaaaatgacaaagttgtaccaagtttggctacaagagaatcaaatgacaggtccgatcccggacctttcgaaattagacaccctttttgatcttcaacttcgcgataatgtcttcacaggtaagggtggcaattcgtgttcacgagtcgtgtttatattgtgtaaaaacttaagtaattacaagcaaatatgaaactcaaactcgactcatttattgtcctgttcaaaactaaaacacttatttataaacgggttgacctgactagacctgtttaacttatttacataaccaactttaacatatttagaaacaatttaacatgattatctcttatttaactaaataagagtgcgtcatttttgagttgtattatcatgtctgatccattttgtcgtcgctattcacaggtgtagttccgagcactctgatgtctatttcgagcttgcgaaatgtcacactatctaacaacatgttgcagggtcctctcccttcatttccatcgacattaaccaatgttgatctcaccggcactaatagcttttgtaaagacacttggggaccttgtgatgatcaagtcatgactttgcttgaagttgctaaagatttggggtaccctttggaattagcaaactcatggaaaggaaatgatgcttgtgataattggaagtatgttgattgtgattattcagttgggaataataataataataatagtaataatgttgtaagtgttgattttcaaaggtggcaattgtctggtttgatatcccctgcttttggtaatctcacaactttgagaagtttgtttttgaatgataataatctcactggttccataccatttagcttgacccttttgactcaacttgaaattcttgatgtttctaataacaatctttctggggtgattcctatttttccacccaaagtgaagttaattacttttggtaatcctttattgaagaaatcaaggaacttgagaaaaggtaatgacattgctgccattatgttattttctggtcttttgtgttaagatgtttttttatgttatgatcaatgattggtatgttttcttaaagagctgttatttcaaagtaaagtgcttacattctttctttcttttttgcagttaaagaaagaaagattgtgcttaaagcagctttaggtaaagttattccttaatctcctctttctgtaatttgggcctacttaactttttatcttctaacaaccaaatgagaacacattattattaggtagttataactaaattactactcataaacccatgatagaattttcttaattgaataaatattatgtatgtgattaaaatctatctaaaaaatattactactcataataattagggagtgtttagtatgaggcgttcaaaataatctgatattgaaatattaaagtggagaatatgatcgtatgaaagtttatgtttgtgtttgattatgcatgagaatatttagttagataaatattaattaaagaataatttaccgtataaatatttaagtttaacttccagttataaataagtatttaagtttaatttttatccacgtgtctttttttattgatatatttaaactaaataataattttttaaaaaaataaaaatttaataatttggactaatcaagaataactacatgacaatttatttaacacttaacagcagtcaggtatctacagaagtttcaaaattat

SEQ ID NO: 23653 - DNA, 2428 bp, Cannabis sativa
aaatttacaacaacataaaaaaaagttatttttattaatatttaatggaaggtagcacatagttatcaaattattaacgacgtatccttggaactcttgcttaaatgaaatataaatgcagcatagatggcctagttggtgagtcaatatatctcatcaatgcataaaattggttattttcagccatgaatttttattattcttctggtattgtattgtgtatatatacatatgtacagtatataaatggaactaattttttaccatttatactttggagtttggacccacacatattaagaatttctcattatatgatcatttatgactggttaagaaaccaacggagatgtaatttataattgtgttttagattaagaatttcctaagaatttaagttacataatagaggtagaatcttcaagtttggtagaatttggaatgtataatttgactgctttgtattttctttgactgtctattgtaatatagggccgttacagttaaaatttgtcttactacttatccacttgaaaattaatttgttcctttcaaataataataatagttttaactccataatccttacaaatattagtgtgcaattttttttttcggtcaaaggaaaaagggttggaatgcacattactataattcagaaaagtcataatttgaatttaaattgtgcaactcacattaactactcaaactttaagaaatgtgaattaggggttccaaaaaaaaaaaaaaaaaaaatctgttgaattatgattatttagtgttagttacaaccacacatggattctcaggttttatgttggaaaacaagggtcgtatgtatgtatatataccaaagtggaagagtacaaaacacgtttctctgactttaacttaacctgcaggctagagacaagtatttttatatatctttcttactcataaatttattgattttaaccaaatatttttaattgtaaattctgtcttcctaatttataaatcttcataataatcatagcaaaattttacaataggaacctttcattcgtctcataagatttttttttttttttgattattaagtagcttttattgaaaacaaaaaaacaaactacatcatagtagccacaaagagggctacatcctttaaataacccattgcttgcaccttagtgcgtctagcccaccccgctaaagcatctgcaatccaattcccaaactgaggaatatgggcaaaggtgaccaactcaaaacacttacaaaatttaatacaggaattaaaaattgggtaagtgccccaagcaaaaggcaaagtaccactgctaagagccaacactgccaccttcgaatcagattgaatgtgaagctttgagatgttcctctatcgagcttttcagagagcaagaagaatagctagtaattccccttccaaaacagtcgagaccatagttaactcagttgccacccataaattatcttgggcttctccgttgacctccacaactgccaaaccagcttcgttacaagatatcgacgcatctatttggaagcagatacaatcatcctggacattggttctcctccttgcaagcaaaaccaatgcgatatttggttgggagaatgtcagaccatgctttccataacaatagcttcagacgtgggtgtaaatcgaccttccaaagttcatcccaaaccctatttggctccttgaatatggacttctggcttacccattatgcacttttcactgagaattttccagaatttgacgacttccaaaacagaacatcatttgtttctattagaggtctaatttgtagaattgatcttgccacttcttcctcaaagcaggccctgataatgtcctcattccacgcctttgttccatccaaaaacaaatctgagactttccaaaatgcatgtcttctgttatacttgaagcttaacttaatttcctcaatcgattttctcggaatccatggtctatcccacatctctatatcgccattgccaattaaaaaccccgccccatcatgacagatcaatcgcgtagccaataagccttgccaacctcgcaaatctccaccatgtttttcaacgtcccaggcgtcagttgaatgacagtactttgataacataatatgcacgcaagccttgtcttccttctgcaaaatcatccagtactgttttgcaagtaatgcaagattcatgtcctgaaactttctcaaacccaagcctccacatctctttggttgacatatatcactccaacttttcatagcacagtatcgtttcttctcagtgtttcccacccactagaacctcgcaaccaccctatccatttcatcacatatagtcttgggtaccttagccgtggacatatagtaattgggaatgctttggagaaccgtgttgggttttatgccct

SEQ ID NO: 23654 - DNA, 5014 bp, Cannabis sativa
ctcctcaagggtatttacattaccaagggaatgacattttaagattaaaccttccaaacaaacaaggtaatatttaacattaccattcccttactaacattaacctattccaaacaccacctaagagttttagaaatataatattattattactgctaaaaattaaatttagggatttagttacaaccaaaattaaacttagttatttatgatgcaaattactcttttaaaaataaattaagattccttaaaaaaaattaagattttgttttgttttgtctttcgttttagcaactagaatgaggccttttccggttcgggtgttaaagtgcagtggtctcctccagtgtttgatcaaataaagtcaatgtcaatggggcttttttctaatggagttggtaagttcagattggtgtgtattgcgagagaccataagggccatttgatttaagctttcaaaactagtcttgttggtcgagtataacttaaaattgcagaaattattgccatcaaagaagcattaaattggattattcattatatgtagcgtaatgtgcttctcgaaacaaatagtcttctttgtgtttaagtaattataaatatttaacatatgccttcaactttttgtctattgagagtcttttacttagttgttatgatatttttctatattttatcgaataatttgtaaacaaagttgttcattgtgtcgctcgcagtttttatttctccacaaggtatctttcaagaaaataatttatctcccaagaaaataatttatctccaaaatacgttctattataatggccgacttttatgaaagtttacattttattcaaaaaaaaaaaaaaaaatgagccttgggcgagagcccagcccgtccaatacttggtccagccgggtcaccatcacatctccccagtccaatcacgcgctaacactcttccttctctctcataatttagtccaaaagcaccgttttcttacataaaggaacaaaaacataatttgtccccaaacacgtagtgcaaagcaattgttatccctagttcaattgcttcggcaagatgaagaaatcgacggcggcgaaacaagcattggtggtgtttggagccctatcattaggatggcttgcaattgagctggctttcaaacccatccttgacaaggctagagctgccatggacaagtccgacccggctcgagaccccgatgaagatcccgtcgtcgtcgtcgtcgacgagtctgctagcaagtcttccgatgactcagaggttgccactgatgagtaaggctaaagttggaagagtatgattttcttagggattttatgaaaatccagtttatgatataataatcagagaaaattaatgggtttagttgtaattattgttattatttttcaaatgggagtttgtttagtgaactacttctgtgctaaaatgttaattgtctagacagagttaatcaaatgagtatatctgtactaaaatgaattaactctttggttgattgtaaaatttattcattcattgattggacttaatcatacttgttttgctcaataatgttttaaacattcataataacccaaaaggatgcaataaattgtagctgaaatagaaagttaagaaaaattacttgtctattactttgtggtggaatatatatacccttttagttgaggaggcttctacatcattattatgttcatatcataaactacatttcatttcgtattagtttgatagctagacttgaataaagatagtattaataagattgagtattacgctgtccttatattgatgactagtattgcccttatgagattagtcaactggattagctgtcaacaacaactggacatcttgtgagagagataagtctacgagactattagtatagccttatggaaggtgtgacagaagattcaactccaattatatataatactgtataaattttatgaatttatatcttggaccaactaggtcaccagtcctttaacttttataatattctaatgatgagttggtcatttgtgaaacccagaactttgacatgccaccaacaatttgaattcactgattttctgtgtatttttctctccactatttatggcagaactggattaaaagaaaagggtacaaatggttgatcttgtcctctgattatctaatgattggtatatggttgatgtggctttgtacaattggagtaatgctttaagtttaggctgattgtgagcgattattagagaaatgctaaagggcaccataagggaatcctctaaaaaaaaaatacagatttcgatgacagacttttggtttgtgggatcacagtaagctcgcaactccaaataagaggtggaaggtagtagttggttttgccctcaaagatactgtagaatgcgaagaacaacagtcccgtgggcggtagtaggagaaacaaaaagctgagtaacagtatgaataacatatgcaatatttggacgataaacaaaactgccaacaatagtgcaatacaaagtaggatcttcctaagggtagccatcaaaaggagaatactgaacattcaacgcaaagggagtatcaacaattctagcataggtaagaacacttaataatattagtagtgtactttaactgatataaaagataaccttttggaaaaaataacaattttaatacccataaaatatagcagagaacttgaatatttcatctcaaattgagatctaattctaactttaacacttcaacattccccctattaaaaatttaaacatgaagctctcacaaaattatgaacaattttgttagcaaaaagatacacaaacacaaacgagactttgctcttacaaaaaataaactttctacagttaacaaccactaatacagaattcatagtcaaatgactgcagatggcatggaaagctactagacaatctgtctcaagcacaacattccccttattgtctcaagcacaacattcactctattgctttcttttaatccaacttaaagcttcacgaatccctgtaatctcagcaaagctctggtgccaaaaccccttttcgacattcctgcagctagttcaagccttcaccagttcacttgtatgatcgtgatccaccgaaccaaacccatagcaacaactaccctaaataaagcaacatctacattaactttgatttgagacttttgagccttcatccaaatttcagcactatcagtggccaaatcagtcgacaacaacatgactatttttttatgtgttttcccattgttcaagatgaagacttgctggaaaaaccattttggaatattagagaccttagcacgccaaactgagcagcacaacgcaacaacctccaacagttttctttaattactttattttattattttttgaaaatgacttgagatagataatcttttctacaaagaagaaaaagagaaacatatagacatcaaaattaggactgagaagatatgtattttgtgagtcattggagcatttattcttgtgtctttaagaaaaactacccgaaagcacaatgctgaactaccatattgaagctgaaaagtgaaaaggactcattatctaaaaagaggcaaagtgagtaatgtattccttccatacaaacacttgcccattccaataccgtccacttggcacatatttcgctattttaccaaattttgtgggcttggggaggcctagatgcgtgaattaaatcttaaaagtgaataaaatcttgggaattctaatttggttgaggaaaacacacacagaaattaatgtatttagaatcacttggatgttgttgttgcagcatagaaagctcgagtgtccaaacccgagaaacaacaattagactgactctactgattgtgactagttatctcctcaacaataacaaatgtaacaaatgggtttttttttttttttttttagcaaaagttgctcaaaagttttactttatttagcaatttagtcttgtagattttcttttttgaacaagttttaatttttaacaacagtagtaattaagtctttcacttactgaaaacttgattgtctaaattttttttaggcattgaattgccaatcaagtaataactcgtgatttttttttttttttgctaaataatccgatagagtaataatatgtgcattaaaaatatgcattcaaatattaatatttcttattttctgcaagaaaattaagctttcttgttcctaaatttatagttttcagagattgtctttttttttttttttttcgggccaagcctactggccttccctgggcttaagtgcgacttggtcagggttgttttgctactgcaattcgatttttgctactatgattagttttgtctctgtgatatggttttgatgagtgttttagttttgtttctgggacatagttttgagtgttttagtcttgtctgtgtgacatagttttgttttgttctgtttcgttgttgattcttctttgttttttgatggctcgccatcaaattgttattagtagttgggaataacagttctctattgaaagagttgttagtagttcacttacgtaccttacacaatagttgagttcgaggttgaatgaacctgctgcaataatttcaactgttgtctcttctaagcggtgaataaaacagaatataagtattctcaagattaattgtgatgcttcaatctttttcatctcactttattttaattttttttgtcaaataatttggaaattagacaattgattatttgactcgttgtttttaattttaattctgatcgtgtttacaacgggagagatgtcgtgattggattgtaaactattattttagctaattattattaattaaatttcataatctatagtaacacttttttaatcagttttctatttttaaaattgaaaaagtaaaaatatttttaaaatatatgttctataaaactgtttttaatattcaattttttaattgagaatcaa

SEQ ID NO: 23655 - DNA, 2714 bp, Cannabis sativa
tcatatattctctctctcttttcctgagttaaattggaggaacgcccctctgacattttaagataatcctcacggcttagcttactgtcgcttgcatcaatggattgcagaccacctttgatatgagaaattatctcagtgaagactcgagaaggatcaagcctcttcgttgaatcggaattaaaatgaggccaatataaagcactaaacttctcatagttgacttccttgttccttaagaagttctgaagcaacactgatcttgaaattctaacttgatcagatgaaagttcttccacagtaaggaatctttcaaaataagagttacccaatgttccatctagcatcattaagaacttgtgaaatgttatgaccaatgggtagttattagcagggatgtcataaaaagagtctgggatatttttgaactgttcttcttcatcacctatatcatcaatatcaggcaaactactttcatctacattgcgaccaccacaagcaaacctgtccaagtaacaaaaacatcatgatatatgattaaaaagttcttacaagtaacatacaatcttagtttagcactgaagcaacatataaccagcatggtgaaacacatttacacaccttttcaagtcagaaacatgttgcttgatggcattgcacaacttaggactaactgtaacgaaaagctgacgcaaaacttcattcctcttctccaacagctgatcaggttccatactattttgactagttttcattccatagaaaacatccatagcaaaatggtgcaattgctctctttggaatagtttcatcgtcaaaacagtagtttttccagtccccgaccttccaagtataaagctgcttttattaaacagaatggtctccatttgttcatccgttacttcatacggaagatcaatttccctaccgtcacgatcagataacaagtggtttactacaccatgagacaaggagtagaatttcatcaggagcaaactctcgctgaccttcgaattctccacataacttcttccatcagaagatgaacaaattaattcactctcagattctttgtttgagagatcctttagccgaacaaaatccaaagagggtggccaatcctttggtagttccaggtttctagaaacagaataaaaacatatcaaaaacacaatatgataggagttgttcaaatgcaaaaatatctacccgttgacaagtctttcgttgcagaggttgacataatcatctgtgtactttccaaaaatactgtcaaggcgttttatcagttttggtacatcatctgtaggcaaaacatcccatatcttcaatacttgcatgtatttgatatccttagtgatgtccacagtaatgattacaatcatgccttcggccttaattctcattatctgcaaagaacttcctgattctacatgcagtctcttaggcctccacccactggatagcttaagaagaaggtttaaaattgactttctttttcgaattgatgtcagttttttaaatgacttcaaaaaattatcactgaatagaacctaaaatttggagtgtcacaaggatggaaaaatatattagaatgtaaatgtcagacagaaactcaaagccaccaattataatcaacaagtgtatgacattagtaaagagcaattgagcactaaaaaccataccttccactttgcatttctgaaaagcacactatcagcattaagaagatcatcgaattgatcaagctctttcttgatctctatcatagccttagccaaactgacatcctcatcagcattgtagaaacagtgacgcttttttgcatcaatgacgagcgcctcccaaatagattgacaattagcaagggttctttcattacctagtatccacaaggaatgcctggagagatcaatagaataggcaattttactcacacttgataaaaaccatgcaacaacatacttaagaggagaaaaacaaatagtgccatacctagctctagtgagagcaacattgactctctgaggtttggatatgaaatccaatgactggcctatatcagatcttacagtagacaatactataatgtcttcctccccgccctggaacccgtcaattgttttcaccttcacacgaaagccatcaaatttttcatacttcttcccaagtttttcttgtattgctaccacttgggcagagtaaggagacaccacaccaatactaagttcaattttggtctcacgccaagctgtgtaaaaaccaaatgtgacgaaatcacaattaaacaattgaaaatgtatggtttatgttcttcttattcagagaaaataagaagaataaaagaaaaaactgttgtaaattttttttttctctaaatagtaaaattctggtattctcagtttatcatcaatatgtcatgaaaaaacacacagcaaaattgatttacaacttccttgcaaattggacttagtaaaaataaaactgaataacaaaatctagttttgacaatttaaatcaagattgagataaactaacacctttgtagatcataaattcataactaagttactaacatcataaattcacaattaatacctttgtagagattgtgcagtattttgatgactagagcagcctcaaccatatttttacgactacggccatcatcatctttctcttctcttccaccaacaacatttatgaaagaataa

SEQ ID NO: 23656 - DNA, 1563 bp, Cannabis sativa
gcaaacttggaattaagagcttcactgaccgtaaatgagtgtcaagcaattaaggaggaagatttaagatataacatgttcacaagaccctctggtgtgtgacaattcttagcagagaagaaaatgataaatatgaaactatgcattaatcaaatgttgtctatactgtaagaatgtcaaaatattaagcaagcctttcccttaaaaaagtagacaaattcagattactttcaccgctggtgattcaaaataacgcttaaatgtcatacaattctcatcagtttgtcagtcatggactttatgatatcccctattttaaaagctgttatttcataaagtttcactttcagttgttgaataagagtaagataaagaagaaaatatagaaccattgaaatgaaaaaaaataataataataataatgataaagaacctttcaagtgaaacctttctgttatgaattaggtcattataattggatggctcaagagtaatattcagatctgattttttggcataatcaatcattgtaggaaatattacttcaaatccaataggtgaacattgcttctcatcaatggctgaagctatattttcctctatgaaagacaagcctgaaacaagagaagggcatttttcattcaattttttatagcagtaagaagatgaagaagaaagaatgtatttcattgattggaaaagtggtacaagagaggatatatatatacagacacaaaacagagcaaacagagtcggttaggacccctaactaactcagacaaaaataacagctctctaactaatctcagtacaagaaacacgtgtacactacaccttacaatctaatactcccccttaaggtggagtgtaaatatcatacaaccccattttatctttgagagcttgaaactgagaaggcagcaaggctttagtgcaaatatcagcaatttgctctttgctggaagtgtgagatgtcttgataatctctcttgaaccttttgtctaacgatatggcaatcaatttcaatatgtttggtacgctcatgaaaaacgggattggcagctatttgttgagctgctttattatcacagtgcaacatggctggactttcatgctcaatccccaattccttgagtaaagatagtaaccaaatcaattcacaagtagtattggccatggccctatactcggcctcagcagaagatctagacacaatgtgttgcttcttgctcttccaagacacgagagaatcgccaagaaaaacacaaaaactggtggtagatcttctggtgtcaacacaggatgcccaatctgcatcggtataggccttaagtctgatatcagacttggggcagggtaaaataaaccctgtccaggtgttcccttcacgtattggaggaccctttaagctgcatttagatgagtagttttgggagaggcaagaagctgactaagcttgttaaccaaataagctaagtcaggccttgttataaccaaatattgcaatttcccaatgattttctgtagagagtaggatcggctagcttgtcatcactatcttg

SEQ ID NO: 23657 - DNA, 2016 bp, Cannabis sativa
ctctcttgggggtgaattttaacgctgataacttcataattacgtctggggtgtgagacatgacttgatatagtattgaattatctttgaaacgcaagttgtgtcgcatgaatcagatcaaaattaagtgtgttatggctattttactaaagacacttcatgacctagcacccaggttaaaatccaacacccaggttgacatatgatgtcaacctagacgctaggagagtgcaaaaatgtccaagggaggtatgttaagatgcccaagttatattgtgacatcacttagcctgattctacgttttggtgaagctggtcactagttcttagagatgttactgttttgtaaaaatgagagactcaaaactcttcatttctgggtgagtaggaaatgagaaatgcaaagttttgaattatttgacttttctaccttcatggatctttgttattgtgaaaaacttgacagacgatcaatatggcatcagaatcagataagcagaactcaacctaacagaacatttgtcaacttggacgttgggtacttactcccgagcttgagatcccatttttgatacttccaaggcttcagaacttgagaacgaagtctcctacctaattttgaccatttcatattcaatgattgcattgaatttagcctttgagcaattgaaggcagcatcccaagccaattatcaacttggtcacaaataatataatagaaacatcatggccggagtaaacaagttttccccaaatcatactagcgataaaattcattaataatatttgtcacatactatatttattaataaatatttggattaacataatatatatatatatatatttgttttgaaagtaatagtcctaataaaacttattatgtagacatattaatttaattcagactaatattatatgtatatatttaataaatacgcaatttttttttttttgaaatgaatactcaaattaattaatacatttgtctgcaattttttttttctttctaactaatatagtaatagataatcaaaaagaatttacgtgtgccatgcgtaaattcaattccatatatgtgagtgccactacaaaaagttttaattttattcaaaacaaaatttatatataacgaaaagtaaataaattattattaattataaaacataatcatatattgtgactaaaatgtctgtggctaaaagtattagtctcaaaaattacaatttattggaactaaatgtatttttagtcacaatacttattgtaactaaaactaaattagtgacaacttgtatctaattactatgtttttgtcacagagaaactttttattgagactaaaagttacatttagttcaaaaaattatgttatagagatagttattttttgtagtgtgggatatgcatcaaatgttacacatttatacgtagaatatgatagtgcaaaattaatttcgaatatatatgcagtatgaacaaaagatcgaaataccttcagtcattgaccctttctgcttcaatccacataagttttggatctaaagaaaaggaaactgatttgtgtgggtaatcagaatttcaagctctctctactctttttattagatggatttactgtattttacagaatgagtagtaagctcgaggagcgagaccctatatttatgtaggtgagacattctatcaaagtctctgccacaagtactaatgtcagaatattttgacaattaattcatgaaattaaatcgagaaatcaaatatttagaaaatcataatcttattagctaggtataaaatatcaaccaattaataatgactaataaatataaaaatatttatttgtgttaaaattaattaattcattttattattaaaatagaaaatattctaatatcaaagacaaacttgtaagtttattggaagaaaggaacgaggaaggagttgacattttatttttttggtatattatatattgtaagggtagaaaaaaaaatacaaaaggaataagaaaca

SEQ ID NO: 23658 - DNA, 2044 bp, Cannabis sativa
  modified_base (280)..(294): a, c, t, g, unknown or other
ggacccggacttgatcccagaccccggacccgaacttagacccggaccccgaccctgacccggaccccgaccccgacccagaccccgactcggaccctaatcccaacccgtagcccgacctggacccaaacctggactgacctggacccgaacttgggacccggactcgaaccccgaccccggacgcagacccaaatccgggaccgggattcgaattaaataatactaatacgatacaatacaatacaatacaatatattaatacaagtcaataccaaannnnnnnnnnnnnnnaataatactaatacacaatacaatacaatacaatatacgtaccaaacgagccatttgtcttctcttaagtatgccctttgtttatcccatataatattagagaattccacactaattaatatttcagatgaaattctatactttttattttttactatacacctccctatctacatatctttctttctttccttccttttttttttgagagagagaaaacatgaatttattaacaaatcaaatcaactgttacaggagtacttaagaatctaggacaagcatcaatccacaatttagctcttaaagaactagtaacagacttagccagtgtgtgggccataccatttgccaaacgcaaaatagcttgacacgaaccaccaccaacaataattaacagagaagtaatttcaacaataataggtctgaaagtaatattactagttggtgaaatcatccaactataaacacaactagaattaatttctgccttagaaataacaaaccccaaattagacgcccaatgcaacctcacacaaagagctaaaagctcagccacctcaacccgaaaattacccacacacctaatagcccaagccgcccacaccatagccaataacgagaactcctcccgagccatacaatcaaatagtacaactaacagttcaactagcggacctgcacgatgcttggatacgagcctccaaacctcattcgagtccacaccgggaccaatgcatcacagaataccaaagcatgttctagtgtctcctttgcttccccacattgctggcacacagaaacaactggtatcttccgtgtaattagttgctttgccacaggtaaagcctgatagtacattctctaaataaatattttgaccttctgaggcacattcaatgaccacaagtcattccaccacttacttaaatcttgcaaagaagcagccctagcttcactcaccaaatcaatagccaaattatccccacttctgaccgaataatttccattagaatcatagtgccaacaccaagtatctctggttgcaccaaccgctaacgggatgccaagcacatccaccacatccaaaggtataaagtgttgttttaaccttgataaattccaggatctgctgttatcaataaagtaactaaccatcaactcctcccccggccagcacgaaacagggcaaaatgacctaccccgtggtaaccagaggtcgtttcatgggtttttgtttgttttagatatgtgtttgtcatgtttgattttggtatatttaggctcgtatagctcagatctggattttttttaaatgtgacggtttaaaattgttacttgtagtgccagttattgccgacggtttcaaacagtcagaacataggcatactcgacgattttctactgatccctattctatctatagttttacgatggtagaataggcatcaatcaaaaagactgacgataataccatacctgatttttttagcaatcagaaaatcctctttttcttagtagtgaaataataaaataaaggatcttgttagtaacataaaataatataaagcttctctagtgtgaaccacaaaaaattcactgaggttagttcagtggtgagggaggaatggaaaaaaagtgagaacatcagttcgaacctgatatgtttaaattattaataaattgtaataccaataccttacacaaaataaaataataataatgaaaaatgtgaaccacaaaaaattaaggg

SEQ ID NO: 23659 - DNA, 7758 bp, Cannabis sativa
accatgcaacataaaaataatttctgatcttatattaattagtaaatctaattatattaaaatgggttttatttagggtattaaacccaacatttattggtcaagaaaagaaagtgtcttctgatgtccagggggagcaagattttgctcatggtcttactagatctacatctgctgctttccagggagagtaagttagtgtctgtgatcagaatgactccacaatagttagtgtccagggggagtcatccaatgctgctcaatcttctgctcctgttggtggtgttaccaagatacttggctctgttgtttctcttgttacctattccagcaacgagtgattatgatcatcgagggggagatattaagcatttaattttttgtttaaagactgtacacagtgttcatattttggttttagacttttgactggttacttgtgtttctttttgcaaatctttatcttgttgcttttgtgttagtcttttgctgtgtttgtgatattgtgtgtctctctgtcttttgtgcatggttgttgatcaaaatttaccaagggaaggattgtaagtgtcatagtttttgtatggaaaattatgtgaattcctggttgttcattttactgtcttggtctatatcattggtcatctaagttgtcatcaatttcatctgttctgtcttggtgacttttatattgtgccatgacaactttttgttcatttgtttatttcttgtttgagtcagtgctagctggatttagctatgttagttagttagccaaacgattctctttcaacgggatatataatattcagttgttactttttctaactaactctctcatctttgatagaatcgttcttgattcttgctctactagggaaaaatatatctcttgtgttttttgggttatatgcagatgaaaattcagtgaaaattcaagaggttgaagaaggatttcgaatctgcattgtctgaggagagttcaacagactgaactgctgaaggttcttcagctggttggaagcaaggagagcttgcgttcttggatctaagtgtgcttagatctcttattttgattgtgttgaagaattatgtaacatcgtgtaaaagtcatttcagattatatagtttgatttgtaaaatcagaattggtgtttgtaattgaattaattttatagtggatgttactttacccagtttttggaaacccatgcactactcggttggaatgcgttttcaatgcagaggaagcttgtaaatttggtgttcattaatttagttttcttgtctcaattgttagtaatatgcatttaagttcaattacgtagctatcgaagaaactataactttcaagtagtatatgttcagacccaatttggtgctgaaatagtttgtaaataatgttttgaaggaatacaatttgagtttattcattaaaaaaattaagttattaaaaaactatttaaaaatttgaggagccctcgagatttagctagttacttcatgcctctttattatggatgttgaatatagatttcagggtttatatagtgctattttcagatttcactctctattatagctaaaaaaaccctattttagagtttgttggggatacaggatactcgtattagtagtgttaagatcgcactttgggctatttaattttgctatgttttgaacaagaaaggatcataaaaatgaaaaatggatagagttggacttattaatctgtatgtcgatctcatgaatcgtaaaatagaaaataaaaataaaaaaataaataaaaatgatgtccagtcattttcatcataaataaaaggacatagaagtagttttcaaatattaaattcaaaagaaaatataacaaacaaaataaataaattaataataataataatatataattgtttgttgagttgaggcagtcaccgtggacgtgcgtgtttatgatgatgtggtagagagagagagtaatagggtttgagagttgagagatagaaggctaaaaattataaggtaatgatgaaagaatcgcattaaaggcggagaaactgtcctctatatgtgtgtgtgtgtcgtggaatggaaacccttcttctcataatctttaataaatacttattttgtcttcttcttgcttgtttctttgactcacactcatttctacttggttaacttcaaactggtggtagcaggtaacagggtctgttggaccaccgtcaccaccacctcagttccgctattttctctctctctctgctacaaaatattatatatatataaaacacagtccacagatatactactcacacccccggaaatcgaacacattaattcaagatactcaacgttttaaactatttattaattactcttattattttaagattcttctttagtaactgatcatttagattattaagaaaaatatatactgatacaattagcttttaattactttgtcagtgaccaaatcaatatatccaatccttttcaaacaaaaaaaaaaatatcaatataatcaatagggcttgtatattcttaaaatgataaagggctactccttgttatcaccaccacatcaattaatcgtctttaaaataataattttaataatatatccagtggggacttgtatgtattcatattatttttctttgaattaattctatttaatttttttatgagatttttttcagttttatattattttattagtgtagtgtgttagctaggtgcttcgggtttcgttttttccttgtttgttatttatttaaatggaataccgttttgtacaaacctaattttttaatatgtaaataatctcgacttaaaaaacaccactacgattgacattaatgcctatattctctctcctaaattaaaagcctctctctctctttctctctttcttccgctataaatttgaaaaatataagctgcggctttagctagggttttttcagagtggggaaaacaatggtgttgaggggaatgttggctggctcgaggctttttgcataggcagcaagagttttctattatccaaagaaaacaactgtgtgtaaaaggcttcggaccaggcttcattcccctcaaataacttgattaatatttcttcttcttattattataaaacctcaatctcttcaagcctttttcatctcttttatcaaacactatccttccagtacccctataaaaatatatcttgatttttatttattattttcttcgaatgtgaattaggatgagaggtatgttgtctggctcgaggacatggaggttgattctctatatgtattaatatatagcttgaaaccctaaatgattctcggaccaggcttcattccccccaaccaaaattttcttcttatacatacagatctaatattatcagacggaagatgatttaatttcttgtaagttggaataatctttattagtagtactacttttgttttcattaatattatggagttttgttttctgggctttgggatggacgtacagattttctctccttcgcaatttgattacttaatgtgttcttaaatttgaaagttgaggctatatttccgatctttgtgatagtacctatttgtgaccaatttccatgtgttctgactgtaattgccaaattgtgtgaactttcttgttttcttcaattagattatatatacatttttttaacgtttcctccttcatgttcagatcaggggtcgtacgtcttctcctatgtctgcccttgtctatgtaaaatatatctgaagattttttcaatatagagctttgtaatattatatatattatatgtcaaaaaacttactctttttaaatgatatggattacccttaatataggtacaatacatatatgttttctccatctatatgttgatcagatctatacaatttgaaaaatagaatgaactagtatagtatgtttgaagcagaggagattatagtggtaaatccttgtttcaatatacaacaatctctgtaaaatgcatacaactgtagccaaaatcagttcgtatcatcactcctgcacaataatattgttcactacaaatgcttagacgataaatcatgtattgtacttttaacctatcagaagtgaagttcttttctgccattattattagtccaactatgtttatctagacatatagctagctagtaattgtaggtctaactatatatacataaagactttgacttcgtatttcttgaaagaacttgatgatatataataatccattaaaatgccaaaatactttacaagtagctttagaaaggattaatgataaaatgtactagtgtcaaatgcctatcattggtacaattaaatataaattctcatataaatcaatttaataatttttaaaaaatataactaattggcactattatatacccaataacaatgcttatgtaaaaagcacatataatttctttttgatttaattaatgcttttcttttatgtttaaataatataatttattttattggttctttgaagttatcataatggagagatgatgagatgtatgtgtttacagtgtaacataactgtcgaaagttataacaatttgtttcgtagtgtactgaaagttgagagatgccatgcagatatttattgcaatggcactagttgctaggtacatgttacatcatatgttcacacaaacacacacacctatatatataaaaatttaaatgcaattttttgaaaaaaaataaaaaaaaagagtgataaaaagaataaataaatatttgaatagagagattatataccatcgatgcccacgcaaaagcagacacagagatgcgcttatcagcaattttcgagaaatcaattaaattgcttctatacataattttttgggggacaaaaatgatgctatattgtaatttttatctgaactttgaggcattgtacgtctaaaacaatatgaaatggtatcttatgaatagtaattaccaatcctataatacttactaaattaaattaaaatgagtaaatcttgatatttcaaaatacactaataataatgagaacatttttattagcaacaaataattcgttcaatagtgcggattttctctctttctgcgcgctttgcaactcacctttgagtgggtgccatggcataaacgagggcaggaatgtggggaaatcgaaaatttcaactaagaaaataaaaaagaagggacaattgtcgactgcggatgctaagaaaacaaaattcatggaggagattcttagagttgagcccatggaactcacaaacgaagatgaagaggaaggaaatcaggatctgttgcgtgatcttttccagcctccgttaacacctaagtcctccttgaaatcgattctacagcatgaagagatagctgttgattttggacactttcttactgcaaataaggagtgtcaagattctatctcgattgggaagaagactattcctccaatactcagatcaggcaacgttattagaagtctggaaggctcattttctacccagaagacagagaagaaagtgcgaattacagaagaggatatagaagaggagatcgcttactggaattcatcttttgtctgctacgtacttggtgcgaatccccctctctcggtcctggatggctttgctcgaaggatttggaaagacaaggtggataaaataggtatgatttcctacgacatcttcattatcaaatttaaaagctatgaaataagggatgaagtattatcaggggggatacattttctttagtaagaggccagttataatgaaagtttgggatctgaattttaatctcaagaaggaggactttataactatgccaatttgggttcagcttgaggatttagaacttaaatattggggcaagaaatctctctttaagatcatagggcagattgggaagcctattatgatggatgatgttaccaagtccagggacaaacttacataacccagggtactgattgaagtttccatgaaccaggacttccctgatatgatctattttgagaataaacatggcagtgatgtttcggttggggtgaattatgagtggaagccaatcatttgcaagcattgcaatggtatggggcataacacagaagaatgtaggaagaaagtaggtaagaagaaaaaatgggttgtgaaggagaaaaggaatgagaaaccagcagaaactaaggggaaagcagtagatgaagaaggtttcagacccgttacaaaaggatggaaacaaaaaactcagcatatagtagcagaccctcaaacctcaaatgcttttaatgtgttagaagaaattgcaggatacatacaggaatatggggaattgaatacagaggaatggcctaaagttggagacacaagaggagggggagatcctcctcttacacatggatagattactcatctggaacgtccggggaatcaacagtcctcaaaagcaacaggaagtgaagaaattaattaagaagcataaattagggctggttggtctcctcgagacgagagtgaaggctccaaagcttggagccttgtatgttaggatgtttaataattggtgttttacaacaaacattgcttcggcaaaagggggaaggataattgtggcttgaaatcctgggagttacaacgtcgacattattttttgttcaagtcaggtgatccatcttcatgttacaaccttagacaatagaaacaatttctatgtctcctttgtctacggttttaataatgaagatgggagaagtttattatggaaggacttaatagagttaaagaggcaggatccatggatagtccttgggaactttaatgatattttggaaaaaggatagagaattgggaaaagagagcactatgccattccaagtttaaggaatgtgtgatggagtgtcaattggaggatgttaagcaaagtgggagtttcttcacatggaataacaagcaaaaagaggaagatagagtatattcaaagatagatcgggtcacggaaaattaaaggtggttggatacttatgagaatgctgaagctctgtttcttaatgaagggctatttgatcatactccagcactattgactgtgttacctactattcaaaatggtaggaagcccttcaaatactttagaatgtggtctagtcacctttctttcaaacaaaaggcggaggatgcctggaaggttatggtacagggaacaagtatgtttcaagtagtgtcccaaatgaaggctttgaagattgttctcaagcagttaaaccaccagtgtttctcggatattcaggctttagatatgcaggccaaggctcatttggaggtttgtcaagaagatatacaaaagaatcccagggaccgggttctgcaacaaagagaacatgaggccagagagaattatcaagaggttcataaagcatacatttcattcatgcaacaaaaatccaaaatgaattggatcaaggatggggatacaaatacggctttatatcactctagtttgagggagaggagagttcaaatgagaattatttctattgttaatgttagaggtgacagagttgacaacccaaaagaggtagtagaggccttcttacaatactacaagtaactacttggaacaaaaatgcaacaaaggaaaaaagtgcaccagtgagtcactacagagggacctgtggtaactagagtacaagctgaagccttgctagctgagtaccccaatgaagaaatt

SEQ ID NO: 23660 - DNA, 7474 bp, Cannabis sativa
cctccacatctcatggacgaagcaagaaaagagagcctgaagtagttggtcccgccggcacccaaaatgaaggcaattatgatggtgccaccacaagcagtgatgctgctgacatggctgctgttatggtgaccactgcagccaccgtgtcagccatgcacgccaacgatggcggcagtactcatggtggtggagatggtggtagttctcatggtggtggtggtggtgatggaggaggtggtggtggcggttgatgtcattgaaagtggtggcacctttttcgtatctggttctattctataaataaatcatcatcattatcaggcgtttgattggtcaattgaattggaaggagtgaatgtgtataataaaggctaatagcatctatttttttttggtttggtgtgtggtgattggtacagcttgttgaaatttctaagagtttatgagattataatcagttttcgatagattattttacacctcatgcttttactagatttgctctattggacttaagcaaacaatgtttttttcctttttccattattcctctacttcttcatctcttggtggtctttttcaatacattgtatttttatctctttcgttacttaatttgtaccaatatatttgaagtagaggaataataatggtaatgtcgaggtttgttgaagttaaatctttcaaatttgaattccactatccaataaatatttggttgattggtttatatagggcttggtaaaatgatgctagcggctagcgcaatcaacagctttttcctacttaaaatctttttatctattcatttcataacacttgctcaattagatttagaaggaagaaaaccatattgttttaagctctggctcaccaagagatcattactcttatataggaatacttttgggtgggaaagagcattgatttgagtttgtaacctcagacttcttattatacatctcatcctattctattatcttaattagagaagattatttgtatctttatttcatgagtttgtagttgcataagtaagcatatcttcttcgtagtggaaacagtttttggaaaaactttaataggttgtaggtcacattgacagagtcaatatgcataaattaattgttgttggaaatttatgcactcaagatccaaactaaaacaatcagtcactacaagaaaattagttttgcgccagcaaaagtttagaattgcaggtaaacttttgtcaacgaggaacctcaccgacaataaatgggcgggaaaagggtttatgctagtgaatgtagtgatttcatcgggaaaagtcacttgtctcagcgagtgaagttgccagtgtaaaagtagtcgctagggatgtacgaaaatcttggtaaaccgccaacccgaataatcttactaaacaaatcgacaaaaccgataaaaaatacaaactcacataattggacaaaattataaaccgtccaattagtaaattgggcgggttgacttttgacccaaaccgcccaattaaactgccaaaaccaatttaatccgattttcttttttttttattatatatgtattatataaaatataataatatataatatatattaaaaaaaatctcaccctaaattttagtctcagcccgcctctttctttctctctcgctcgttaccttcatcttctcagcctctctactctcagcccgcctctctctctctctctctatccaactatcatcctcgcgtgggcaaccatcttcatcctcgtgtgcggcagccatcactgtcatcacctccggcgtaacagcgagcagcgggagaggaggcagcgtagcagcaccaccagtcaaccacccaacctccattgtagcagctttgttggtattatttaagtttaacatattttttttttattttttgaacatttattttacttttagggtaatggcttttctaaatctaatttgagattttaaattgtgattgaaaattgaaagcttgctacagaaaaacaagtgattaaactagacattagtttttttatttttatcgcttgctcatatatttaactgctcctataatatgcataatttttactttaattcctcattcctgctagaatttatttaattatagtttgagtttctatgttgtcctgctgagttgttcgtattggttttaacttttggattaatgcttaatttggactcttgtatttcttattttgaatgtttggactttagacttttgtgttttattatggtgatgtgaatttggatttggataattgaatttagatttggaatattatgtatttatgtggttaatttttattttaattgaatctaaaaaaaaactcttaattcggtttgggcggttaacccgcccaaaccgtcagtcgggttcagaatttttttattattttttttaaattgggcaggttgcatgtagaattttacaacccgatctttacgttgggttagaaaatatgtagtataaaccgactaaactgaccgatgtacaaccctagtagtcgacatcattgccccgacggctaagctatttctgctagtttttcccagcgagctaagttgccagtaagaaattctggccaattttttttacttcgcgcaaaagttttgtaggcgctagtaacttcgccaacaaaacattttggcagtaattttgtagggcacgggtaactttttcccgacgtaagtaattttgttggcaaaacgtttatttatttatttttaaatatttcttttgagattataaaatataatttaaattaaaaaaagaaattcataaataataatacaataatataatcctgatcacatattataattagaaaaatttaaagtaaacattataaaagtaattaataagttgctgacacagtttataaaaaatagcaataaaatataagtcacactataaattaacaacattatcgtcatcatcgtcgttctggctaggagagccgacctgtgatgaagagccaatgccaggagtaggacgtatcggtggaatcagagacatcttaggcaagttgaagccaggcacgatgccaaaaaaaaaaatacttgaactattcttgaaacgtatttatgtattgattatgagtctgcatcatttacccttcacttcaacgcctcatattccttgatgctaacatgagggttgcctagagggacttgccctgggagtttcctgtatgaatcttgccctaagtctaggcaaagggcgaatgcctctcaagtggcatgatgattcaccaagcacctgtgtcatagcatacctgtctgtgggaaattgggtgagttctacattgtactaatgagtgacattgcttagggcaagttgagttttgcgtatctcaaccatttaggcctacaaaaaacattaattgaatagaaattaaatatagaacgatatgattaaagatataaaattacttgcatgcaatcattgtgtgtattcatcgtgtcaagtgttgttcttgaggtggaacttctcaaaagttttcatggcacatggaagttctctcgtctcgggattagcatatttttttatatataaagaattagtgatatattatttaaaaacttattagtttttgagcaataatatttatagcaatacaccccactgacgatgtggccgacaatggtcttgaacccccattcactttgaatcttcatttgacttcaattttttgcgtcttgttcggctcttcactgtaattcaaaataaatttattttcaactaaatgcgcaaaaacgcattagttaatagaaattcaattttagaatttttaatttctacctgttgttttggtctttccagtaacgatgaccttttcccacacttctcgtgtgaccccttgtggacatctcctattcgcctctacctctcccaatttcagcaatattcttcttccatgtctttttcatgttcaatctccaaacccgtatcccttttgatattgctaacaaaccgtagtctaaagatttaggattgtcaagtgagaactcaaattttgctggaaaaaaaaataaacattaaagtcatatatattttttgtacaataattttatttaaagtattatactaaaaattaatgttaccactagtctatcccaaatagactgaatattggctttgtcaacgctttcccaagtgagcttattcatgggaatggtgttgcgaacaaagagcttgaccatgttattaaacttgttcccatagtcgtgtatgggggcccgagtctccggatgccatcaaaattttaatttctgtcccgtagcctgcttggccagttcttcttccatatttttccctttgtatgctcctctaacttcctttttcttactgtttcttgcacctgtgccaaacattctacacatacaagctatatttattaataataaaaaagtaattacaatcataatcaatttattagaaaaagaaacatgtatttgatataattaatggtgggttaaaatattacaatattttaaagtccacaagtcatcataatcatcatcctcatcaccatcattaagtgttacattattttcatcatcactaccactagtatcttcaacatcactacaaacaatgaaattatctaaattttgatggtcatgatgcacacacagtccatgtgctgtggtcacttcagttgggtcgacatcatcacagacatattcgacataggctagtgtgtggaagttgtacaactaactagattcctgaagagtttttttttgtatattcgcgatttgttcatcatccacatctgagaaatcccacacattatgcgacgtgtaagcatgacaagcttccaatcatctccattcttcacttcgagaatgtaatataccaaattttcttgggatgtaagtatgaatggttcattttgataccatccacgggctacccagatgctagtgaaaaaacgcgataaaaattcttaccaccttcaccaggcatcaaaatgccactattttggatgttacaattgtcattctggtcctcaactaggaatttaataccgttaacaatacatccataataataataaacaacgagaggaatttgcgatggcgtacaactcatctgatatttccctaaggttgtttgctcaaagttgattaatctatcattgagttagaaatataataatactaacataaatcatattgaatgacaaaattagtagaaagcgatacttactcgagacttgaaccaatcacaaaacttgttctcttgaattgtgtcaaggttttgatgatccctaaattgtagctcattcatatccttagagcacaaaaatagatttttgtaagacatggtcgtgggtgaaatgagtgaattaagaatgcaaaaaatgtcttatttgaatacttctctactttaatacaattattcagtatgtaccactttgccttaagcttttattgtattggtagaaacaaaattatcctcttaccaataggtctctcaacatgcttgaatacggagaattccctttcaagcttatttaggaggacatcactatttcgatttttcggttgaatcaagtttcaactttccgatagtacatagaacaaaatcttagtgcctcgtgaatcacataagcttcacaaatagatccttttagtcgagaatgatttttgacttggcctcaaaattgactcacaatctagtgtaggagttcctagcaaattttgtgcaaattttcttatttttttgttgtaatttaattagacttcatttcttgtaaaagaagagctcttctagctcatttttcacactttactttttctctaccaggttagagcttgtctctcttcacactttctctctctagaaattgtgaagcgaagctaaacatagtgatttttctaagttctcttgtaagtcaattaacttttagtgataataaaagctctaagtagacgtaactttattaccttcgcgataaggagagtgaactactataattgtggtattttatttttactttctatacatatattcattggccaccctatcgcttattagacggtacagagttgatcgcttttcagtattaacactttactaattgatttcattctctgatcatagccttgtggactagtagtattcgaaaaaatatcgataccacgtaaattctcttatgtcaaattttacttttttccaatcattttgttgtttcaagttatttctatgtaaccaagttattaatttgttaccgcaaattattacagttacaatttgttttttattattgtataaatagattattattattattattattattattattataaaacatgtcttttaacatgcatttagaacttgtattagtagttacataacaatttagaccatctccaatccaagatgtaaatattgtataaaatttgaaacaaaaaaatgaacaaactttatatttaacacaatatttgcaaaattttaaacggtaaattggtctaaaaagtaaaatatcattaatgacaaacaataaattaaatattttaaaaaattactagtggcaatattgtaaataaaatatatttattaaagtatttcattgatgattaatggtaaaagtgtaattaaaaaagtagcatttattgtgtgtcaaatttggcacaatgctatatcttgtgctaaattttgcccaatttttagcatgtgctaaatttgatacaatttataacacactattagagaaattttttattgaaaagtgctaaaaaataataatacaccacttatttagtatttcattagagatgctcttatcataagaaacaacccatatcgccatagccataacaagaagaaatggttaatgtagcttgctttgattaaaattagattttccacttttagtaattaaaggttaaatacccgccattacagtccattttcactttgaatttattgtccaattatacattaaatcttatgtttacagagtttacatttatgataattatactataattaggagagtaacgaggacttttatgccagttacacacacttgtatcaatcaatcgccatatatatatatatatatatatagatagctaatattttttttactcaacttatagatagctagcattcccaataaaattaagtgctaaaagagtgatgtattgttatatcttattacacttaaaaaattacaattccaatttccaatgatattctaaaagtgtcaattttggtacgctaaaaattatattaaatttagcacaaaatataatattatgttaaatttaatatacaataaattttacatttttcatttattataatattacttttatcattcattaacttttacataattttattttctttatttattatattattattatcattatcattatttaagtaataaaaaaataaaaataatgaagtttatatatttttaataaaat

SEQ ID NO: 23661 - DNA, 6692 bp, Cannabis sativa
  modified_base (260)..(280): a, c, t, g, unknown or other
  modified_base (597)..(597): a, c, t, g, unknown or other
gtttggatctgagttcagtttcggttttgggtcccgagtcaaggtttgggttgggatccgggtctggctccggctcccaatttgggtctcgatctgatttggagaccgggtcctggtccgattatggttctagatctaggtccaattttagttatgattccaagtccaagtcctagttcatgtcccagtgaacttccggttttggttccaatttttggtcacagggtacgggttcggctccacttttgggtttgggactnnnnnnnnnnnnnnnnnnnnnttcgggtccttgtcagggttcggctccagggctgggtcccaaatccaaacaccgactatgggttttgtccaagccttggttccagatccgtatctcaatctcgggtcccaatgttctggtgccgagtcacgagctggatccaatgttcaagttcaggttttggttgggtactaggtccgggtcctagttctgtttccatggtccttatcctgattctggtccaggtctcggttattgtctgggttttggtcctggtctaggtttgggttcgggttcaagtcctaatctcggttcgggttttggtttaggtcctggtnctagtcctagtttggttctagttccattttcgattctgagttcgagtttgggtttgagtttaggtcgaagttcgagtcctggtctgagtttgggttcgggtccggatttcggtctaggtccagatcaggctctgggtgtgggtttgcgtcctgggtcttggtctatattggctccgagtcccaagttccaatcctgatctgagtctggattcagttttggttctaagtccttggttctgatcctgttcttgtttcgagtttcggtccgggtccggctctagctttaggtctgattctaggtgtgggtttgagttttggtcccgagttcgagtccaattttggattcagtttcatgttcagttttggtccttgtttgtgtctatgtttctgtcctaattttggttcggggtaggttttggggccgggtctgggtccaacgtcgaattcccaggtgaaggtcaggtcctcgttgacgttcgggttcgagtctcgaatttttatttttgtttaggttctcgggcctaggtctgtggtctaggtcccctatctaagtccggttcctaggtcctagtctgggtcaaggttcgggtttgggtccctagtcttggtttgagtccaggtcatggtctgggtttgggtccaggtttcggtcccagtcttcagccgggttcgggttctgttccttgttaggttcttgatgctggtttgggtcccagtgagggcttaggaccaggccaggtccatgtcccgatccaggttcttgtcccaggtctcaagtcccaatgctactcaaggtctcggtccaggttcttgtctgagtttggtttatggtttgggttcagttttggtctcaggtttgggtcctaatcacagttccaattctaattctttgtcctgcatcgattccgagtcagggtcagagtccaggttagggttggggtctgagtcttagtctgagtccgggtacgggtttttcggatcccagactgggtctaggtctgagtaaaggtcccatgatcgggtctaggtctttgtttgcgtctgggtccgagtccaggtcccatgtttcgatccctgtttgggtctgggttagtattcggtttcgggtttgggttcgtgtccatgaccaggtccgaatcccaatctcggtcaggggtttattctgggtctaggatcgagtctcgtgttcaggttggggtttgggttcgagtcttagtcctagtgttgatccgggaccggactaggtccgagctcaagtttcagggcttggttatggtctagctcgggttcgagtcctgagtttcgatctaggtctgggttccgaggccaaggtctaggtcccccatcaaggtccgggtcctctatcccagtctaggtccatgttcggggggttttggtcctagtccaagtttgaattttgattcagtgtctaggttcagatttgggtctgagtctgtgttgcggtctgagtccttgtctgagtcttggtccgggtctaggtgtaggtcgaaatctcggtctgggtcttggttcaggtccaggtccgagtttcggtcccgagtgcgggtccatgtttgggcatgggtcagggtctcggtcaagatctaggtctttagtttcaatcccagtttggttctagatctgcgttcgagtccaagttgtatctgaatccctatgtaggtctgagtctgggtctaggatcgggtcccggctctaggttcaggtccggatcttggtcccagtctgggtacacgaccgtgtctcggcctaagttccagtctcggtttgggtcttgggctaggtctgagttcggttataggtctgggttcgggtcctagtcacagtcgtagtcctgttcgagggtcctggtctgccggttcttgttgagattcaagtttcgggttctaggtttaggtcagggtccgagtttgggtcctggtcttagtctcagatctggatccctatcacgtgtcccggtctggttctggttcaggtcttgggtcccaggtacgagtttggtttcggggccttgactgtgttgcggttctaggtcccgaccctagttctgtgtcctgagtctggttccatgtttgggtttgagttcgggtctcgagtctaggtttgggttgggattcgagtttgtgtcctggttgcggtctaggtctgggttggagtccgggtcctagtccgtttctgtttttgggtctaggtccaactccggctacggttcctggtctaagtcaaagtccgggtttcggtcccgttctcgggtcctagtctacttcaagtttcggttccaatttcgggtcacaaggtacgggttcaggtccaagtttgggtctgggactgggttagggtctgagtctgtgttcgggtcctagtctaggtttgggtacggggctgggtcccagatccagacattgactaagggttcggtccaagccttgggtccagatccggatcccgatcttgggtcccagcgtggttccatttcgggtggtgggtcatgagctgggtactaggttcaagttcgggtcaaggtcgggtcttaggtcccggtcctagttccgttccacaggtccctatcccgattttgggtccaagtcctccgtctggtcttggtttgggtccaatctaggtttgggttttggtcccagtcgcagtttgtgtttggttctcggtctgggttattatatggggttaggttcgggtctggtccttgtttcggtcttggtcctagtcctacttcggttctagttttagttgcaattatgagttggagttggggtttgagttcgggtcggggttcaagtctgtgtctgagtttgggttcgggtctgaatctatgtttaggttctgatcgggctccgggtgtggtttagtgtcttgggtgtgggtccacgttcgggtgtgagtaccaggtttcgatctcgatttgagtccgtgtttattttcgagtctaagtcctgggtttcgatcccggtttgggttcgagttcaggttcgggtgcaggtctaggtttggatctgattctgggcatgggtcttagtttgggtccccagtttgtgttcgattttgggttcgggtccgagttcgggttttgtcctggtgtgggttcgtgtctaggttcctgtgcttgttggggttcagggaaggtttcgggtcttggtctgggtcaaactttggattgctgggtccatgtcaggtcctagttcagtgactagtcttggattcagatcttggtctgggtttcgtggtataggccctggtctaggtcccctatccaggttcgggtttgggtcctgagtcttggttttagtccatgtccctgtccggatttgtgtccaagtctcgatctcagtcttggttcgggtccttgtcagggtgttgatcctggtcagggtcgcgggtctcaggtctcggtgagggtttaggaacaagtcaggtccatgtcccggtccaagtctggttccaaggtctcaggtcctaatcctagtcaaggtcttagtccaagttctggtctgagttagggttacggtttaggttcggttctggtcttaggttcgtgtcctagtcatagttctagtgctaattttgggtctgagtttggttctgggttcgtgtctgggtccaggttggggttggggtccgagtcttagttcgagtccgggtacgagtttttcagatcccagtctgggtccaagttagagtccgggtccagcttcgggtcctgggtctgggtcctaggttcaggtcagggtctaggtcttggttctggtccaggtcccgtgtttcgatctcggtctggttctgggtcggtattcaggttcgggtctaggttcaagtccatgtcaaggtctaaatcctagtttaggtcaggggattggtctgggtgcgggatcgagtcccgagttcaggtttgggttcacgttcgagtttcagtcctactctcggtctggaaccgggtccaggacttagtttgagccttagttccgattcctggtgtagatccaggtcgtgctccaggtcctgatcctgttgtatggtcctggtcacgttctggttcaagtttcggtttagggttcagggcttaaggtttaggggtaagtataaagagtttaggatttagggtttaaggtttagggttcgggtcacagggtacaatttaaggttcaggtgtggatctgggtccgagttctggtctgtgtctaggtcggagtcatgttcccaaatccaaacaccaaccacatgtcgagtctagttcgagttttggtagaagttcgggtctaggtctgggtctaggtctgattcaatgatttagacactgactatgggtcgggtgcaagcctcgagtctttggttccaagtccaaatcaatatcctggtccatttttagctcatgtcttgggtcttggtttagctctaaggtccaggtttgggtctaagttagggtcttgggtcctgagtcatgggtccgagtccctgattcaggtcagggccctaggtcccgatctaggttagggtcccaatctgagtgtaggtctcggtctgtgttcggtactgatgcttgtctcgggtcttggccttgtttgggtctgggtctcgctttgtttcttaggtcccggtcctgggtctcactcccagtcccgggtcctggtctctgtcccagtccgagttctcgtcccaatccaagttcaggtctcggtcctagtccaggactaggttccaatcctaatctcggtccgggttcgagtcctgtgttggagtccgagttctactacgagttcgggtccaggtcttggtctgggtccgggttttagcccgtgtctggttccgggtcttggtctgggtttgggtttgggttctggtacgggtctcggttctggtccaagtctgggttccgggttcttggtcccaggtcctggcgaaattctgggtcttggtgcgggtatcgatactagtctaggtccaggtccgtgtttggtttcgcgtctagatcttgttttgggaccatgtccaattcttcttccagggtcttgattgcggttcttgttctgattttgggtctcgggtccaagtctgggtttgggtcctggtctagaaattgttccaagtccaggtcttggtacaattccaagatctagacaccgactacaggttgggtccaagccccgagtcgtgggtcaagatctacatcccaatcatgggtctcgatctcatttcaattcggatcttgggtcactgtccgtgttcgtgttcgggttcgggtttgggattgagaccgggtcgggtcttgggtcccagtcctagtattgggtcacgattctacttctaattttgagtttgggtcctcaatctaggtcagggtcctgggtccaactctgagtctccaatccctgtttcgatcctaggtccgagtatgggtccaagtccgtgtctgggtttgggtacgtgtcccgagtcccgatctgagttttgattcgggtccgcatctcggtctgggtctaggtctgtgtcctagtcagattccagttctcggactcaaacctagactcggacttggacccaggtttggggtacgggtctgggttcgggtctgggtctgggtccgagtccggttttgggtcttagatccaaacactgaacacaggttaggtccaagcctcgggtctagatctagataacagtctcgtgtcccaatctagtaccagtttgggtcccaggtcccagtctaggttctaaatcaaggtcttggtctggggtccggtcctaggtctcggtcctagttctgatgcccgtgtcccgagtttaggttccccatctagatccgagccttaggtctcggtccgagtccaagaccaggttggggttcaagtccttgtccgagttagggttcaagttctaatctcggactgggtccagatctaggttccaatctagatccacgtttgggcatgagtcccgagttccgatctgggtctggttccaaggcccatgtaatatcccgagaattatattgatatttatttggccatattttattaaatatgtgattatgtgggtattagagtaggattataatcctacttaaacta

SEQ ID NO: 23662 - DNA, 2388 bp, Cannabis sativa
tgtattatttttttcataaaaaaataattatgtattatttctatctttaattttatataatttgttctgaaatttgagggtgggcttaagccttctttaggctctatgtatgtctgtctatgactatatatatttatttttaaaaatgttaaaagataaagtgatgtttagtattttccatagtgttatattgttattggtgcaattaattatcgagtcacatataatttaatgtaataacttttatgaagtatcgctaactaattataagatgtcacctctagaagacaccaatagtacaatgctcatttattttgatataaattttggtatattgtattttaggtgacatttagtataattttcagtatgtattaaatttggtccacagtaagttgtagagcacgtcggtaaaaatatattataattcatattattttgttttgaaacaaactgttaatcctgaaaattagcaagactaactcccaagattagtcgacgcttagccaaaagatcaatagaagtgtacccgaaagatcgctctgaatgcatggttatgcatgtcaggcatggtgttatcgctagaatttgcacaagaagaattccattatacctattgggaatcgaggaaagacaagcagaacatgaggcgacgggaaggccccctgcactaggtccccagcgctagggttccctgccccaggccccctgcgtcagggctctctgcgccaggctccctgcattagtgtcttttggaccaagacccccgagaaccaacgtatgttgcaccaaggtcccatgcaccatggtccccctgcgtgggttccctacatcaggagtttattttggcacactaacggtttttaaggttgttctttagtgaggaatggagtttgaatatttgaccctctacaaattaatcagatgataaaagacatacacaaaaagaaggtacacatcattgacccaccacgctggtaccacaaacccgtatcgctaagtggggaccatcatgcgtgcttaaccatggcgcttggcaaggggtggagacaaggtttgagcaagtagttgacgtacacacctagagcacatagtacactcgaccaatgatacgctgcaggcactacactgcaaccattattttaaccactgtcacctgacctacgtataatagactaagttgtccctttatggatcacatgtaatttgagccatgagagctccactataaataggtcttcacctctcattcataggggttggaaaatcattataagatttcactcttagaaatacaagcacttcgcttcctccattgttgcttggaacatttctttaagttcttatattttaatcatcattctaagtcgtgtgtttgagttttgattttttggccataattgttgagagttttcactgtcaacagtttggccggctcaggcttcgttgtttccttacttacctttattgcaagatgcttagacactcctgttgtctttaagacatcgagattcacctagagaacactcagttgatcacctccagaagagagccaccagcacccatcgttgaaaaagttgaccagaatagccaaattcctcaggcaagaagagagagcgaccatcttgaagagaatctggcgagcacgcgccaagatggagtaactccatccatcaccccagttggtgaaaatggtctgtcaaggcaaagagtctcgtcaccgataaggcaccctccaccaccaacaccacgagattccagtacctcacgccatcgcctcaaaaaatagaagtgagtatactctgtgagcttaagatcccaaactcaccactatgaagatgagataaatgatctccgctagaagaaccaaaagctagaaactacagtggttggcatgcaaaaggtgttgagtgaaatactcaaaggcaaaatccaagcctcacactttttgtacaaagcccccagcaagagcacggggtcctaactgcgcctattggtggaggtaactccatgtcatcaacagataacacccctaaggatgagagtggaaaagggcccatccttagacaaggaccccataggtcatacaagacaagattgtaatgagggaaacatctcgtgatcttataaagggacttcaccgaaagagtctcacgatgggggcactgtgcctgcacccccctttcaagagaaaagcaaacgaaaggttttatccttcaaccatggtgggaagccacacaacgatgggattgttggggtgtatgccttaaaaacaagtattcaatggataatatattatagaatatatgaaatgcaattataagataaatgaatacattaattatataagtataattaacaaatatctaaaaatttcttatttatatg

SEQ ID NO: 23663 - DNA, 5993 bp, Cannabis sativa
  modified_base (4810)..(4815): a, c, t, g, unknown or other
ttttttattttataaaaaaaatatctattttgtcatttatttatgaaccttctgtttgtctttttattaaagttgttgatcaataatatatctgaccttttaataagtaaattaaataaaaaaatatatatgttaaatatgggaagatatttttatggagatttttttttttatttttacactttaaaactgttttttttatgaaattttacgtagaaatctctattggaactagcgctgcaacttaaattgtaacaaaaaatcgtatagaaactcctattgcaactagcgctgcaactattatagaaactcgaacagtaaatttaaaaataaataaataaataatatttgagataattctcctattttttttacatgggaagaaagatttttttttttttttaaggaagaaagatattaatatgatgattagatatactcataattgttttgatttgcagttataggaacagcatttgcattgaatattttgttcaatattccagtttggggaggagttcttttgactggttcaagtactctcctactccttggtctccaacgatatggggtatataatctatatatcatttttttttcattaattagttcattatttttaataaaaaaaaaaatcagccaacaataacaaaggaaataaaaaaataatgtaattttgaattctaattatttttagagtaaataattttttgaatttgtattttgtaaaagttattaattgaactttgtgttttgtaaataaaaaattagactttgtattttttaaaataatattaaatagtaattttttttatcaaaataaaacttaataataaatcaatctaaatgtgttattataaaacgagttacgttttctgtatctgttcgtcttaaaaattagcttgaagttagtaatatttaaaaaattatctaaaattaagctcaaaactctatttataccatttttaaaaatactgattttattttaacatttaacaaaataaatagtgtaattaataacttttacaaaattatgatctaaaatagtattaactattatttttatatagtaatggaaaattattttaaaaaaataaaaatttctacaaaatattcaaagtcggtcctaagttttaagatacactaagcttgcggctaaagctcacataatttagggtacgggccttaaaaaaaattacacatatctatttactttttagtaattttttcatacactataatattttagattttttttttcatggcccgcaaaatctcaggactggttgtctcttactcaaaataacgataatagtaataataataatttgaacaggttcgaaagctggaactgcttatatcaatcctagtgttcgtaatggcagcttgtttctttggagaaatgagttatgtgaaacctccggcgtccggcgtccttaaaggcatgtttattcctaagctctccggccaaggagccaccggtgatgccatcgctcttttgggtgctcttataatgccgtcagtacaatttataatatcaagtttcacatattttaatttaaaataatacgtaacaatataagtatcattaatattaatataactaatattattttacaggcacaatctttttcttcactcagctcttgttctctctagaaaagtacccaattctgttcgaggtgttaatgtaagtatgttgttctaataatatatagaagtaaaatttacaaaaatataacttagttttgagtaactagttaccattaggtaataaccaaaagggtaactagttaccttatgttattttatttccctctagatatatatattttttaatctcttcatcaaactcataaaatatgtaatgttcactaatatatatttaattatttatatttttttgcaataataattaatgaatgaattgcaggatgcatgtagatatttcttgatagagagtggatttgcattgtttgtggcatttttgataaatgtggctgttatatctgtttcgggtactgtttgctctgcttctaatctctccaatgacaattctgatcgatgtagtgatcttactctcaactctgcctctttccttcttcaggtaaattaatcttaattcttaattataaaattaatttcattattaattactattatataatttatttgattcaatactaaactttatatcataaactaacttaattgatcaactttaattaacttcatttataaattttcaaaccacacattattgccttcaatttttatgtttttttaagaaaaatgaatgtaatcttttcttagtttagtccctagctatggtttaaattcttatatgtatgtcccttataaattttattaaattgacttttgaataaaatatttatggatatcctcactgtattaaaaacattattttggttgatgttattgtcaatgatatcttctatttatcggcttcattgagttctttgttctttaatggtgttttttgaaactattttttaaaaaaaatatcttaacaaaaataattattgtggattgagctaattttaataatgagataacaaaatgcagaatgtgttgggaaaatcaagcaaaattgtgtatgctattgctttattggcctcaggccaaagctcagcaattacaggcacttatgctggacaattcatcatgcaggtatatattaaatttagaggagtactaattataattttttattataatctcttagttaacttttaaattcgaaatcacatattggaatatttttttcaattttttttattgtgatatttgttatagttataatatcatctttataaatttttgaaaaatttcgaatattttataataccgaaaatagagttctttatattttagtgtaccacgtgtgttcaaaaaactttaaacctattttcagcacgctaaattattcgaaaattttcaaaaatttatagagataatgttttaaatataacgaacaccaccataaatttttttaaaaaagaaaaattcggcaagtatttcgagcacaaaaattaattaagaaattgtaataggaggttgacggtaacacttctcgttaatttataattcttaacaattatttatacaaaactaaattattcttgtaacaatattaatttttgaaattattttaatagggtttcttggacttgaaaatgaagaaatggttgagaaatttattgactaggtgcattgctattactccaagtctcatcgtctccattattggtggctcatctggagctggtcgacttattattattgcttcggtttgtttcatatattattactctttttttttttttaattataatgataagaaaaattaattcttatattttaaatgaaaatatataataattaattcttcattattgtattttttgtttgcagatgattctttcctttgaactcccttttgctctaatcccacttcttaaattcagtagtagtgccaccaaaatgggaccttacaagaactcaataattgtaagtttttagatggattaatataacatgttacgtgtttaatagtatatgcaatttaatatcgatattttatattatgttttaaaatatatatatttatatataaaaataaaatatgtaccaaatatactacatcaattaatataacaacattatttaaagagataatttcaaaaaaaaaaaaaaaaaaattaaaaaatacggtatttttatgtttgactgaaaattattatcacttcactaaatataatattttgatacatatttttttttgtacacatatacactaacatatcataactctttttcttatgtcttcaaaaatatgaatgaatatatcctttaaacatagtttgagatttgatgtaatttgtgtttggttaccaattcaaagtacattaaatcggaacaaaatcgtgatcctatatgtataccgaaatataattacttatctaattaactaaatttgtgtactttgacaacatttttacagataatcgtggtgtcatggattctagggtttggaataattggaataaacatatattacctaaccacagcctttgtgggttggctaattcatagtactttaccaaaagtggcaaatgtgttcattggaatcttggtttttccattaatggcaatttatatcattgctgtgatttacctaactttaagaaaagatgttgttgagacttatatccaaccagtaaaaaatgatccaattgcccaaacccaaatggaaaatggtcaaagctttgacccaaatacaatgattcactatagagaggatttggctgatattcctctacctcaatagatttctctcaacaaaaatgatgatgagaactgtttttgtattattattttttgtcaagtcatatgttaatgtggaaaagtgtttgtaataactaataagggtatgtaatctaatgtggtatgtaatataaaggttaaagggctcatctttatattattagcctgttatcatttttgttaactaattcaatgttatttacagttaaattatgtgatcgaaatttacttgctacacatatttatggggaaattctcttggatattcaatataaaatctcctattttaaaagagataattacataattacatttttacgtttaaatttttttttttacatttttccaagttttttatagaaacaacatgaaaactacataaaagtaacacgaaaataatatttaaataacatcaaaataacaacaaaaaataacatgcagataacaaaaaattaacaacaannnnnnaagagtacaacataaaaaaaccgtattttctgtaaataaaattaaaaaaattgtaataaaaatatttaaaattccgtgaaaccgtaattttataattttttttattgtttttgtgtatttgtaaaattatcccattttaaaaacaatcttcatttcacacagtcaacgactcaaaaccaaagtcaagcttctccaaattagataagttgatgaatacttcttttttgtatctattagttaaaaatatcctcaaattataattacaatgtacccacctttgtgagtgggttgtccaatacaccattaccttctattaaatctaacaaataatttacattaacttaagggtataatgggaacatcatttataaaattaagtatattttaaagaatataaaaatgaaggtaaaaattaaaagatataaaggaaaatggaaagtggatattcaatggaattttttctcttcaaattaaacccaaaatctgagtctaatcaagccagcccaaaactatctacttatacggcccaaaatacaacagcccaaattctgtttaatgaagaagaaatgttaagaaagaaattaaatgagagaaaagttagtagaagtgataaaaaaaattagttgtttttttatttttttggaaattcaaaaaagtttattaaattcaacaacaacagttacaagacaacagttacaagataaaaaaaaaatatagagaagagaaaaagggtttgggactcaccttttttttttttagtttgaaaaaaaaatagagaaaaaaaaataattacaaaaatacaattatagtatagaaccacaaccaatcaatattcatgtttctattttttagaaaccaatcaatatgtaatccatgcactagcaagatctagcaagatctgttattagttgttcattagagttcgtgtttgaacaaatgcttattcaaaaatttttagatcctcatgtaacagttgatttgatttgattgattcataaaaatttttctttcaaatatccatctaatttgaaatttcatgcttaaaatgccctataattttttccctaactacataattattaaaattggtactatatgacaattttcctaattctcctaaactacccctcccatttcaaatccctccctctcatctctctcttcctctcgcacagccg

SEQ ID NO: 23664 - DNA, 3666 bp, Cannabis sativa
  modified_base (52)..(53): a, c, t, g, unknown or other
aacccagaattctcgacccccgtctcaatgtgtttggggggtatttatagtnnttttgtggggtgatccctagaaccgagctacatctctttctttattttttcagtagggccacacattcccaacaaatataaactggaaaatacatagtctatactctaggtatcttaggggttaggtggatataaccctttatccctacttgactgatgtgattcctcataaagtagccgtcactaggcttattaatcatagcgtaatagctgcagaagaggggttacgccgtcagacttaatacttatggcaatgtcaatacgccttctcccatgcggcattaaatgcgaggtgactgttcaaatggggtctggtgcatcccagaggtgctttgctatagctctgtcctccgagagtacgtggacccctcatatcttctccgggaggtattttcatgctgatattcttgatttaaaaagacttagtcaaattatctcagaaccatattcctcaaatccacgtgtcgcagtcgtattggtccatgtattttggacaaaattaagggcaacatttacccccaagccttgtttggtgggaagtaaacgaggcttgcttaagtgcctccagctgccttattgactacctggcacgtgctttgggcgcgtgggatgcatttatgacaatcatcattacagtttttgctttttccaggcaacgattcatttcccatccattaatgatccgacgcatttaatgggtgtcagtcaaatactcaagcatttccaaccgccttgatgaacgcttatcccaaccgttagatctgcagaatgtgaaccaattaatattctcaccgtacgatgatgcttgatcacagctgcttcacacccgttctggcctataaaagccagtcttctcatttcatttggttactttcgccagtttgccaaatttcctcaaagcctttatagagagaaaaaattccagacaccatagatttcttgctactcttcctccgccgttgccaatcctcgttataccgtcgatcaacaccgacccccaactctcaactttcatgtaagttttctggatactttgtgctcgttttacttgtttgtttatcatgattagaatgtctgggttgagtgctgaatttctgggaaataaccttgaatgtattagctgtgtaatgcgtagaatctctcttatttgtgtccttgctattttcttttattgcttttttagagttgagtctctttcgtcgagataacgcttttagaaccaaaatactaataatgttagtgtaatgtgtttagattaggtggaatattgattcatgtgtttctcatgatagaaaagaattataatatatatatatatatatattatatttttggaaattttcatggggcacctaaatttggaaattatttacaaaaataatgtcattttcgtgagttagttttcatgatatatagttgccatttttttggtatttccttttttttttaacattttttatattgggcttttttccttacttttttggcccattttttttttaaaaatccctcctctattcgcgtgtgcgcgtgacgtgagcctgagaagctacaacacgtcaatcacgtaggaggactgatggtattactagtttccctctttctttcttttttgttcagtttttcatttcctttttcttttcattttcaaaacttttcaaatgtgttgaacgaatatcagggttagggtttggtcttcatttccttttgataacattgtatctttttagctgaaatggtgatccttcgatcgtctagttctccttctccgttgcctttatctgattgtggtgcaactgaaaaagatttgtcaatgtgtatcccaggtggttcgaaggcttcgagtttaggaaagagtaaaggttttgctgtaaagaaaaaacgagataaggagaagatagtcgagaaaggaaagatttttgaagatgatcgtgttgtgaaaagagttaggaaatgtgctgctctggattctgattctgaggatgagttagacatggatatgttcaatggagctaaggttttttttctttcattttaacttttttgttttcattttttagtatattttttcttattatcttttgtacgtgttggattctagcgtaattacttgtgttgctaattctgtgtgatcttattgttcagctgcatccactatcatatctgcaattccttcggtgtaaccagccattcttgtgttatttttcagtgagttctaaatttgatccaaagtaattactatggatatatttgatgtctatgtaagactcagagcatgtgtcaaaatttgttgtcccttgttcaattctagtacatgtagatacctctttgaagttcaccattaaaggataggttgtttcatcatcattttttattcttagttgttggtagaatttgcaattgttgtcatctttaatcttcataggtggtattcctgttttcacttggaattgaacattaagttcatacttgttcttgtcaagctccaaactttgacagattgtgtgaacaagagttccataaaagaaatttctttgaagtaatatgcctgtcacttcatagtttctgtaattgacattttcttcccaaaatccgttgtaaaatagtattattgtcataggatccatttcctgagaatgttaaagattgataacagtaagtaacaactttttcaagaataaatttcttggaaaaatatatgatcggactaggattttcgtttgtaaggtgtaattgtagcttgagattctttgttatctgtttaatagatcaaaataattgaatattaaatatgaatttgttttgattatgaatgtgcaagatgtattgattgatattacataccttttttgttcaatttctttttttttttccagatttttcgttcttcacaacttcttggttatcctctattcttgtatattcttgttgctagatattctctcttgttgatatcagtgattgcagtgatgcactaacagttgctatttcgtgcaagctctaaggtttgaatatttttcatcaagggaggtttttgacaaaggagtttctctgcgattagtcgacggaaaatcgcagatagttgtatgatattttttttgttgtttgattatgttctgattgaggtaatgaaccaatggttgctattttgttgaaggtttaagctcagaagatctcatcaatggaagttatcgataatggagttttttgtaattgacgatggagttttgcgactcttggagatttttttaggttttttttttttttttttgaatgaactttaaattgaaacttgaggaatttataggttcgttgtagattgtgaatcacacgcgtgattcctagtttttaggattagcagttgatttgtttaaaggtttggttcacgtgaagaagatgatgacgtgtcacgccattttgtgtttgttttatagtaacgttatttttgtaaaaagtttcttaatatagtatattcctaaaaaaatctctatatttttttattgttgatatattataagaactagggaactaagccgcgctttgcgcggtgttacccaatttttgtaatatctttatattttgaaaattttatattaattaagtgatataatat

SEQ ID NO: 23665 - DNA, 3812 bp, Cannabis sativa
  modified_base (27)..(28): a, c, t, g, unknown or other
  modified_base (2661)..(2662): a, c, t, g, unknown or other
aacatgattaactgctaatttctaaannaaactaagcggtctttacagctctcttctttgtgctctttatttttgtgtttttttgcttaaaatctttatttttcttatatttattacattaaaaacttaaatacatcaataaaaatagtttcttttcttttattaggatgaaaaagaactgtttttgtgagtgggtttatttgtatatgaaaacttgaaggtaagttcatttgttataactatactacatttattgttgttgggtattaagcttgaaatatgtatttatttattgtttgcttaattttttttaatgaaatttgttgattgtaatatatatatatatcttttttttttattatttaatatgaattaaatagtaacattagagttctatgggtattgttgtggttttaagcttgaaatatgtagatacagattttttgctaattttttttaataaaatttgttgatttttttttagttttttttatctatactgaaattaatagtaatatttaagtgctatgtctaatgttgtgtatttttagtttgaaataggtagataaatattgatattgagaacttttagacatatttttttatttagaagagtgattaattagtttctaaatgttctaatatattgatattgagaaagtcctagtaactatattctactaattgtgtaaataattttatttgtgcttgtttatacttaatcttagttttgatttctaagaggtttcaagaacattattgtaaggagttactagttactatatttatttactatgtagtcacttgttatatatgtattagttacttgttactattctagcttaatttttattttgaatttttttttatattgcatttaatattgtaggttgtagattgttattggaaacaaagtaaaattatggtgatcattgattgctagctaaaggtacgttattgacttatttctttttactaaatataaaactattaaaggagtttgaagattttagatattcatttatagtgaagtagattccgtgatatactgtactgcgataaatggagaattaatatgcttgctagaggagtttgaatattttaaatattcatccgcagtaaaatagctctacgaaatatatgtactgcagtgggatgggttgtaaattactatattgttaattgcttttctaatttattcttgtgacagaatttacttgcattgtttgttgcattcttatatagttatcgaactgagaaatattatcaaaacagagagaaattctttccaatttttcaaagaattcgtttagtgaacatatttttactatttaagtactaagcatgtaataaagtagtttatgtggtttctaatttattttaggattcattagtgaacatgttttttgttcttagctctagaaatatttgatttctttcattctcggtgcttattaaattttggttttcttgcttgatattcttgctttaagctgatgcactaaagtgatttatgtgatttctaattttggattattagtttttttagagttgatgttgttagcctttaataaaacattcagatttaagggttgcagctagatttttgtgttttatttcattgaattttaatacttctatatgatttgtgcagtaaaattcatggtattaagtgatatttcactggataaaaataaaaggtcatttcaaatttaagtggataattttgagattatattgtgtgtatatagtgggttgtgatagttgtattatgtaatatatgtattataaaattatttgggagtggcatatatgattggtattattgaaaaatgactaaagatatatctttttgtgaagcaaagggcaaaccaaggcctagtagttggcacattctcttctagctaaaattttcaatgtgagtacaagaaagtaatggaatttgtcaattaagtcttataatgcaaatagaatttgactttgtttattatttaaattctagtttttatcacattatttattataattaagtcgtgcaataatttttgttttagcacgggagaatttctcttacataaaggatgagaacaatagagtatgtaaagaatggagacaatatatcattaagttgataaagtctaggtctatttacttttaataactatttagataacatatttactcattattttttctaaaagtaaatctatatagtacttaggaaatatgattattaatatttatttttaaattattgcagtatatttgttgatcattgtgcttaaacaaaagcaggattttatttttttagggtcatgttcttaaccccgttcaagaaaggaaccccgtcaaatattttttcaatatgttaaaaaggtaaaagtttagaactttaatttattctttctaatatagagatttgtacaatgtaatgtattatttattaattgaagttactaattattaatgttatttttaaaaattatattaattatttatttttgagttaattttttttatacatattctatataattataaaaattagatttattaattattgcaaaaacaaatatgaatgaaatgtaaaaaattcaaaagaaaaatctaataaaagtgagataaaaggtcacctatcatctttttttttttttttaaaannaaaaaaaaaattaaaaaaaaagtgggataaaagtttatatcctatttttttaataaagcgtgggataagataaaatgggaccttttatcccaatttttttttgaaaaaaggcgggataaaagagtatcacttgatcataatttttatttagactttttattctactggcacatatctcgattattattttagtaaaagtcaggataaaatgaccttaaaaactgagattaaaaatcctttcatataatagtgagtgtttattatgttttgaacctaccgaatactctttaaaaataagacaactaatactgctaatctcttacttacaaaataaaaaattcctagtgtaaagatatatttattttatataaaatgttgctatataactaaattcttgatttatgaaaaattagtgggtgaattttattttaaaaaaaaaatattattcaaaaataacaatttttttggttgaggttaaattcaaaaaatatatacgatttttttggcagagtttaaattcaaaaaatatatacaattgacattgccctacatccgattgccaccaatatttagagtcttggtttggtttgctgcgttttgaacaccaatatttggattacgtttgtgaccttcaaaatagtttctgatttgtttgtggttgattcccacaatgtatttacggtaaattagtggtgtgtatataattgtatgaccctcattcttctagctttctttttctaatggaaacaaaaagtagcctttttgtgggtttaaatgtttatttgcttctctttcatgtagtctatttattttatgatttcttttttacctctggttttgttctgtttatttaagagtttctttttacgggtcattttgttaaatttgatatactataccctacaatggagaaatctgggtatggaagaaacggtatttacaggtctctgagaccacctctacacctccccaacaacaacaatctctcaatggtttcattccttttcagaaactcatcttcatacctacaaaagccatccctcatttattatattattattattagtcaattatttattcttataattcaactttttaatttatatttattaattatttaattttaattatttctcatgttttatatatt

SEQ ID NO: 23666 - DNA, 2448 bp, Cannabis sativa
ttttttagttaaaattgaatattattattatttttattatttacataatatatatcagtatttattattatatagataactagaaaaatggtaaaagaaaaacactcagtaattctatgctttattcctaaaaaagttattttgataatttttttttatctatttcggaaattagaaagttatgttatttttaatgatagtatacatgtaagtaaatttttaattttttttaaataatttacatcgctaaaaataaaattgaaatactttatttcgcacaaatttttatatgtacatataaatacttttagttagtatatatataaattttatttttcatattcaaaattattctaaattttataaaactttaaaagtgatgctaaaaaactataggaacacgatcatataaaaaaatgattaaaatagtgtacttttttttttgagaaattaaaatagtgtactttagcatataggaggtatgtagaaacgactttttagaataatgtactttagatttatttgaaacatatttagctaggtaaactttagctaaatataaaatacacttctaaattctaataaattctaatttgagttttaatttaatttcgtagctattataaaagaatgatatcacaccgtattattcaccatcatatttatatataaaattacttgaggataactcaagtggccataaatctaaattaaattgtactgatataatatataaaagtttaaataaaaaaaatatatagcacttgactacgttaccttaaaaaaaagagagagaataaaaacttactatattaattctttgtctgcttttgataatccactatttcttacaattttaaggaaatcacaaattcaatttttttccttaataaaagaggaattgaccatttgaccctataatttgaaggggtaaaaacgtgaatttactttttttttctttttcccttttgttccgactaataataatgaaaatgataattttaccgcgaggcaacgctctcggagctgagcttgggtggttcgcggtgcacgagttgaccctgggcctgcgcctgggccagcaccagagacttgtagatctcgatgatcatcttattgtcgtactccttaagcggggcccttccaaaggagccaatccggtcgttaaacaagccaccaccgtagccagtactacacacctgcgtattagcgaatcgcagcatcattttcacgtaagcgtctcgtagccaaaccagtaacttcttaggcgaagggactctcctcagaaaccccagcttcggccggccaatccggatccgccatacccgtcttcttcttcctcgggtcgaaccaagctccgacacccggatcttcctccgccgagaatccgacccgtttagcttcttgtagcctcttctcttccagtaacctcttaaccctttatacatagtcgcagacacaccttccatatgattcgatattaacctctctttctctctatctctctagctagctagaacgaaagaatgtagagagagagaacgaagaaagagagaagaaacagaggtgggtaagaaatgaaatgagttgattaaattaggtgtaatggaatgtatctatagatatataaaataaatataatataagtgcgtatactatatatagagagatataaaaattgagtatcataaatgtgatacgctatggggtacctgctttcctcatggaagttgttgtcttattcaatgagagtggagatggcacgtgtttatcacgttcgatcacaaccgttggatttgatcgcccaatcatgataataaatcttgaaggtggggtaaataattaaaggtgtcgacttttagtttttaccgctaatatacatggaataggaaattggagtgtaattaaagtctctaactaagttgcttaaagttttgtcttattgcttttataaaaatttacattttattttattttaacgagcttttacaaagataaagataatgtgataacagagtaaaattgagcttttataaagtttacaaactttgctgtgcacgtacatatgttttgctataatcatacacactagctgtaaagtaatgaaatataattagggacaaaaatatatatttatataatttataataatcatttgttagatcagaaaatatactagaggcaactaaaaaacataattttgtaatgggtagcggatatatattacgatttaattattattattaaaaaataattattatttttggcacttaactttagttattgatttcgacaaaaaacattaaaaatttatttttaaaaataattatacagactttgttaaaagttgaaaacaacattatccaattgaaatgttgtggaagcacacacacaatattatctcatttgttatctctcaaaaaattaatgagtattaatatttttttt

SEQ ID NO: 23667 - DNA, 4979 bp, Cannabis sativa
tgtttttcattattcttattgtgtgcaaacacatggcaagcatcagatccatacgaccccgctgttggttgatccctttatgaggtcaaaagtttggtgctttcattgagagcgtggatatcttaatctgatcaaatgccatggtgaacacaagaagaactcctatcgcaccatatgcatcttcgggtctccctcaagacccacaaactactgatccaggaacttaggttccagtcacaactggaatccccatgaacactgcagatgtggtgaatcctgtcaccacaataagtgatgcaagtttggccactacagctggccaaactgatacgagcaccctagtggatccaagtggcaggcccacgcctctaagagtagaccaaccactggtgcctcctactgaaggaaggacccaggggcgacagccccctggaacaacatttggatctcgactccggttctacgctggagagacgggcccatgaattattgacccagcaattggcgagcgtcacctggactaggagaagacattgagttggctagattcagggaagttgtatgccgtgcatgcctaattgaagaaccacatactgttgattgccatgttttcacttagtagagatgcgaatgcctgagatggatggatgaccaggagtacatctttcgatctcacaaattagagttagattctgcatttgagaggctagtgatttaataagatggttcaatgagagaaccaatagaagaggtcaggatctccttagagagatccacttcaaggaagactgctgccaagttcctcaaaaactaggatagatcttcccctgttagagggaggaaaaacctccccaaaggtcaaacaacgagagcagccatatctcggtaaccaacggcatgggggtcatccagagatctctggctaagcaacacccccattgtgtagccactagttggttagccaccaagaagagtacccttggcgggccagagtagaccacttcttccccaacgggagtgaggttcccagaggtcaatcgtcaaccgacgaggaccaagagtgggtggaaaaacccaaattagcgatttaaggagtcaaactaatcacttcagacatctagatccaccaaactccaagaattggtgtgacatatcccctgtcaacacacaacaagcaccagttgaccgtgaagtcacaagcggccaaacctagcccaatgtaggtctggtcggccatggaagcatcacgggtggccagaccatgccctttgcaggtctggccagccaaggaggagtattgggcagtcagaccccacccaatgcaggtctagccacccaaggataatagcaaggtgtaagcctggccgcctagccaactcctgcttgggaatggccggccagggtctacagttcaacatgggtctaactaaccttcaccatacactttcccaagttatggccagccaggccctatctctccagaatctgtagcctccccaaggtgggtcagtcagtcaagtccccatgtccccatagcaacagatccttttgtgcaagcacagttggaccaactcacggacatgatccaaggcatagttttcctgaagtcatcagaccttcaacttgatcggtcaaggagatcaccgttcttggcatacataaatgccttgcccttgccaaagtttaaaatgctggtatggaagatctatattggatgagaagacccactagctcacattaaatacttcaagatgaaactcgacctctagaaggtcactggtgatgtgcggtggtgtatattcccatccacattttcagagatagcccaagatggtactttaaaattaccctaggaagattcaactcttgggctgagttctcaaaagaattctacacataattctcgtccttgagacttgtaccatcatagctggaagacctgttgaagtcaaacatcaacaaggggaacctctgaaggattacattcagagatttatggcccagtactaaagtcaaaggccttatagaagaaagccgatatacggccatactgggggccatactcccactcagtgatttctagtaggatatctggagaatctccaccaacaacatgaaggagttccttgatagagctggcagctttaacaaacttgaagaagcttacgacaggtccaggctgggcatgtcagcaacaagcagtcacgtggcacccaacagcctcatgacccactaggcgcataggcagacaccaacaattctgctcagactcctagtggtaaaaacactagaaacaagcgcgacaccaatagctctagcagaaataatggaaaaagggggaagtttaacaattctcccacgccatagaagaataaggaggagaagtatacttgcttcaccctcctaatagagaagcctgaggccatcttcatggccactcagagaacaatcccataccaaaagctcttgcctataagaaaggagatgggcaagagagacatgtcaaagtaatgccaatatcataatgacaccaatgactgtcaaaatttgaagagggagattgaatatctgataatgtgcaacaacccctacctggatcattatgtgcaagacgaccaaagtcagacacaaaatctagctatcgaactatttgccattgtctgagaaaatcttgtgtggaagtttgtacaggcatatgatgttttttactataaaatccaataccttcatagatgttattgttgctagaggctcagcttctgtcaacttagtgaagtaatccactacgaccactgcatattgaactccacctttgactttgggaaactttccgatcaggtttatcccctatatggcaaagggccatggactttgcatttgtattagctcatttgggggtgcttgaggagtcattgaaaatctctgacatttgtcacactgcatattgaactcaacctttgacatttgtcatcatctttcgagcctcaatctgttgaaagttctccagtgttgaaataagctgttatgggagtcatccagtttgatgcagtatctatcattttgatttcttctacacagtggatactgggttcttccaaaaattaaattgaaactagattggcctatttatcaccgtgctgctcccaagccgtgccaaggcattagtagttgtgttttgtttcattggaatttgcttgagggtgtaacactttgaattatgcgagcaggtcctggatcaaactgaggtaagccatcatttttctctacgagccatgtattcccctaagacttgatttaccaccaactttgaaccactatagactttaatgtatttggcacgtacctcccaagaaagctttagtccatctatgagtgcttcatactttgcttctttgttggaggctttgaacgcaaatttgattactctatgcagaggttgccccaggtgtgacgagagcaagtcctgcaccaaaaagctgatacgtggtcaatccttcctcaagtaatttccagatgagtttgtctttattctcttttagttgggactcttgttctttgtgtgtctcgggactatattttgagctgtcgacctctttgcctgtgcattgcaccataaagtctgccaaagtctgctcttttactgatgtgcggggttgaaaaattatttcgtactgacccaactctataacccatttgagtaactatccaaaagcatcgggcttttgcaaaacttggtgtaagggatggtcgacatacacccaaacaggatgagcttggaaatagggccttaactttcttatggctaagattagacaataagttagctttacaattaaaggataccaacgttctgtctcaactagtcgtttgttgatatagtacatcggatgttggacattattctcttcccttttcagtacgaccctcacaatgtattcagtgactgccatgtatatccctaattcttcaccgtccaaaggttttgagagtacgggaggttttgcgagttgcttttttagttttgggaaagcattttcacattcatctgtccattcaaacttcttattaccttagagaatgttgaagaagggaacacacttttctgtcgactttgaaacaaattttagagtgcggctatctgactagttaggctttccacttccttcgttttttattggtgacttcatatcttgccttctattcctcgagcattaataagaaatctaagaaacgtacccaagctatcgccaaaggaacactttaagggattgagtttcatgttgtattttctatggattttaaagcattcatccagatcctctattgtcccccatcctttttggatttgatgatcatgtctaacacatatacttccatgtttcttctgatatggtctttgaacattttgtttactaacatttcgtaggtatatctagcatttttaagaccaaatgacattactttatagcagtatagacccatgtatgtttgaaagcttgtgtgttcttggttaggtggatgcattctgatctgattataccccaaataggcatccataaaacttaggatttcatgtctagttgttgcatccataagtattcaattcttgggagtggaaaataggcttttggagacgccttattgaggtcggtgaagtcaatacatactcacattttttttggataacttgggcactagtactaggtttgccacccaagctgggtagaaagcttcagtaataaacttgtttgtgcggggcttttctacctcttcgtttagtgcttgcgcacgttctttgtccagtaaccttctcttttgttggacaggacaaaattgtggattaatatttagggcatgagacatgacagtgggatcaatgtcgaccatatacccatgtgaccaagcaaaaatttcaaggttttctctaagaaattttattaaggctaattttatttcaagcaacaaacctttaccaattt

SEQ ID NO: 23668 - DNA, 4349 bp, Cannabis sativa
ccccctttttgaaaaaaaaaaaaaaaaaacccccccccccgtctctctagctccactgcctatagccgctaaggacgtctgcccagcaatccaaccaccgttaaagacgtccgcctaacaatccaaccgccacccttcctctagctctctcacattgtggattaatggataagtcttttttttttaaaaacattttgttaaataattgtaaaagtatagtatatttccggtagatctatgtggttgttgtttgtggcattttgttttcaatataattttcgctaaaatcacgagatctcattttttggagtattcagtgtgttcgtatttttcttggtagtttctcgatacgttctcgatgggttctcgacgcgaatgtctcaaggtcagggaagacctttctcgacggattgtcgataagttcttgaaaggttctcgagtcgaatgtcccaaggtcagggaagacctttctcgaagactttttgataggttatcgaaaggttctccactcgactgtctcaaggttagggaagacctttcttgaaggcttttcgatagattctcgatagtttgtcgaaatgtcgaatgatattgtatttccaatcataattgagatatgttttagcaaaaaaagaaaaaaaaaactattcttggcatgttatcttgcattctcgattgtttgtcgatagttttttgatggtgtgtatagttaagttttcaagctttcctgtcacatgttattgataatttctcgacatgttatcgactgtttcttgatgattgactgattattactttttacgattattgatttcttttctgcaagttctcaattggttattttgatttagctgtttgtggtttgtattgaattgcaagatcgcttgtaattctggttgtattttatgatggtgcttagaatgttgaggaatttaattggatgtataaaagcgaacttacagagtttcatttttgtttctttgttattagtgttaggctattaactctaatatttattttgttgaagttatcatctatcaatctacattctgcaattaataaattatttaattttatatagtcttaattttgttcaattacatttataattatttaagtatattatcttttttatatgtgaaatgattcaagttatatgatggtgggtaataaaagtatgacaaaggtaaagtttgctaatagataaacttaaattcctgtcaagaacatatcgacaactagtcaataatagctaaacttaataactatcaccatatcgacaacctgtcaattatcaatcgatattcaagcgagagtcaataaaaaatgaaattacaattttttggcaatgattcaaccatcgagaacctcttaagaaaatataacaaccagtcgataatagattaacttaatgactatcatcctatcgacaacccgcccataatcaatcgatattcaagtgagaataaagaaaaataaaattacaaaattttttgcaatgcttcaactatcgagaacatgtcgagaacatatcgataacccatcgataatagctaaacttaatgaccatcaccaaaagctaaatcttatcgataacctatcgagaatccattgataaatggttgagagcatatatcgttttcattttttccaaccaccaccacaccggatcaaaaaataccataactaccattcaaaaccgaccactttttttttaaaaaaaaaaaatcatcaaaactaattatattttaacaaacaattaacaataactttttgaactagctaacaacaaacttttttttttgaacaataactttctttttaaagaatcaaggagatctggcgggatgtgggctctaacagcggaagaacgaccaacgatggcctcgggcggacgagtccttcgtacagagagaaggaacgacgattgagaccacatgtaacaatttccaatcataaaatacaaccagaaacacaagcgatcttgcaataagagtcttttaaaaaaagactcttattacaatttcccgatgtgttagaaattgttacatggttatagaagtcaaaaagtctattcttttggaacaaacattattagtagtatgataagtaaataaaatcaacacatggaccacaccatacgtgagcgtaactaaataccgtgtgtttattaatacattagttaaatataaaaaatgttaaaagaccaagaccaaccatatcaatccatctatataataatcaatattttaaaagaaaaccacacaagaaaatccaaagccacctatcaaagctcatcattagcacgtgcgccacgtgatccttgaacgacgacaaccattcctgcacaattgggtttgggcccaaaccaaaccataagtgagggaaagtaagggtcaaacgccatagtcttatctttccatgttttccacaacgaatcatcgattcatcattaaacacattcagagctacaacgtttgatcaatcgaacgatcgaaagaagagtgtccacttgaagggtatgaactcgacaacactgtaacacggtttggtaattctttactattttttttctttttttttagaaaaactctttactatttattgggaagtcgaaatcaaaagaagtaaaaaaaaatacaagagtggtgattgttctgtgatcagttaaagaggtttgagagaaggggtgatgtgacaagtacatcgatgaaagagaaggtccaggttctcttcacgtaaaaatttgtgtggaaatgtggcagatgagtttgtaagtataaggtttgcattgtaaatcagtaaaggaggttctgggacagaaggatcaacaatagatatagattattccagtgaccggcataacagtgatgaaataaaggagggcctgagtttcagtatttgcaaaagaatagtgtaagtaagtagttgtctatattattgttcattgaatttatttacacattacatatgttgcgtccttgattgtactcttagaactgaaaatgataaatttgacagtttgtgatagttatcaagtggatatagctaacttccattacaatccattccatatttgttaatgtacatttttaaactgacatgttaaaggtcaaatatggtatatatctcttgcttaagacatgttaaagatttaacaatagttttcttttcatttttgttttgttttgttttgttttttttttgttttggttttatttcataactttatttatgctagtggattttatcctttagacacagttaaacacatgggaaacttttctctccatatgataaatttgacagtttgtgatagttatcaagtggatgtagctaacattcattacaatccattccatatttgttaatgtacatttttaaaatgacatgttaaaggtcaactgtggtatctatctcttgcttaagacatgttaaagatttcacaatagttttcttttcatttttttttttgttttgtttttttttttttggttttatttcataactttatttctgctagtggattttatcctttagacacagttaaacacattggaaacttttctctccatatgaactaattaataatacagacaaaagtgtcagcttaatagtcctaacagttgaaaagctaagtcatgatcaacatataagtatactataaatataagcatagtatttattaaattttgcctgatatgataaaaatttcattcgtcttctaaattttcttaaaaacctttttagatgatgaaaggtaatatttggatatctccaaatccagtggagtttgtacaaagcatgacacttgtcctcaggttctagaaccgacctttaagaagagggatttttgccgttggaaatgtgctagatcaacaacagcagaggtccaattcccagttaagaggcctgcgagttatactagctaatgatgacggtgtaaacaggacagtgaccaagaagctgtttgagaaattgggctgtcatgtgttggccatttcctcaggttttgagtgcctgactactgttactagtgctgaaaatgcttgccgagtggttcttctcgataatcatatgcctaaaatgaatttcttatgcgaatctgaaagtttcgcagccgcatctggccattgataatagctgtcacggcgagcatagaggagaatgtgtgggagagatgtctgcagataggcatgaatggattgattaaataataattaaaaaaatctaatacgtataaaatacatatatttcaatactttgtaaattaaatgtatatttcattcttatatataattttttttacatacaatttaaacaaaattaaatatttttttatacataca

SEQ ID NO: 23669 - DNA, 6732 bp, Cannabis sativa
  modified_base (33)..(33): a, c, t, g, unknown or other
  modified_base (5345)..(5356): a, c, t, g, unknown or other
aaatctgattatagtgaaatgagttttatttanggcataaaacccaacaaaataatattaggaaataatatgggataatgtagaaagataaggaacattgcatagcattttgagttaggttttgtggtgttttcatatgttttggggatgtagtgctgagttaagtttagagtgtatttctaagttaaatttaaggttgttcaagtgtgtttgtgatgtttttgtgagttgtgaggtttgaaattagaagattaagttttgaacctagttttgtttcaagcatggtgattttgtgatttgattgtaattctaagttttggaatgtttggatatattgtttttatattgttaaactgttctggagagtttgagcaggtttgattgagttttgattgggttttgatgcaaaaactcgagtttcccatttctgcagctaagaagaagcttaatcggttttacaggtgttgtgaaactggtcaaccagtttgcctacaggggaaaccctagtttttggttcgaaatcaattttgctcggagtgttttcaagaggttggattagggtgttttaacgatgtttaagctaactttgaaccagtgggagttagaatttgtctggttgttaattaaggtttgtttcagaaattgaataagttgttgatcgagttttgttatcatgacataggacccgggatcgtcgagcatggttccactcaagtcggcccgcacacccgatattaatttgaggtaagaaaagccttatgcactgctaagcatattggtaagaaatgattattatcatttgtgactcagttatgatcgaggtaataatgaggaacaattattatcgtttgtgactcgattacaatcaaggtaatgatgtggaatgattactatcatttgtgactcgattatgattgaggaatagacacggtcattactattattgagaatgaataaagatacgatgattaccgttatgagtaattacttttgaaaccgcaaataggtttcttacttatcgtttgctgtatcgggcaacgatagtgacatacacagctcatggataacgagtggtaagggtgctttatgaagcactgaggttatgtgattatgatgatgtgtgattagagtgctttatgaagcactaagattatgtgattatttaatgaataaataattgtctattctgatgatgaagttgttaattgtgagtttctatgatttccttattgtgcgtgaaatatgtatttgtatttactcgcttttcttgctgagtctttgtgactcacaagtgcttcgtggtgcaggtaaggaggaaagaaactgtgaatcggccatgagtgtgaggtctccttgcaatgtacatatcaaccgcggtgtctcagtttccaggggacaggatccacccttttgcctattttctggaaatgtaaccttattttgagaatctggttttgaactaaattgtaaagcttcttgagcatgggatccccaaaacttagtaatcttttgaataaaagttacgttttagtttattctgaaagtttttaattaagccgcacttttcctaaactaatagattaactaagaattagtttgtaaaagtacacacgtggtgtccctgtggatcaggacgttacaacatggtatcagagtaaccaagatttaaagatcctgaagactggtttgatatgtacattgattgcgaagactcgttcgactcatgatttagtaagtgctaattgttagattatttgataattatccgcttattggaattatgctagttattgaaaaatcatagtaaaggttaaagagtatgtgtatatatggaaatgcttattagcattgctcatgatttgagatgtactagacggtcgaaagttagggctgcaggtgtattaggtcatgcacccaaggtagtttggtaaaggtaactacaagttttctgggcttggggttggcggtgaaggtgtgaatcctccaccaccactaaattgggaagagaggtatgccacgatgcaagaggccttttggcaataaggtgactaaatttgagaattgagggagcagcgaactcagccttcttcatgtctcaatcacaatcctctagcacttctggtagtgccacaggatgcaaaaaaattttggagcctttgtacaagcaattcagaaagcagagtccgtctatgttcaagggtggtgcagatccactcaaggcggagtaatggatgagtatgataatatcgatttttgatttcatgcggcttaagagtaatgattgggttagatgtgtcgtttacatgttgcgtagagatgcccacatttggagggacattgtgtcatagggttatgatctgaataacattacctgggatactttctggactttattctatgaaaagtactgttaacgcagatttttgttaaccaaattaaagcctatttcatgatgaattggcacagaaataatagtaataaaagaaatagaaagaacacaaagcttttttacgtggttttgcaattaaaattttgcatagtccacgagtctgtcttattagatttctgatgcaaaactagggctttttctctaataaatttttcatccttttttcaatgtatcctgctcctatttatagttacataggaggacagttaattacaatcagattgatatcccaacacaataatcccctaaaattgtgggatttgattatgtcccacgtacgataaatgaggttattatttgaaaatcacacagctgtgatttatctatttttaccgggtcaatgcgtacgtggattaaatacgctgcaaagcgtatcgtgctgggacatctcgctgggaacatagcaataataaccccggcagcaagctagagcttttcccatgtctttctgaggatgataatgtaaatctcgtcgtttctgcgattgaagacataacgctccatctgacaatcgtagttcttggtgacaagatgaacttcaacagtcaacatcatttgaatgttagcttctatctaagagagctgactggacggagcagtaaatctcattaaaagatgtttgaagctaattagtgaaggtacaatgagtatgccctcctataacaagatggatgtctcgctattcgttgttcaagttcattcaactgttatgcttagtttatataatttatattatacgctaagtgttctaacagccaacatgtcttatttacatctcttcatacgtggcgaggttggtgcctcgctttgtattactgatgttgtcctcatgatcatgtcttcatatacgaaatggttttcttgtcaatgcgtgaattaatagtttgtacatccttatctcgcttaagactttacagtcagcaagttatagatatactctaccagttgaacatttaatgagttattctattttaatgtcctctaatataattaccattatattcgttgattcgtattctcccacgttgacacgtgaccttctctgaagtaccaaccgaattgtgggtataacaattaccccttaaaaagttatttttaataaaaagtgctttataaatgattacaaagggtatatttgtcataatcccttccgaaaaaatgcatgtcctttgattttggcagttttgtagttttcgaggtacatcaacagttaatgaccatcttctccacttctctttcaaattatactcataggatctccctggtctaacggagattaacccacgagtataaaatggaaaaaggaaccaccttttcattaccttcgccattttagaaactctaagaatttttcaagcttttctgcagaaaaaaccattctctaatttgcctgaaaccttgcatgccatcattgtcattaacatttttcctatgagtttcatccgatttaattttcgactgagggatcttcacgtcgtttgttgatttgtagattgcagagccgtccatcgtcccaaaaaccaactctaaacagtaagtgaattttctcctgattttcttacatgcttcttatgttgtatttctgggtttaattaccaatttcttagtcagaatcttcgttatctcatttggttttagcaatttttagggccaaattgtatctgggtaaaatgcctcgcgtataaagtcgttaactaacaacttatccacttcctgcttgagtgccccttgtctctcggaatccaagggtcgcctcttctatctcttggctgggtaattcagatcgacatttaagtggtggcagataatcttagggtcgatccttatcatatatccatggctccaggcgaactgatcctggttcgccctcaaaaatcttattagctgctatttcaattgttcatccaggttcttcccaatatatacaaactttgtgggatttcctggatctagaacaacctcttccaactcctcaattggtttcaataaatttctttcatcttcaaggatcaagatcttcatccttcttctcgccttcttcagccaagactgccattagctggtgaccaacctttatgttctacaactctatgcaatagccttcacgagctagcatttggtcacctcgcactactcccactcccattggtgtctaaacttcagggataagtgcttaatttaactaactgccccttgtccaattaacgctagtcgacccaacagtatgttaaaggctgatggcagtttgacaaccaaaatttcttgcatgattgtggtagataaagttgctttgcccaatgttaatgggagctcaattattccttgactgaagacattatcgcctgtaaatccacactgatttaccatgcaaggttttagtttggctttttcaagtcccattttcctcagtgtatccctataaaggatgttcactgaactttcgttgtccaccagcaccctttttatccttttattggcgagctggatggtaattaccagtgggtcaacgtgaagatatttcacgtctttttcatcttcctccgagaagacgatcaaaggtttttcagtcttagctttcttggcaggtttcgaagcaaagccagactgctcattcttcacttccttcacatatctcttttggacattgttgctttcccccgcaatatgtggccctcccaagataaccaggatatcctctctttcaagaggaggaggttgtaatccttggttgcctgggttttaggcggatttggctggttttgtccattaccttgtcttttcacatattaccgaaaatgacctcgcgcgataagactctctatctcatctttcaactgacgacactcggctgtcgtatgcccaatgtctttatgatacttacaaaatttggttgcannnnnnnnnnnnctcgcatgcctcatgggctcaggtttacgaaatgcgattctgtgctcatgtgcgagataaatgttttcccaagtttcattaagcttggtataaatggtgtagattggcacgtacttgtcatgcttctttttctttttcttgtccttggctgactccttagagttatctttcatctttgaactataggctcttcgatcatcagccttggtcgagatagtacttgttgagacagtgctgggtttgtttcccaagccagtttttaacaagttcatctcttttcttgcttcctctttttcaacaaatacttgagctctatcattgaactcagtaatgttttttattgggcgaccctgtaggtcatctcatagctcgcctccagcagtagagacatcagtcgtgatccttgcctgaagagtagtaagctgggtactatcgtccagatttcttaccctcgcaacagttgtgctaaaatgacttaagtaggccttaagtgtctctcctcgctgtttctttatgttagtgagtgaggacacctcgggtcgcctatctcttgccgcttggaactgtttcttgaagtccttcgagaactattccgaagaggtgattgaatgatgggtaaatttgttgaactagctgctcggtgctccaactagcgaagtggggaacaaaatacaccttagactgttcgtaacattgatggctcacatgatagtattgaaattatttaaatgcaagaccagatctatgatcccatcatatgacgagacgtgaaggttcttgaatccctaggggaatgcagtgttcatgatgtctggatggaaaggctcgagctccttgtccgagtcgtatccagactgcttttcatgttccccgacttgatacctcctaaatttgtcctccaactcatcaattcgcaattgaataggatcctcttgcttttgaccgagttgttggcgaagatcaggttttttctggttcaagtgattacaaagatccggttgttactagttatagttactaacgaacctcgtcctactcatggacctcgtcctgctcatagacctcgtcctactcatggaccttatcctttagtaactttcagttttacttgtgcctgtactctctcgatcagtattgcgacgaattccgtctcctcctcatgttgatcgactatgggttcttgtgcatcctgagctggcactcgcatcatcatgtcccgtccttctcccttgggtatgggtcgttgcatgctccctgctggggtttgtacgtgccccttccctgttggtgtgagaagtacgttggcgatgtctcagtggcaacccacctgtcccaggttgagtcccaggatttccctcgttctcacaggggatttc

SEQ ID NO: 23670 - DNA, 3469 bp, Cannabis sativa
aatttaatatattgtaaataagatattcaaaaaattgttttgaatttttaaaaaatttataatatattttaaataactatattcagatatcgagaaaacgaaaatatagtgcatcataggtacacctatttttgaactgatcattttatcctctaatagattataaatatgtccacatgtgtatacatatgactatatatatctacctgaatatcgtccgaattgttggtccggacagcaacttcccaaacggggtgacccgagaggaggctgccgtattcttccggtggtgtagcgcggagatcggcgggttcttcactagtttttccggcaaggtagcggagccccaccaccttagaattgaaccttacgcatttgaggatgtcaaagtgacgagcgtaggagttgaggtagtccaacacctcaaggtgggaaggaaagctagactcctctctctctgcaccaggccatgggaaatccgtaaactcatagtctaggcgagccgattggagcttagtggacctgtatgagcaatggctccacacccctccaatcgtctcactcccttcaaatactatgggatcatggtgtctcagctgtttggctgcagctataccactaaccccagctcctattatcccgattttagaaaaaataggagtacgagccatttctatatattattatattaacagtactacttagattgattattatgagattattagttttggtttttgcagatatatatttagacagggagaaagtgaatttctatagtactgatatttgggttggggtgggtttttgttgtgagagcatggtgatctatatataggagttgcatgagagttttgggtcaagctcagaagcacgtgaaatagactttgatatgtctgtgaaagtgttggaataatattattgtaattggacgcctaattaaaatgatatatattattttcaatgtatatatatacatgcatacataaatatatgtgtgtatgtacgtatacgtaatgtggaaattggtttgttaagtttgggaactttccctctaattaagtgactttcttttgattattatgggtagtgtggcaagaattgaatttctttctaccttcaaattaagaccgcgaatatagtatttgatcctcctttataatatattataccattacatataaataaaacaataatatcttgatattaatttggtcaaactactatacacataatgaccaaataatttgtacgtatatagttttaaataatagtttatatataatgcattaaattaatgatcgaaataggtatttattaatattaaaattattgatcgaattttctctcatagtttcatttaatcaaatttaattaagtttgtgtattgtttgaagaaggtaccttatcttttctcatgtataataaaatagtgagtatctaataataaggccatcatatatttttgtagatgcatattatgttattatatatatttatatacgcgtctctccaattcttgtgagattaattacatgccaccacgtcaaaataagagcatgtatatacgtatatgtatagatatttcattttgccaaattacgcccgcctggatgtttaaacttacgactacatgatacacaacacatacatgcatacacatattatacaaaaatatactccttacttttttttttggtaaatgtatacaaccaaagtaagcttattacaaaactgttcaatctgtacaaattagttgagaattctatcttctttactaattttctcttttttaaaaagaaaaaatctaccacaaatttctattttatctatttacaattatagaaactttatacatcttagtctcccaaatagcaatattcctagtttctcaaattttgtacacaatagcatttacaataaaagtaaaaaaaaaaatctcttttaaactttaaaaatttactccaaatagaaatcctggccaccattttttcagtgttgcaatcacaatcagcttttgaaattttcttaaagcatatagggactctaagatactgaaaaggtaaaatgcctttggtataacctccagaatgtgctgaatctcattattaggcataccagagcaataaacaataattttgctaacattagggcatctcaaaccagactctaaaatactaaatagtatagtttcacactatatttactttaatgagacactaaaactatactcataaatgattttgtctacaatgtcccactaaatttagtgagacactgtagatcacactattttttaaaaaataaattattaattaaataatactttttaaaaaaaacttaataattatatatatatttagtattaaaatattcttattatattaataaaataataaataatataaaatttggtgtaatttttagtattatgattagaattgagaaaaaatttaacgttgaaaaagtaattttatcgtgttgatttaacatcaaatttaaattttaccattagagatgaccttagcttgaaggcctgaagctttatagaaacaattaaaagttctaagcataagcttgataaaatactccttactttattgaccaaaaagtataaatataaaatacaaacaaatatatttgctcgaaaaaaatacaaacaaaacattttagataaaatcggcatgcttaactaatagcagactcatgatttaagttgagaatggacgtgtaattttctttataagagagagagaggtgtattttctaaaaattaatataaatttgtatttttatagtcttaaatagttttggaaatctttttttttttaaaaaaaatatttttttaatttttcatcttattcatcccgaaaataatatatgatctgtcttcatttcacagctattaatgtagattttcattaactatattaaagcctaaattgtgatggatttgcacagaaaataaaagtagtaaagaaaaaataggaacacagcttttttacatggttttgcatttaaaattctgcatagtccacgagtctatcttattatatatttctgatacaattattagggctttttctcttaaagatttttcgtccatttttcagtgtaacctccccctatttgtagttacatcggaatgcagttaattacaaatcgaactaatatcttacaacaataatcccttaaaattatgggatttgattccgtcccacgtaaaataaatgcgattattatttgaaaatcacacagctgtgattaatccgcttttactgggtcaatgcatacgtgtattaaatacgttgtaaggcatatcgttctgggcatctcgctgagaacatagcaacaataatcctggtagcgagctcgagcttctcccatgtcttttcgaggttgataatgtaaatctcgtcgtttttacgcttgaagacataacgctccatttgacaatcgcagttcttgg

SEQ ID NO: 23671 - DNA, 1978 bp, Cannabis sativa
aactaattaaatacttgtaaaaaagcaaaaaaaaaaaaaaaaaaaaaaaaaaaaaactagtttgaagtgtaaaaataaaaaagttcctatttttttcttgaactatatgctctcgaatgccgaaataggtaggagtacatcagtgtataggtacattaatgttttcagcgtgttaaatttttataaatttcttaaatatttgcagaatgtcttaaataactataatatacacgactataaaaaaataaaattaaaaagttagtcggacgtcgaaacagataggaatacatcatttttagaaaaatgtattgtagaattttccaaaataaatttttaattttataaatatatctaataatataaatatatataaacaataattaaaaaaaaaaaagaaaagacgaatgttattgtgcaatgtaacattaaactcaaaatggtgtacaaaatagtgtgtctttggagaaaaaattcacagcatatatataatttgttgtttcatggccttatgtgtttttgtaaagagaattgttaagatcatatataacttaagaaaataaattttaaaaaatatttttaattaatttataaagtgtcacttataaaaaaaaatatttagtaccactaaatctaattctcaatattgaatgctcttttcgaaaaattatctctctttaaggacatgtttagacttcggacaaaagttttggattggattattttgttgttaaactatgtgtgatgtattattttgctataaaaggatgggataatataatactaagatttaatattttttttttctagaacagttttgttcgttgaatactaaaaggacctctcttgtggtactattaattttaattgaatgtccggggatccacacaaggataagttaaaatagtcccattaaaatttattattattattattatttatttattttgaataaattattattatttatcaaaaatggaataatattctttaatcgataaacaattacaatcaattaaaacactacaaaaaatacggctccaagcctaacagtcaccctattacaaatgaattatgttagtacaatattttcactctagaaacattcttgtatttaataatttataatctataaatcattaaacttttaatctctttaactatatgagacattgtattgagtaaaacctacgatcgtgtcgaatggggttacttaaaagctattatgcttcaaatgggttttgatgatcacagatgggtcaaattgattatggcttgtgttactagtgtccggtactctattttccacgatggtcatgtcatgggaccgattactccatctcgtggcatctgtcaaggtgatctgctctctacttacttgttatctgctgaaggcttctcagctcttatatctcggtttgagagggagcgtttactccaaggttgtcgtgttgctcaaggtgcaccaatagtctcatgctgtttgctgatgacagttatgtcttttgtcaagctcataatggtgctgctggtagtgtcttgtctctccttcggcaatttgaaaatgcattgggacaacaaattaatttggccaaatcttcagtttttttcagccacaatgtccatgatcatcttcggaccagcatttgttccattcttcatattcctgaagctcttgaaaatagcatttacttgggactccccaacatcattgggagaagcaagaaagctattcttggtttcctcaagaacaaaattttgaatagaatcaatagctggactaggaagttgttgtcgagcgcgggttaggaaattcttttaaagactgtggttcaagctctccctacttatgctatgagtgtcttcctcatccctctctgtacttgtgatgaaattgagaagttaatggctcgtttctggtggaaaacaactacagtagaacctctatttaaaaatactttattcaagaataacctctaat

SEQ ID NO: 23672 - DNA, 2480 bp, Cannabis sativa
ttgattttctaagcatagaaaatcaaatttccctttacaaattaattctctttatttttatcttttttcccaaacacggtctagacaaagtagacccttttttgattaattaaaaaaaaaaaagagataataacaaatttgggaatattttaaatttaaaaagctaaaaataaaaaaacggaaaacaaatatgggggaaagtgcgaaaaacgtttcaaggttttgaatagggacagctcactttttttccgtagtccgttttttgtactacagtaccttcacctttcttttacttttctttctcacgcgccaaacttaactacctctcattgcactttcagcgcgtgtctctcattcgccacacttaaatttgaacattataaaggtaaataccatctcttttgcaaaagttattattagactctttatttttgttaaatgataaaatagattttatattttctaaaatgataaaaatagaccatgttcttaatttttaacaatttaattttttttttttttgaataatcatgaagaaacttcattaattcaagtcttccaaaacaagggaagcaattacaataggtagagtatctctactaaaaacgcagtcagcctcaataagagaagatcgcgccaacatatgcgcaaccttattagcagacctcttaacaaaatgaaaagaaacattgataacatcggctaacaaagccttacaatcagaaataatatggccataaggagaagccataactttattattttccaaatccttgatcactctcagacaattagactcaacaatcacattagtccaacccctatccttgatccaactcaacgcctccttaattccaattgcttctacttcatgagcttgaaaggtaccaactttattcaaagtttttgcttgaataatgcctccatcagaagatcgagagactaatcctaagccatacctcttttcttgagcaaagagtgtgccatccacatttattttgatttggttggtagctggtggagtccaatgctcaatccagttgctattggcattattagagacgtccgtgtcctccctttgagcattaaaccagtcgacaaaattaatttttgctaacagcagcacctcttcttttgtcggctgctttgagttccaaaccaagtcattcctaaccttccatatagaccatagcatcatggccacttccaacctatcggcttcacaccaggtattcatgccatcctcccaccgactgctgaaaatcattgcagcagtaccaacaactcgtactcgggtctgctgccagcattgttgtgcaaaagcacaacgcaccaaaacatgtaaggttgtttcaggagcagccatacaaagaggacaaacggtatcgataggcacatgtttagttgataattggaacttggtaggcaaactattcgtgcacactcgccataaaaaatctttgaccttcgggggaagcttcaactgccacaatttcagccaaaaaccagagttgcttggctgggagttgctggtttttcgttgctgcaacagtgcataagcacttcgaaccgtgaaagcaccattcggttctttgccccagtaccagtccaccttgatactagaatcagcaagtggaattttccacaccagctgcacatcacgatcagatagaacatcttccaaaacttcctcatcccattcaagtgcacctattttcattaatgaattaaccattttcccaaccaaagccgggtgttgagattcaataaagggattctcatcatcaataagccacgggtctttgagaatacttacttgcgaaccattgcccaacaagtcttctagctgctggaacgaatcaccccttgagactcaagaacacttcgccaaatatagctcggattgttgcccaaagttgcagaaagaaaattcccatttgcataatatcttgccttaaagatctgcccaaccaaactatcaccacaagtgagtaaacgccatccttgcttagctagaagagctaaattaaaatctcgaaagtcccgaaaacccatacctccatcactcttgtgcttagacagtttatcccaacttacccaatgaattcctttattgctatttgaccgccaccagaacttacttattgctcgctctatgtcttggcaaaaataccaattggaataagaaagacattcattctatatgttggaagtgcttgaaccacagacttaatgagaacttctttccctgctcttgacagaaacttattatcccaactttgtattcttttttgagctttatcagtaaggaaattgaagaccaccttcttgtttcttccaatggtactaggaagtcctaaatatttactgtgttcattagcttcctggatcccgagcctttggcaaatagcttcacgcattggagtttgggtgttgctactgaagaagactgtggatttatcaaaattaacacgctgccc

SEQ ID NO: 23673 - DNA, 2648 bp, Cannabis sativa
ttttcttttatactgtaaataccaaaaaaaaaaaaaaaaaaataaggcctctatcttccacactcacgacagaagtaccacaggaacaccagaacaatcgaaaaacaaccattaattgaggtgagattgagaaaaaagaaaaagtaaaatcgacgtaaaataaataatcatagagaaacaactgtaaaacaatactaaaacaaatcaaacaaaagaaaggaatacatgattaaaaaaactaaaaaatgttctgcacatcctcaatactcaatgcaatagcaattatatttgcaagaccaatctcaaaaaatcagaacaaaaaagctaataaaacaacaaaatgataaatgtaaaacaataagcagatataatcaattagaaaaacataaaagaaccacacctcaaaactttttttctagtgagctagtcaaatgtattttttggagaactaaaacaaaaaaaataactacaaaaataaccatagagaaggaagaagaaatgtattttatagcatccatcttccacactcacggataaaaccaccatagcaccacaagaacacccagaaaacaatcattaattctaacaagatggaacaagaacactgaaaatcgacgttaaaaaataaattatgaaacacaaccaacaatactaaaacaaacaaaaaaaaaactaaaaaataaatacaatatactacagtactatgaaacttataaaaatacacaataaaaaagtaaaaaaaatatggtctggcagtattttagtaaaaaaaaatggcaaaagtcaatatagtatgtaaatttcccataaattattatcgatgcagtactaatatgatgctaatttaccccaatttaagagctgagataaaaaatagaatatgtataagtattctctaaactaatatttgtataatgttaataaatcaactagatttcaactcgtgtatgttagttaaatagaccttatgaatgtaaatagaactaaagatgaacaattgcaatgatttttatagttaaaaaggggaaatttaaataaacaatggaattataattgtaatttgtacatataaaattaaaaagtggtaaacttcatatatacgtatatatatacatactctatccgattaaagaacacaattaaggatgcttgatattcctaaaattaacaaaaaccatatatgataatataaagagatctctctattcccacaccaactttgattacctgcaaaatgcaaatataaatatatatatatatatatatatatgtatgaacttatacacaagagaaaaacaaaaacaatacccatgaattatatgaaaaggttcaacactaatttagaatccacaccctttaattttgagctctccttaggagatctgaactaaacagctgaactttcaaaataaaatagtttgataacaaaacatgtttctcacggttatggaaaatttttcttcttcgtatatagaattgatggcagtacaatataaacaattctatctctaatcaacgttacatttacccagcaaaaaaataaaaaaataaaagataaaaagaaaaacgttacacttacaatttttcagtacaaacatgtgtatataataatatctatgaacatcaaaatcttcagggatcatcacttaacttaaatttacatgggaaatataaatatttttcacagaaccaaaacaatatacttaggtacatttatatatatatgtgtgtgtgtgtgtgtgtgtttatgtacaaaaatcaaagatccaaacctcactagagaagagagtaattcagttgataaatgggatggcatgagaaagatgaaagacaacagagatattggcacggctcaatcagaaagcataatccacacacacctatatatatatatatagaactctctgagtgagcagggccaacatcttagtaagactttcataatatatatatatatatatatataactaaaacatgttaagccttgatttatgtaaaagagcagagacagatatacataatttgggaagagaaaagaagaaaacgtatatatgtatgtagatgagggagagagagagagagagagagaggtgtggttattataaagaagaggatgggaatgtctcggaatatttcaattgaattgaatgaaaataaatagaaaggaaggagagagagagagagagaggagaggtgagaaggttttttgggaaagcattaatgggctaccaaaactcacaacccaaggccattgcattaatctataccaaccctcgcccaacctctataataaattaccataatattctctctctatcatatatgtatttaattctatagcatataaaataaatctcttcttgttattgacgttcaagcactctggcccctaccataaatgaaggaatccgcagcaataaatatatatatatgcgcacagtctgagtctggtaagtagcattaataaaaattaagaagtttttccaaagaaaaaaaatagctgtttttttttttggtaataaacggatcgaaaatattgaaaccgaccgtctttcatatatatatatattaaggttaatttgcaattttttccctttaactttgacatgtactaaatcatgccacttaaatttttttggccgttaaaa

SEQ ID NO: 23674 - DNA, 3303 bp, Cannabis sativa
  modified_base (203)..(203): a, c, t, g, unknown or other
ttccgatgcatactccatgtatccaacccaaacttattttaaccaatgccttagaaacgacatagcacttatccaaggtgaaagtaagctaaattgtagattatcctatcgattaaaccctgtgtaatgataaatcatggaaatacatttaatcacacaatcttgattaattttcactatgttgacaacacaataaataagantatcaatgtgataaggatttggattaatttataaatcaaacaagtgatcacataaaccaaataacacattaaataagtaatgaaataaatttatttctttattgataaatgaatataaatgattatattgaaatagagttttatttagggcataaaatccaatactaaaccactcatttgggcatgagaatgggcctccatgaggttagacgaatcttggaagtagacgtgtaaccctgctgaaaaatacagataacaattattattattccttttaatacatttttgcttcaatttattgctaaaaaaacttttatttacattgtgttttttaaaaatatattattatatttttttatagagctttaaataaatatttttcatgtcaaaaaaatatttttcaatttggtttggcaaagtaaaagtcttgttgttaatggcgtaatcttatctaatatagcatatattataattaaatgcatacattattattaaataatagttatatttcaagttagaatgcttcttcttgttttattgtagataatttagaggtacctaattttgatatgattaagattaatgtaggtacgactgttattagtaggattgacacttttggtattagtttgctagtccgtgataatggcagcaatattttgcacatttgctctacattggttcctaggtgtgttcagcctaacatggcagaggcagtgggggtgaaagaagttcttagtttgatcaaacaacaaaaccttcacaacagtgtagtgcagcctaattgcaaggttgtggttgatacaaattttagttctcttcaaataatttaactggtttaattatcacatattgtatttctctcctttctttttaaacaatatttttaattgtctttgtaaaacggtctgtgaacatagctaccaatttcttggctaagagtgtttgttgtttcctagatcataactacaatgagagggtggggatttgtccctgctgagatgcattttatttcgcttactgatttgctataatattaataaagcatcatttttcaataataaaaaaacatatttttttaactaaaataatattatttatttaattaaactatatatttttatcttaacatttaaaaatcaaaacacataacctaaaaaaaattataatataattaagtataaaaaaattattaataccatgtaatcataaaataaaatatatttaacaattatatttatattatttttaataaaatctaaataaaaaagtattaaatatttatattattaattgataaatactatttatttgtaagattcaataaaatatatgtatatgcatttataaaataatattaataataatttattttaatatatatatataatacatattaaaagttttcaaaaagaaaaatttcatttaatatacataaaaaaatttctatttcaaaaaaatccttaaatattttatacaatatcatcctattaacttctcactttacccaaaatacccttattattacgttatttttaaaacataaataaacctaaaataaaattctctctcccaaccctaacataacacccgctccctttattgagccccctccgcccactaccgaccccgatcgcctcccccaaccaccactcgtgtgttgtagccccctccgcccacatctaaaccgaattcatgattcccaccaactcgtctaaccccaacgtaggcatctagccacccgcgcgaagaacgaagaacaatcttcgtgggtttctgtccaccaattatctttgtgggtcgccgtccaccaacgattggaaaatctttcgtccacgtcgatcttttgccatccacgcaaggtattgttaaaaaaattgttgctagttttttggtggttaatttagagcgattatatattatttgtgttgaaatacacttcattttaatgaatttttcttaatttgtggtcggttttatatggtggttatggtattttctgatctagtgtggtggtggttgagaaaaataaaaattgtgtatgctctcgattatttatcgaaagattctcgatagattatcgacaaggtgttgttaaaaaaaagtttgttgttagtttttttgtggttgatttagagcgattttatattatttttgttgaaatacactttattttgatgaatttctcttaatttatggtcggttttatattgtagttatggtgttttctgatctagtgtggtggtggttgaggaaaataaaaatgatgtatgttctcgcttttttatcgaatgattcgcgataggttatcaacaatgtgtggttaaaaaaaagtttattgttagtttttttttgtggtaagatcgattatatattatttgtgttgaaatacactttattttgataaatttttcttaatttatggtcagtttaatatggtggttatggtgtttttcaatctagtgtggcggtatttgaggaaaataaaaataatgtatgttctcaattatttatcgaaagattcttgataggttatcggcaatgtgttgtttaaaaaaagtttattgatagtttttctgtggttaatttagatcgattatatattatttgtattgaaatacaattcattttgatgataatttcttttaatttatttatacttgattatcgacatattctcaatagtatttaattagtcttttagttgacatgttttggccctacgtttactgattagcgatgggttcttcgcaggttccttataaatattgattgtaattgctcaaaagttttggaaattaatgataatttcttttaatttatgtatgcttgattatcgacatcttgtcgatacgttctcgatagtattaattagtcttttagttgtcatgtttggccctatatttactgattaatgatgggttctcggcaggtcctctataaatattgattgtagttgttcaaaagttatgaacattaatgataatttattttaatttatgtatggttgattatcaacatattgtcaatatgttctcgatagtattaattagtcttttagttgtcatgtttggctctacatttactgattatcgatggg

SEQ ID NO: 23675 - DNA, 2064 bp, Cannabis sativa
gttagtagtaccatgcaacgaactagagcccaattgacaccgcgaaagaaaggatgtcgtttaatttcattagcaccttccctcgaacctaatctgttcttgggatctctatgcaacaaccgatacatcaattgttttgcttgtagacttacctaaaatatttaacaattaggtatttaagttcttgaatcgtaacaattttaatgaaaaaaaaaatgttatttagttacgagctgaaattataataatttaagtattttatccgccaatataattaccggtatacttcctggaaatttgagatctttgtgaagaatattggcaaatgtcttttgtcttgtctttcctctgaatggtgtgtatccataaagcatttcatataaaagaatgcctgaagaacaaaataaaaagttttcataataaggaaagaaggaataaaaaaaaatggaaggatgaagaactattgttaagttgctaataagatttaaaagtaaataaataaatatttaaaaaattacctattttatgtgtttttatataatgtgtacaaaaatgtgtctttttaaaaaaatgttatttcttggaaaaaattcaaaaataaaaaatgagaaaaataattaaaggtaaccatggttttcttaattgacccccttacctttgcttttcctatattttaaaacattttttaagaaaatttcccataaaataatctttttgaaaaaaaaatcacatttttgtaaatttgagccttgaaaagcataaaaataaaaattctccaaaaacaaataaatgaggaaaataacattacctaaagcccaccaatcaactgcactagtatggccagccccagttataatttcctgcaagaaatttaacaaaaaataaaaattaaaaacataggatcatcataatgaaattatagtatataaaaaagcaataaattacaaacttcagaagaaattaaattaagaagtatcaaaccggagctatgtattcttcagtgccaacaaaagaatttgatgctcgcattggctcggccatgaaaattggcttctgttgatttttatgtgactttttcttatcagatgtttcttgaattaacagctgaaattataataataattaattattagtatgtaaaaaatgatataatattatttttacttgctaatcttgaacaactcgatcacaaataattacctgtggtttgcaagatgtcaaacaagacaaatcgaaatcggttaaggcaacatgtccagtaccctggattagaacattttcaggctttaaatctctataaattatccctgaaaggaaacaaaaacacataattaaaattccaaaagtttaaacatagtagtaattatatacatgtcttttgtttataagcttaccttggcagtgtaggtactctaaggcagttattacttcagcagcatagaatctacaaaatatttatttaagaaattaattatgttagttttatatcactaatattattatttaactagtcataatcaagaatatttgttcttacctaacagcttcttcttttatgacttttgtgggttgcttatccaaaagcatgaagagttctccaccagggcaataatcagttattagacaaatatgagttttggtctgcaaagttataaatgttaaaggttgagaagaaaatatttgaaattgaataatgaatatataagtacattaatattaattaaaaggtaatgatatgagataataaaaatcatgagttacatctaaaaatgtgaaactcttttatctttcaatttttatatgcttaatcctcttatttttatttttagtagcaaaacttccttaaatttatttttctttgtaaatttaaagtatcagttagttattactattaaataccaactgaattactactatatcgacttcgagattttattgttacatatatagtggtcatccagttgatatatatttaacggtaatatttaattggcatgtctaatttgcaaagaaaaataaacttaagagagttttgccaaataaaaaaaaataagtaggttaagt

SEQ ID NO: 23676 - DNA, 2671 bp, Cannabis sativa
ttattgtataaatttaatgtgttttaaagttagttgttattgtaacaaaatgaattagttattttattttaatttaggtaaaattataaagctaatggagggaaaaaaataggggaagatatagatttttctgccattcttgtttttttttttacattcctgacggtttaaaattgtcgcctataacaagatataggtgacagttttaaaccgtgccctatactataggcgacgggaaacccacattagtgagggttttgaaccttcgcctattatgcccgttttacgacggtcgtataggcgacggttatagaaatcaacgggaatactttaaacgaatatttaaaaatatcgggaaaactcatttttgtagtagtgtatgctaatactgacaacacttaattatgttagtccacataaaatattctaatattcttcgactttgactacataattacacctatatgtactctcactagctagtgtcagcagacagaaatttgaagaaacgctaatgtttataaaactaattatgcatcatattatatcgatgcacttataatacataacgagagatctaaaattcataaaacatgattataactacggatctggatctactcgaacataggaccaaaactaagttgctggctcgcatcaacaagtgtacacacactgctagaaaaatgaccttacttcgattcttagtccgtttatcttcgatttttatatatactcgttagcaaagtcatttcaagcaaagacgtagacatagaaaatatcgaagaggtaaagggaactaatgtctttggttattataaaaaaactaaagacataggtgaagcaattaaaaattacgagggagaggaagacatacgtcttcaattattatgtaatgactgaagataaagttcacttacgtcttcaattattacataataatagaagacttttatgtcttttttttttttttaattttgaatgttattttaatttttttaaagtattatatattaattttataaaagattatagattaattttcttaacaaaatataaattaattataataataaggatttaatttgaaatatgaattatttggattatattataacaaaattaaagtactttacaacatgttaagtctttacgaataattaatacacaaaataagtagtattgcctaaaattaaaagttttaactagctagcagtgtcaatttcgttaaccattgatgttgcaatggtcgcaagtctatctccacattgcaaaattccttcttttcaaacagcaaaagtaaaatataattaaatttatttcttaattataataatagtatattatagttacggggtacacataaataaattaattataacttatatttttatttatttttttgaactaacttatatttttatttatagttgaaagaattttgaatttttacaatgtcattgatgtactttagtatacaaaacccacatttgattcccaatattgttttacgcaaaatcaattgtttactccaggagacattccacgtaacttattggaacattcgagtgtttgatcgaaggccctaaattaattatttagattagattgaattacctatagctggtataaatttaataaaagttaatgaaaattgaaaagtaccttcggagcgtgtagtcaatactattctcagggcatttatgtccttttcaagaatttaagtgaattgtcttcatgacacaaactatctcaagcatctaatgctgaataatatataagatcaataaaaaaaaatattatgtgctaatttaaaaacaagaatgaaactatattttaaataatctataaatagttgtacttactcgatgttccatgctatgaagaacatctaggattcgttattcattgtactcaaccattctaccaatttgttaacaacttcttggtcaccttatttgttggcgttgagaagctttgtgtcaaagagcttgaaatactcccatatattcgttaaatcctttcagatgcatctacataaattggttgagagattatagtacattttaaaagttgggcagaagttttcctataaataagatacgtacctaataaacagtgtagtataacttctgaaatatttaaaagaacacagttcaaatatatacattaacatacctaattcctaagaatatgcctataattacatccaatattatccaaagtttcaacatgttatatatcctccaatcacaaggcgatatgtgtgtgatgtagcatgaatgcacgatcaactggaacttcaacaatgtcatgcacaactttcctcctaagaaattcttgaaccaaaaaatggaggcatgtaggtatttgagcctagacctccgaaaggaatgttgcaacctcctctactggatctctttcctaacattcaattttaatccagccgaatacatagcaggagggtttgatatatgtttctcctttgacgatgatttgtgaggggttcatatctgttttcccttcgacgatgatgtataagttgtagcggtatttaggaagggaaacttgaaattccatgcttaataaaacaaaaaattggtatcctaaactaatactatgtaatatttgtaaaatgggataagtttttctaaaacccaattttaccccc

SEQ ID NO: 23677 - DNA, 1460 bp, Cannabis sativa
  modified_base (1418)..(1426): a, c, t, g, unknown or other
acaaaacaaaacgcgggaacttacaacattattcttaaacaacataataataataaatatatatatatggctttgttgtttttctttctaaagtatgctttcgatttcgcacaagtagggacattataataataacagtaataattaattgataacatatcattactaaaattatgatgttaaacgtggataaacattattgttaccacttatatttgcattacataattatataagttactcctttttttctggtggaagccaggaacgttactcttgatagataaatataagagcatttctttttatttattttaggaacgggttctatttttaaatgactattttctttgtagaagtaaatatttaaattatattactataggttataataaaatatatcatgttgattgtacctgttaatatattttttttaatataaaaaaaggaagtttggttattttgatataatgttgaaaaatgctaataaagtacaattagaccttcagtccaattaattattctagtcattgctgtctctagtggttggggtacaagaaaaattagacaaacaatgccttaatgggacataggatgtattcatggcacaacttgaaggttttgaagagaaaggtaaagaacattttgtgtgcaaattaattaacaaatctctgtatggcctaaaaacaagcacctaaaacttagtttgataagttgaaaacaacattgataagttggagattttagaattctacggcaagcactttactcttctttttcaaaaatgcagatactataatctatgttgatgacattattatcactaaaaacaacaataaaaaatatattattaaacttactaggaaattcatatccaactattatattatttcttgggaatttaagtgtaaaaagatgaaacagggctcttcttaatacaaactaagtacattgaaaaattgttgagaagaactaatttcatcaaccttaaaccatgctctacaccatctacagctaggagcaagaccaatgtccctaaatgaaggagagcctttacacgatcatcgatgtcgcagcttatagaagcatcattggaggtcagcagtacctttgtcatgctcatctttacatcttttatgcagtaaacaagccgagttagttcctaaaagctccaaccacagtgcaatagagtggtgccaaacttgtcttgagatatctcaaaggaactatgaataaagatcttcatattagctgtgatactcgacttaacataacatgtttcactaatgcggactgggcatgctaccttgatgacaggaaatcaattgttggatattgtgtgtatcctgggaacaccttagagcatgtttggtattattttctgttttttgttttcaaaaaattatttttagaaatgnnnnnnnnnaatagtttttgaagtttttaaaaataagtcatgt

SEQ ID NO: 23678 - DNA, 1718 bp, Cannabis sativa
aattttgacttgcataacaatttccacctttttcaatggatctttgacccatctttgtttgatacaaaccaaaagtttgccttcacagatacaatttggttacaaaatccaatttgcaatcgaaagcaactcatagcatacgttggtatagattgtaccaccgcatttaataagacttccttaccaccaatggagaagagcttctcattccaagcatgaaggagtttccaaattatttccttgatgttacttaacaattcttttttgttatgcgttgaataagcaagaaggctaaggtaaacttcatggcattcacaaattggcattccaagtgtttggctaaaaaaattctttgccacattgttgtattgggagaaaatgacatgattgatttttgagtattcaataattgccccgatgctcgatgatagatatcaaggacgtgtgtgatggccaaggttgagtccttagtagcttgacagaacaaaagactttcatctgcaaatagtatatgagagattgatggggcgtgtctagtaagcatcaatccttttagattccctgtttgttcttcgtggttaagaagccttgaaaaaccttctaagcataccagaaaaagataaggtgacgaagggtctccttaacgcaatccccttgttggccagacattacccacaacctctccattcaagaggaacgaaaactgttagatgaaagacatcgcatagtgagtgagatacagcgttgttcaaaacccattttgttcataacagcagataagtaatctcattccactctgccaaaagctttgctcatatccaatttaagtgcagaaaaacctttgttgccttgtgttttatgtttgagatgatggacaagctcaaaagcaaccaagatattatccgtgatgagatgattagaaaggaaagcactttgagtttcagatataactgaagggagcacatctttgaagtgtaggacaaaaactttggatatcagcttgtaaatgacattacaaaggctgattggcctaaaatcacccatagcttttggtttcttgatttttgggatcaaagtgattattgatttgttcaaaatactcatgtcgtgatcttcatttagaactttgaaaaccacattagttacatccgaacttacaatcttccaattgtgttggtaaaatattgcggacatcccgtcactcctgaggctcttatctgggctcactgagttaagtgcattcaaaacttcatgtactgtaaaggatgcagtaggaaccgattcatatccgttgtcactattgctggaatgacatgaaggacctgattcaaagcatcatgatctgttcccgtggtagtgaataattcaccaaaaaaatagcaaataatgtctatcatttcctcctttgaagttgcttcagccctagcctgattttatagtgatctaattgtgttattagattttctattggaggcatgggcatgaaagaactttgtgttttcatctccacgttgtagccaatctacccttgatatttgttgccaataagtcttctcttgtgctaaaagttcatccaatatatcttcagattttttcagctccaagattgttgctgcagaatgtacttcagcattgttgagatttgttacttgttgttgtgcttttgagatctttttttttttttttcatgtttccatacttttgatggtgccacaatt

SEQ ID NO: 23679 - DNA, 1371 bp, Cannabis sativa
taatttcaaaattaaagctaagcggtctttacattggcctaccatgaagaaggattgcactaaatatgtctgcaaatgtgaacaatgccaatgctattcaaaagttccaagggccccaccaacatagataatcctcatgaacagtccttggcccttcatagtctggggaatagacttagtaggatcacttccaatcggcaagggaggagtcaaattcgctattgtcgttgttgactacttgggtggaagctgaacccatgtatataataacttccaagaaggccctggacttcgtaattaaaaacatagtgtgcaggtacggacttccacataaaatagtgtctaacaatggaaaattatttgatagtgatcaattcaccaatttttgtgccaagcacaagataattaagagcttttctgttgtggccagacctcaagcaaatggacaagtggaagccatcaataaatttttgaagacgactgtaaacaagaagcttcaggcttgtaaaacacactaagcgggagaacttccaagagttttttaggcctacagaacaactaaaagaacttctacaggccgtactccgtactccatgacttatagatgcgaagtcgtaatcccaattgaatccaccgtgcctacacataggagggatacctacgacccaactcagaaccatgatctactttacgaatctttggatttaattaaggagcttcaagaacaatcacacatcgaactccagatgtatcaaaacaaaattgccaggaatttcaactccaaagtcaagagcaaaaaaattgaaattggtgatgttattgttccctgcctctcaggggcccaaaatgggggtcttaggaccaaactaggaaggcatgtatgaagttatagacaaaattagtgatggaacttatcgtttgaaaagactagatgaaaccataattccaagagcatggaatgctaaccacatgcattgttaccatcagtaaattggaggtggtcaggttcctttttgtttttctttacttttttataattttcatgtacgtcttagggtaggagttatttgaataaaagaagaagttgtcttttcatatttggtctttaaaagttcaatcatgtaacaacaaaagtcccaactattaatcacttgggggtagcacatatgatattgtcatatataattttacctcttttgctaaaaaatagataagttacattctcaaatataagagtaggaagtattgcctgaaaacagaacttcagggacctggaagtaagccactgccttattatatctgaagatcatttaacacttaaccaaatataagagtaggaagtattgcctgaaaccagaaccttaggtaacc

SEQ ID NO: 23680 - DNA, 2075 bp, Cannabis sativa
aaaagaaggaccaacttctgctttcgtggcttcggtctttaatgtccgaagtgattcttgcttctgttgccaactcttcagtcaaaccagtcaaaccaaagctcgattgcttcagttaaaagggcagttttcaaacgttcataaaggcaatctttccattgctgagtgtgtggaaaaagtccaaatcattgcagatgctcttactgtggctggagctcctattcaagatcaagatcttgttcttcaagttctaaatgggttaggacctgagttcgattatgttgtatcctggattaattcaagaagtgacaatctcaccattgatgaggttcaagcccttttactctctcacgaaagcaggttggaacatcatcaacacatgaatgacctgtccatgaaaatgcaagccaatcttgcttttgactcaggaagatcgggtggctctagaccttattccacaaccagatttggaaatcaagaaggcaattctcaaactcaaagtcggggaagagggtactccaggtttcctcccaacagagtaatatgtcaagtatgtttaaagagtggccacactgctcctgtttgccactacaggttcgataaaaattggcaagttcccaaacctgtcaccaacaatccgagggcatatcttactgaacaagaactggagtttgatccgatcgcatatagttctaccatggtgcaagactttggagatgactctcaatggtttgcggatacaggagctactcatcatgtcacatctgatggcactcaacttgatcaatccaccccttacactagcactgagagtttagctgttggagatggtaagaaattaatgatttcccacacaggttcaaccttcttacccaattcctccttagctttaaagtccattcttcatgttcctcaaatcacaaaaaacttagttagtatttccaaacttaactaatgataatgatgtttttcttgaatttcacaaacattgttgctttgtgatgaaccaattcggtgtgtcttccccaccaggaacaattgtcaagctgtgtgtatccatgcctctctacttctggctcaccacagtatttctccttatgcaaaacaaaatcagatctgtttgggttgaggtttaggttgggtttgagtttcaggttagggttatgattcatgttgggtttggggtgttgggggaataggttctaattgggtttgagtttcaggttggggttgtgattcaggttgggtttggggtgttagggaaacggtgactgattgggtttgaggttcaggttggggttgtgattcaggttgggtttggggtatgggggaatgaattcttgttgggtttctagatcagggtagggttttgattgggtttgaggttcaagttgtgatgactaagagggaaactcaaactcaagttgggttataatatctggtttaaggaggggttctggtttaaggtggggttttggttcaatttttggtttagggtagggttgtgattgggcaccaaatttcctcatcctcctctacctaagtcttttggctcttggattttcttcaacaatctctttatagccaatgttctttacttctggggaatctggtgaatcaacatgatcctataaaataagaaaccaaagtcaaaatcatgcaatattatcaaaattaacaactgcaaagttatatccaggaactgaaatccaatctttggaataaagttatggcattccataactaaaattcattaacacaactttaaacgataagaaaaaatataattgaaattcaatcttaggggaatctgcaactttaccactttttttacaacattagggctgattggaatattgttggacctgattctacatccccccacatattctgaacctaaaattgtaaaactaacattaatacacacatattgtaacacttaattataaattagaaacatgcacacaattaaattctaacctaggttgctgctggtgctacatctggcagaaggggttttgtggttcaggggaaatttactgtaatgacaatagatatgttggtaggcctccatc

SEQ ID NO: 23681 - DNA, 4338 bp, Cannabis sativa
aagattttttgaagctccctgtaatggagaaaaaaaaataggacatttagattcagttggatcagggggcagtaaaaaaaatataactcgtgcaaatgtaagggacacgtatataggaagaggaagtaacttatacacaatgaaactctgatgattaaatgattctaactcgagacaccttaatcctagtgtgaaggtttcatcaataaaaagcacataatactacactagtcaaatatgagaaatccaacaacataataaggttcaacagtaatattaatatcattatatatatggctgacagttatcttacctgctcaagaatgaactgaatcaatgcttcaactttcagacctctacgcacaattccttggacagttggaaaacgaggatcatcccatccatcaacctgtccattttgaacaaaccatagaagcttacgcttgctaaggagtgtataaaccatattcaaccggctgaattcatacaaaaagacctttctcaaacccatatcctcttgaatccgataatattgcgcattgcgatcatggtactcactagaccgaagagcatgtgttataccctctatagaatcaacaaatgggcatgcaaaatcataagttggatatatcttgtactttgacccaatcctatgatgagggatcggattgcaacggtaatatacaggatcccgaagtgatttgttaggatcctgcatatccagtttcccccgcacacagcactgcagacccctttcagatcctgcaatcatttccttccataatttcatattctcctctatgctgttgtttctgcattttgattcaattccatccatcctttctttctgcatttgctcacgtggggtgtcatcaacatatgctttaccctcacgaatcaacttttcagccatttccatcaactgagggaagtaatcagaagtatatgtaacagtttcaaacttgatgcccaaggtctcaatatcctttagaagattgtcgacaaactcgttgctttcttttgcaggatttgtatcatcaaatcgtataataacttctccttggtatctttgagcaaaatactgattcaacagtgccgcctttgaatgtccaatatgaagataaccactgggttctggggcaaatctcagtttcacttttccaatctcagcatctggaagatctacttcaaatgtagacctgcttcctgctttagaaacatccccatttacactctttgtagattgactaactccttgatgctcttttgatttaacaggcactggctttccttttttgccaacatacgtagcaacaacttctgttaaagcgtcgctgtgttccgccaagattgaattgaaccatcttacaagattctgatacttatttgatttcctcaaactttcccatctaggcccggttcctgaagcatacataataatactaagcatatctctttcaagcacaacttgataaatagttaattgttctacatttttattataaaatatatacctgcaagacctgaccaaattgctatatctgcaattgacaaacaatgaccaaccagaaatgtacggctctttaaataaagatccacatatttgcatgcggtctcaaatgcagaacctgatgaaagaacaggactatattccagccattcatcaatctgaaaaagagaggaaggagaccaagtaaccgacaaagtaattaaaaatggagcactaaacaaacatgcaattgagttatctataaggaaagtcacctggccagattcatatgcattccgcccacagaaattaggaatggtggaaatccgagcaacatatcgaagtagtacatatgttccatgtaattttagcctacaaaacattaaagtttaacggaaggttatgtcagattgaaaattgtttcttacacagaatgttcataagtatcaacagaaagatgagctacccctcttgggtataactcaatacactatgagctagcttgactaacacttccactttaagtttttggattctaaacaaatgactttactagggccccaatgactttttttcacattgtcacaaactgtttaatcaattttcatatataaaaaaaaattcttaaaacaatcaaccccttacacctatatacccaccacttagtcatgcataagtttagtgtaattgtcaccaacaaggtcttacaccatgataataaaagatcaatttgaaacaaacccaacttatacattggtcttacaactaaagcttaaattaagttggaaattaaatagagaagaaagagtaattacccgtcagtgaactcaaaaaacggaggagaatcagaagaatcagaagtgtcaatggtgagagagatcccggcaaccttagcggcagcaatgaccgagagcggaggagtatttggcggataaaccagcgactttatctccatgttggagcaaggcgatggacgcaaggagtatttgtgtgcacctttgttagagtactctccggtctgcccctaggttttgaactaccctcagtttgtcaaagtatgggatcagcctaaaaaatgctaacccattcaaattatgttttatgcataacccaacccacacattatgggttggtttgggttgggttacaaccctcatctgaaaatttagatctgaacataataaattcaaacataaactaaagaggagaaaaaattcaaacactagcaaagactttcaaaattccaaataaaagatcataaagtcatccaaaatattataatccaaattttacattcattttaagtaatacaacaaatataaatctaaaaaatgatcaaatttcagaatcacaaacaaaataaatagataaaaaaaattctacaccaatattacgacataatatataacaaaaatattccaaaaaaacacaaaaataaggtagctaaactcagtaaaacaaccaaagaaaaaaaaaatataaatagcttgataagatcatataggtgacattgactcttaaattctaaaaaatcaaatttattacacaatgaaactacctgaacttgtctatttggatagctgaactgagtaagaatatttaaaataataggcagtcactacagttggccaaattagctctcaataatttgcaatacaatctactcactcctcttttaattgttctcataaagctcctttcactaactttgcagtagcctagtgtttgcaatatttgatgagcaaagcttgagtaatttcctttaaagtcaaagaattctcagagatataaagttggcatgtcacagttaatctttctcagaaaaaaaaaaaactttacagtaaatcataaatcatacatggcctacaatatatataatacatataaataacaaaaaaaaaatcaaaattaccttgtccaagaatttgtgcttttaataatatatgatttagactgcaaaaataagagagaacattaaataaatgtttatattcataataagttattactggttctactcattataaaaatcaaagattcaagaagttaaaaacaaacaaaatgaaagaaacgaaaagataacacacagatttcttcagctcattatactcaaaatttggaattataacaaaaatacatatataaaaatgaaagaaacgaaatgtacaattataaactacgaactctgaaataactgtttacattacaaaaaaaaaaaattaaaggttgtgtctttgtctgaggcgatggatcggttttgtcgccgcacactgcgcttaggaggagttcgtctgaggaggctgagcacgggcagcggctgtttagtgtttagggtttgtttagattaatcacatgtgtgcgtgcaagtacaccatcagaataaaatctattaataatttttttaaaacaaaataacttatttattggatcggatgtaccactaacaggggtactaacaggggtgtccatccaatctaatccgtatttttttttatcaaacaacattcaatccgcattaagtgcgcatttcatattttggattcaatctgatccgcgtaatagtacggattggatcggttattttggatcagctgttttttttatgataaattatttaatatttcatagaaaaaaattaaaaaaagactattgtttattaatctccaataataatttattttcatctccatttatatataaatcaaaccaatatacatatatgttaatatatatactcgtctttaaatttacactaaaatatatatgtattcattactaaaataaataagttagtatatatatatatatttaaatttatgtgtatttgtctatgtgaataagaataattt

SEQ ID NO: 23682 - DNA, 2280 bp, Cannabis sativa
tgatttagaacttgctatttgtgtttgccctaaagatttggtggcattatttctacaagagaaatgtgaaatctatactgaatacaagagtctcaagtacttcttttaataataagatttaaatatgagacaaagatggtagtttgagttaattaaggattgtgattgtgagattttgtatcacctcaaaaaaaaaaaaaaccaatgtggtagtgaatgctttgagcagaaaagtaaccgagcaagttttcagtaccataatgatctctcctcagttagcgactgatttagtcaaggctggagttgagtttgtggttggaaaactatataacttgacaattcggtccaatgtgctaaaaagagtcaaaggtgcgcaattagaagattttgggttcattaagttttgagagggagtgttagttttttgggctaaggacttctcaatctcagatagtagaatgttacattataaaactcaagtttgtgttccgagtagtattgaaatcaagaaagaaatattggatgatgtttatattactccttatttattcattacatccaagtaccacaaaaatgtaccaagatttgaaactttagtaatggtggtgtgggatgaaatagttgatcatgcatctaagtgtttaacttgccagtaattttaaagcaagacatcagaaactagtagggttactacaacctttggcacttcccgagtggaaataggaagaagttggaatggacttcatggttagtttacctagaaccccatgaatgtatgattcagtttggattgttgtgaatcatttcacaaaaatcagcgtactttttgccagtaaaaataacttatacagtgtatcaatatgcggagttgtatgtgctagagatagtttgtctccatggagctctaaaatctattgttttggagagggattcaaaattcacttctaagtttggaaaattcttcagagcgccatgggcaaaaagctgaagtttggtacaacttttcaccctcaaatagatggtcagtccgagaggacaagtcagatattagaagatttgttacgagtctatgttatagactttgagggttcatggagtagataaattcccctgatagagttttcctatagcaacaactatcagagtataataaggatggctccttatgagatgttgtatggtaggaaatgtcattttctaattcattgggatgagaccatagaaaagaaatatttagaccatgagttagtatagggaaccagtggggcaatagagaaaaatcaaggcttggaggctttcttcgcaaagcaagcgcaaagacatagagtttcaggtaggagaacatgttttcctacaaggttcaacaatgcaaaggtgaagtgttttgggaataagagtaagtaaaccctaagttttgaggctattagaattcttgagaattttgggcaagtgacatactcatgttgagatgttaagaaagtatgtgttagatgactcatgatttgagttataaagccctaatatgttcgatctgaattggttcaagttattagaattctactacaacaaaaagtttttatggatgcaaatcgtaggtaggagattataaacctacgagcctcacctatcagaggtgtggaatgctttgggagggaggttatgtagatttgaagtgtgggtaggcaaaaaattataaacctacgagcctcatttatcgaaggtgtggaacacttcaaaagggaagggcatgctaggccctaagtagacaggtaacataccgtctaatttatctttagcattaccaaaaatacatggtagtggtcatgtattgatgatgagtaagtatttgataatatatagaatgagttgtaacataaactctgaagtatattttggtgtggaaaaccacctgggagagagtccaattagaggactcattatttagagttatttagaaatgatttcgaggacgaaaaccttttaatagggggataattgtaatgaccgcatacttagaatatgaattagtaagtcaataagcactaattaattatattatatggttatatgtggttattttattatattgaccttatatttaagaaataggtaataaggttataatttctcaatttcagagattttattaaactctacgtgtattatttacactatatgtgcaatttaatagttttgtgaattttgcctagtgacgatgaaaatgcgacagttggtcgttagtgtcacacgggttggtttagaacttttattttagcgggg

SEQ ID NO: 23683 - DNA, 1428 bp, Cannabis sativa
ttctcttttaattatactattaatcgcttattatttgactcactgtcgttggctaaaagcaaggtcaacattttggtgctttcattgagagcaaaaacacaggttttttgtcttaagttttgataggcatacatgatggttttacaaactcgtagaggccttgctgatcagggcaatctaatggtgacatatcctaacgcccagatactctgaaactagagacgaccaccagggacaaaccctaagcaggtcaatacacaaccacctactgtgggccatggagtgactttccctctagctgggatcacaccaggcgtgcaagagactggaaacaccagttaagtagccgatcaatccactcccaacactgaggtcccatctaccactaatgtttagaggccagttagagatgatgctgaaatccgaaacctctgaaccacgggtctcaataaaaggataggcccttactgactttgtggcagaattcatgggcttcaacgaccttccagatgaaccaattcctgagctacccacttggaaggtctatgttgtcggtgcgtccaatgagaatggggtcggacctagagtaattttaatctcccctaggggcaccaacttcaaagtgtgctatactttagtttccgtgcctcgaacaatgaagcagaacatgaagccatgttggcaggtttggagttagcaaaagaagtaggagccaaataggtgaatatttaaagtgattcccaactagtggtgaatctaatctctcatgagtatcagacaaaagacgagcgaatggctacctatgtcctagtgttgcgtgaatttttctaaggatttaagagttataatatatgaaaaatctcgagggatcaaaatttgtttgctaacatttttgctaagttggccacaaatccggagatcgtagagcacggaatagtccttgttggtcatctgtaaaagtccagcatcgacgtccaggggtgaatgttgtagtggataattcacacttctggatgacacctatttactagttcttgagcacgagggaactccccgcagactaggctacctcaagaaagatccaatactaagcccataattatggtatcattgacgggaaactatatcgcatggggttgtctattccatatttgaggtgcatcaatggacagagattagtgcaatactccatgaggtccatgaaggcttctgtggagatcacactttcggacccaacctttccaagaaaatcctgcggcaagggtatttttggcccaccaagaagatggattgcatgaaatatgtgaggaagtgtaaccaatgttagagattcactaaagtcctgcgtccaccacccacgaaaatcacactaatgagcagtccttggccttttgtagtttagggcatcgatttagtagggtccctccc

SEQ ID NO: 23684 - DNA, 4815 bp, Cannabis sativa
  modified_base (29)..(41): a, c, t, g, unknown or other
aactttatatgtgcttatttcattgtttnnnnnnnnnnnnnaggatgttaatgaaacatacatggtagtaaatttagatcctggtaaaatatatttccaacactgagatcctcttgtggcatctggaaaatatatgggaggagactgtgagggatgcttgaataggtaatgtaattgaggcgactgttaagggctagcagacatgttgggagaattttgttgatgtttttgaaagaacggacataataggagacatattttgtggttgttgaaaaacatgttgttgtggcattgacattgaacgtagggttgaagcagacgcactaccttgtcattgtgatagtaaaaatttttgtaaaaagttttcaaatcgtgggtcatatagggaagggtcactaaagttgccagattgatcaatcttatcacgcatttttaacataaactcagcaaagactcccatatcttcgggattaatggatggagaagggccttgtgattgaactcgactttgagtgctagagcttgttgccgatttgtctttcaatttgtaacccactcctctttcatagttcgactggttcccaagaactctatttatagcttgaaattgcttgtatttgctagaagatccatagcaagaatcattttctattcctatcatgttcgcaacctcttcattcattttttcttgatcaaataaaatgttagaaacacaatattaccttcattcattcattttaaaaatattataaaacaaaaatttaaaacttacatatagttctcggcatgtctcgctaacccaagcgtctgttccttatttaatgtggctttttttccaagcataaattgcatagtcttcagggacattctattcaaaagtagggttagtttgtgtaatgtgtaaaaaaaattactaatagaaagtgaataattttacttacaaattcattacgagttgatgccatcgactttgtgccttgtgtggacgtatacttcatttcctttttatttttgtttttttgattagatcgcgcaataaaatttgggctcagaaataattcgtacaatttgcttccagaataatgtacaacattgataacacttttcaaatcatttggatccccagaataatgttctaaaaagtgattatgcgtgatattctttctctcagaataccttctcttcatctcatggtagagagtttgcataaccttttcaggctctgcatgaccatcaacatcgtacaaaaactacacacaaatagtacttgttaaagaattttgtattcattaaaattaaaaatctacaacattaaacttgttaatttattttaccttcattttttgtacatgttggtctttaaagtgttgaggtacatctttaaaattcaagtagtgtcatggcaacaagattgtgacttcaacaccccgttgacgtagaaaagcttggttctccgtgctaaccacttttcctgtcacttcatcaagtgttagtggtaatggttttcatgcatctcgccttcgttgttcaacattaaggttagcagcaaggccacatcccttccttggcggtggagctgactcacatgtcgacggtaccctactagggtctagtggaaccataccaccaccgtctccaccgtgataagttgatacatcagctgacattactttttttaaaaaaaaacataatatttgttagtaatagtgacaataatttaaaatcaataatataactggagctgttaacaaaacagtggcccagactttaagtacaccaagctattaacaaaataggggcctagacgtcattgtccccacttctttttgttcatgttgtaaagtttgggcatacctctcccgagcattgcctgaatctccagctatatgtggggccccgatgatgacttgtaaatgcccatccactggtggaggcagtaacaggtcttggttatagtctacttgggcggccctttcattctggtcgtccttgacatacttttgcacatgcgggttattttttgcacatctcctcgtacccccttgcgaatccatttgcatttcaaaatacttgagatgcgataaggggtcttgttttcctgggtacatcttggaggtcagcattttaaacatgagggctagctctagaacattgatctcaggaataaatggcaatctacgtgctgggtccaactcgagatcattgagcttttggccggccaagccttggaacatatttttcaattcatccaattttgcttgcacagatggatgaccttgttcggcctcttggccgatcagtgccacgtcaggatctctttgagctggatcttggatgcggataccggggtgagtggacaattgaacatattgttcgtccgaacccctttttctattcagatcatccctgagatcatgagttgttcccagtctgttgaatactgaaacaccaggttatctcagtgactggttggtttggccaaaaccgctagtctgggcagagttattgggtataacccaacctaatgaattgtgagataaggtctagctgcctaccacttggcccgtaggtggaacctgtgaccggggattggacgactggccattcagagtttgggtagtatgcccagcaggaatttctttcgagtcacctagtgggatgctggaggcaggttgctaattagaaacttggtaggctctttgtatcagtacggtggcctgtcttgtttggccgtccatggctgcttattcagccttcaacgtttctaactctctatccctccattcagcgaactgacgcctttgctcttcgaacgcaaggttcacttcagcacagagctcttcctgatcatgatgcaaggtattggtatgaccttgcatgaggccaagagcattatggaggttcaggatttcactgtcatctcctatggtcctctagacatttgttggtgaagggactccagtattgggagtacccaggttggctgctgaactggtgtttccagtctcttgcacacccggtgtgatcccagccagaggagatgtcacacctttacccacagtaggtggttgagtgttttcttgctcaagattggtgactggtgggacccttgcattccttagactctgcagtgtaggatctgccactagtggatccacttgatcgaccatgcctctgcgactttgcaacgccatcttgtgtgtttgattaaacttaaagcaaagagaaaacatggattattgctctcaatgaaagcaccaaaatgttgaccttgcttttagccaacgacaatgagtcaaataataagcgataggaagtataattaagataaaagatgaagtaatgaatagtaaagaacacaagattttaaagagattcgaccccgttagtttggtaatagcctactccccttggattgtattaactcaagaacaaagaatacaatgtttcctctcttaaagctctcacaatgaaatctcagagtatgcactcttagatctctctgaagaaattctttcgacccccatacccgtgagaatggatcactatttatagggctaaatgattgagggaaggtttcacttttgcttataatgtctataattggtaataacacacattacaaatttagaatacatagattgtgggatttggacagcttgccatattactctgatacgatccctggattatagggattgctttcttgcttcacgatgccaatcttggaatcgctaagtgttgatacgctgctcgtactgtctatccttaccctgctcggtcgggaagactctatctgtgcaggtgcatgctaagcttagttcggaacatttctctagccaggtgtaagaaatagggtccatgtgtcaccagtatatgcttccacgtcatagtgcaaaaaattggataacaactacaagaatgaagttggatgctgcgaaaggtagatgggtcgatgaactacctcaagtactttgggctcatagaacaactgagaaaacagcaacatggcatactccattcttgctagcatttggctcggaggcaatgctaccaataaaagtcaatattgcgacccatagatgagatttgtataatcaagaagaaaacaaagaactactgaaattgtccttgaatttacttgaggaaaaacgtattgagtcacaaatcactagtgcagcataccaacaccgagtgactagatacttcaacaagaaagtgaagaagaggctcttcaacatcagtgacttggtgctaaggcgagtatttgcaaatacgagagatgcatctgtaggagtatttaacccaaacagggagggtccttatgcgatcgaggcaatagtaggaaccggggtttacaaataagctcggcttaacgacccgctaataaagaaccactggaacgtggagcatttgcgaccttactaccagtaaactgatgttgtaatctgtatttctaatgtcgtattttgaacttcaattattgataaagctgaataattttttaagtaattacaaagttttattcttcaaaattacctgaggggaatatatatgtgtgtgaatgattaattgaaatttatctggaaatacatgatatattggaaacccactacactaatgtttttttaaaattttaaaagttttttcaaataattgattaaagaatctttctcgtaagaaaggaaagtcaaaagtagcagttgtaaatgagatttaactcataaaaaaaattaagctacatgcaaagttgaataagtaactgttggattttatgccctaaataaaacttatttcatataatcagatttactt

SEQ ID NO: 23685 - DNA, 3126 bp, Cannabis sativa
  modified_base (39)..(47): a, c, t, g, unknown or other
tctttattgatatttaaataatagagattacattgaaannnnnnnnnatttagggcataaagcccaacatgctattcatcgataaggaaatctctagttttgattttaagtccccgaaaagtatgttagcgtgtctctcatcagagttacgaatattgtgatatagggtcctgtaaagcgtcgagctgctcttccctatcgatggataacatggcaatactctaaatatcgtaaaaactaaaaaatctagggtgccctaaaatgtcccaactgatagaccagttcccaaccagaaaactgaatctgtggggttgacaggggaggaaccggtagacaagttcctacaggtccaaactgaactggtcgaccggttcagttcaggaaccacaaaaactcttctaagcaattcaaatcaatcccaaattgaaccaaaacttttagaccacctaattaggtcacaacaagcataattcaagcaataacatcaagcaatataccgagaaactaaaaataccattgatcaaacctcacaactagcctctaactcaacctaatctagcataaataacctcaaaatcacttctgaaaataggaacaacaacaattcaaacttatagaactctaactctaaaaatcatgcatagaacttagctttgaacttaagaaaataaagagaagggagctatgatgtttacctttgattaaatcactaagatcttcctagaataccctgaattgagctgaaaaaccctaatttcctgttggtttcttaagagctcgagagagaggtagagagagaaagttgaagaaagaaagagtttaattgtctaatttctaattttgaataaatgacatattatggtgtttatctaacttatttattaaataaacttgagattataaaacaaaacataactccactaaaggacaaagaattcatatggcaaaagaccaattttctcttgtctaagccaaaacgtatccttgccacctaagggtattttggtcaaacctaatacctcaaatatttttaatattcccaatgtctattaagttgccccactattactagaatactaaatcataagaaaatgtgattctatcggccaaacataagaccgaattgtcttgccaatgattgtttatccttgtgattaactactggcaatctgattcaatggaaccaaggggaatccgagtagccaaacacctatgtatgccttcaagtagagcttgtgcttctgcaaaaaagggagtagaagcaccccatttgtgtatggaaaaacctgcaatttagtaataatagaatgatggcacgtttactaaactgtaattcgaatcagaataatcaatggaagaaataaattaagttaaaatataaaataatcggaaacaatattttattttgttgtttactaaactgaccggaaaagaaatcagaatcattttattttgtttacataataaggaaaggtaatcgaaatgacttaatttaactaaattgtcattgttaggacatgtaatcattttttttatttatatatttttgaagggcatatttgtctttcttatttttaattaataaaaatataattaatataaagtaagttaaggaaagggtaaggtattctttatgaaaatggggagagaacctttccctttattttctccttaatttgtgtgagcctcactagtttctcccattctaaaatttagtaaacaaataaatgggaataaaccccatacaattgattcccattttcctttagtaaacatacgatagagttatgagaataaaattagtaataataattattagtaattatttattaaatgataaaaacttaaataaaattagataaatcttacaaaaaccacaaaataaaaaaatgacaatactaaaataagagaatgctatatcacttactctaacaacataattatatatatatatatatatataaatgaatttagtcttataatttgctcgagttgtgatttacaaattatttttaatcatgataaaaaatacaaattataaagtatataaaatactcttaccaaatataataaggtgtccgaaaatatttttaaaaaaatgaaatcttaattggaaaatagttatatatagattgcaaaatgataatttatactcttatgcatggcaaagattgaaagttgtgaagaaaattattatgaaataaaattgagtctaaatgcatatgtattataatgatacttccaatgataatctttcaaagcaaaaaaaaaaaaaaaacctaataattttacagtaaaatatatccattagagaagaacttgtcaacataattattgccaagtaatctgtaataaatcatcaagaattaaaaagaaaaaatataacaaaaaattaaaaaaataaataattgttacaaacaaaatgaataattgttacaagtaatagtaataatatatattgttacatatatgtacggaatattttttaatgggtattacccattaataggtactaaataaatttaattattattattataatagaacatataaactcttcatattttttttctttttttttttaattaattatcatttaaaaaaatttgtatgactattagattttttttataaattacatttgtagtgttaattagtaatatttaatataaatatgagtaaataaaaacaatacatataaactaaataaaaaagaaaattagaaaaatagagcattgcaaattaagaaaaaactcatatatataataccacacgatccttctttttttctttttttgtacattcttttatatatatatacatattgattttattactgatttatgaatacgtagttttataattttaataattttttaattgtgtgtatatatattaattatttaaatttcatatcaatgttggtaaaattttataagtttgccactgagtattagttaaaaataaattttataatataatatacttagtagtttataaaaaaaatataattttggctacaaaattttattttactacatatataaatagagttcatattaagttcttttatatatttaaaaaagaaatttttacattaaaaatacaaaatattaattttattac

SEQ ID NO: 23686 - DNA, 1191 bp, Cannabis sativa
tgcattaattaaattatttattaatttcatttagtaatcataaaataaaatttcaactaccatagtacattttatagtatggtcttattatcaagtggacaactatgcataacattccttttctttgatggaaaaaacctctttattatagaaaagggatcgagctttgagaattcatggttttatatataaatattccatcttacttcttacatgaaatttatgtgtttctcaaaattgtttaatttacctactcataactatattaatgaaggttttttttttttctattttttatttttaagaatggcctcataacacaccatcttcaaataaaaagctcaaaaaaattgtaacccccataatcaaatgttcaaggcttaattaaaagaaaaaaaaaaatgtataattatagggcatcttaaagaatcaacactactttatttgttttagaatttaatagttcaatttcaataaaatatatttacatatataaaatgaaagtaataacatgcaccttaggaaatttaaaatctaaaggaaaattttataaaacatacttatattaagcaaaaaataacaacttaaattaaaattaaattattgttggtaataatgtgattttgtttgtctgttgtttggttctttacatgtagtatttgtgtttttcaagctgaaacttttgccatgctgactggacttaattgggctcattcgtgtgagatttctctagaagcggttaaatctgattctctcttcgtagttatcgctatcaatatcaggaaggtgttcgcaaaatgagatgggtgtgttgttagaggatatcatagctttattgtctaaatttctgagagcagttttgtctcatatgtcccgcaaagataacactgtggcccatggtttggctaaacatgcccttagactagacaatgagttatgctggtatgaagaggttccagcaccaattgttaaagtcttttcaggattgtgctaatgtgaacgtttttcaaaaaaaaattattattggtaatgtaagtctactttttatatctccccaaattatctctctcatttcaaaaacctcacacactctctctctctctctctggtgcaataggtaataaagtacgatagtgttacgtataatagggtacgataaggtttaagtatgccataaattttattatgaca

SEQ ID NO: 23687 - DNA, 3561 bp, Cannabis sativa
  modified_base (81)..(85): a, c, t, g, unknown or other
gctatgagcttggagaagaagtatttcccttatcgttacaatgaatataagctgaaagattgcataataaatacagaatannnnnatcgtgggatttggacagcttaccatatctctgcaatctgatccccaagttatagagaattctttgatgactcacgatgcaaaagttgaatttgcaaagtgttggtcgctctacgcggattggtgatcgctttgcttcagtcatgcatatgaggcatcttgttcggactgtattctctgagcagatactcgaagtcgattccacgtgtcaccatcatgtgatgccacatcagagtgaaaaaattaggataacagataataatgaactatcacaacaaagaacacataattattccattctacaatcaccgtggacaattagtcgataattagtctataataagtcgataatcagtcaataaccagtcgataataatctatcgcaaaagataaaggcatcggttgataattagtcaataataagtccacaatcagtcaacaataagtcgacaattagtcgataataacctatcgcaaaagataaaggcatcagtcgatgatgacctatcacaaaagataatcacctatcgcaaagctattgattaacagttgataatgttttcgacaataactatgtgtcaacaatcaccaaaaaatatacacccactgttctctcaactgaggttctgatagaataggtccacgcaccaccgatctcgaaacatctgtatgttcttatccgtgacatcatttagtgaacgtttcatcattagatgttccacatacttgatggaataaatgccacaatcaccactgcataaagaaaccattaagaaattagtgtaaaagtaagaataaaaataattaggcactacaaaaaacaaagttacctaattttttccttcgaaacaatttcgtgactaactctatcaaaatgcatctttggaaacttgctgcagtcattcatttcaaccgcaaggatttggttattgtttgggaattctccacatgcatggaacaatgtagggagtagatcttgccacgttttcatgatggctgctaagtcttttttagggcaaacagtggaatcacagtcatacactgttattttccacaagtcgatgtttaccttaatagctacccaatgtgaatgttttggaagattcaacacgaagtagaggtaatcatttcctccccattttagatagaattggtcctgtataaaacgtacctttaaaacaatgacaaacaattgattcagtcgacaatatgacgataacaactaaacatcatagcacgtaaaaactcttattcctatcgagaacctatcgtgatactttcgataaatagttgacaataaccaaatggcaacccacaaaggctaaatattatcgagaactcatcgataatctgtcgataataactaaacattatagcaagaaaagactaattaatactatcaagaacctatcgagatactttcgataatcagtcgagaatagggaaatttgacggcaacccacacaacatactatcgagaactcatcgacaatctgccgataataacaaaacatgacataaagagccaaataatgtaccttaacacctctacagtagtcgaggacattatctccccatttgaagtcggcccctagtcccttgtgtgttttctaagcgccattgaaaatcccagccacataggtggaaagaatgatagctctttgcggaaatgtttttggaaagaagtgtcgtcgcctcctaagcatatggacacatgcatctacatgctgcatagaatgatacaaatgagtagttacagtagtaaattaaataaacgaaaaatatattgtaataataaaataataaatttttacttatagaatcttcattccaatcctgtcgtgtcaacatcttcgtaagccatacaggaccgtaatcaccagtcttaacgtcccaaagactatggttggggatactcccatacaaccacctacgaaaactttccaacagcctatcatctggtaggatgagaggatcaaaatgtgtagacgacttgagttttttcttcatttcagtgtagtctttaaaccatgtaggaggggtcttcctcctcttccaaactgaataccttctggtggtctctctaagggcagaatctcaccctgtgactggctctcaactatggaaatattggtggcatccgctggagtagaagtattctcatcaacataaggatcatagttgtcaggaattacgtcaacatcttccatgggaggtgattgaggatgtgcatctgctcccgacctattatgtattatactcaaaatgaccctgagctgctccataataaggttctgaatagccttcagttataggtggctagcctggtatgcctccttcagctgggcctgacaagtggaaagacacttatgctcaacctctatcctgtttaacctctgttccaaatcttggaactccagacaatcgaggcctgaagaagatgcaacagtagcaaatttaatatgttgcgcgaatttttctgcatggctttgaaaaacagcagggtcttgggcatcattttcaggaagggtctcattgacacccatctcaaacactatttcaacatcattgtaagtgattgttctggcatacgcttcttcatcagggcgagggagtaatgctctcaaaacattcagttgctgttgaaaaaaaaaatatgttaatcatttcacaaacctataaaaaaaaataaatagaatacaacatagaaaaaatacaacttgtcaatgatatcaataaaagataaataatacaataatgataggaaaaaaatcatacccttttagaaaatattggagcaagtattttctttggaatgtcataacttccatcaatctccttactgctccagctaagcattctgggtacttgtatcccatgactaacagcgaacttctttacaacttctgaaattgcctcgtaggcccaatattataatgctggtgcgtagccataaattgtgtaccccgccgacttagtgacttctttcttatctaacttagccttcatttccaccatgtctttctaaacagaatacataagccgactaaaagaagaaaatccctaaggaatctgaaaaaagaagtcaatatcctcaacaaatcttagtataccacttgtaatccccgtattcctctcacgacccattaggactccctccatgaacaagcacaaccttagcttgtaaacgtcctcgacaatctcacagtttaagaattgcgcagtaagatgttccatattcacaatcctagatttgttgaaataaagattcaacagttggtcgtttcccaagtgaacatttttctcctcaatggatggcccttgcatgaaattcaacccggctatgagagcaaactcaaccaccccaaatcttgccctgtttcttccaatgtaaaaccatacttcgttcgccttctcgacttgaaccttcattttgtgcagcattaattggtgcaccaaaactgaagagaaagcaaa

SEQ ID NO: 23688 - DNA, 2290 bp, Cannabis sativa
tctcatatatgtaaatattttgttattatattgtgaactatttatatttatatgtataaattgattggtttgaatatgtgatgttatataaatatatatatataattttactataattattatcacgagttgaaatttataaaaatgaaaactttattggtagaaattaaccatcttttactttatttgtcattgcagatatttacagcacttgggttatgaagtcacatatgtccgaaatttcactgatgttgacgacaaggtggaaatttctgatttgtttgtagttttctctatttctcatgcttggtgtttttgtttgagcttgttcattcttttccctcgttcctgtttctcataatagtgttagtatgtcaggatataatttgactgaattcttaaaattgtgaatatgctgtttcaattggattggaagttggcaaaccatcttatcataatgtccatgcttgtgatatctaaatcttctttcctttgtttcctgaaatttcactcttcatgtacatgcactttccccacttgcttttctaaaccctgaattatgagatcttcaaattttgatgactaagattggaatttatgcagattattcgtcgggcaaatgaaattggggaagatccactaagtttaagtaatcggttctgccaagagtacctttctgacatggatgctcttcagtgtctccttcctacccatcagccacgtgtatctgatcatttggaagaaataaaggatatgatatctctggtaactattttcccgatcatatttttgataacttaaagaccccaactgctaaaggatttcaatattaattagtggtgcattcttcctaagatcttatttatggaattgtattttaatataatatttttttcatcgtactttgcagatcatcaagaatgactatgcatatgcagttgatggagatgtattctttgctgttgaaaaactcccaaattatggtcaattgtctggacaaaagttggaaaataatagagctggggagcgagtggctgtcgattcaagaaagcgaaatccagctgactttgcactgtggaaggtctgaaagactatacaactttccatgtttctaatattggatatatatatatatcttattttatttgatgttttttggtttttgcaggctgcaaagcctggtgagcctagttgggacagcccttggggtcttggaagacctgggtggcatattgaatgcagtgctatgagtgcgaaatatttaacattcaagtttgatattcatggtggtggaattgacttgatctttccacatcatgaaaatgaggttgcccagagttgtgctgcatgccaagagagcaatgtgagttactggatgcataatggacatgttacgaacaacaatgagaaaatgtcgaagtccttgggtaactttttcactattcgtgaggtaaatttttagccttttgggtgtttttgaagctttaatatgatatcagataccatcatttaagcatgtgtcattttatattgtagattattggaaggtaccacccattgtcgttgagacactttgtgttaagtgcacattaccgttctcctctcaattacactttctcccagctggagagttcttcagatgctgtttattacatttatcaggtttgaagctttctaagaaacttgaacaatgtttaattgagattgtgacctaattggaatatgtgttaagttactgcaagctgagatttctctttttcttgcattgatacttttgtttgagcttctttatcttggcttaattattacttttagttgattttgttttttcaattgaaatccaagtaattgcatcaacttagtttaaatgactggtatttattgggtttcccctaagaattttcatttttgaagaagtcctttagaacattgtttaattgggaatccaatctgaggagctgttacagaactatttcacattcaatatgatcagatcttttgattgctagactttgcaagactgcgaggattcattatcgatgtttcaagaagggatcttgaaggaaggagcagatcaaagtggcaaaaccattcaactcgatcctgctgacgctcaagaatgcattcgtaagctacgcagtgaattcgagactaaaatgaatgatgacttgaacactgcacacatcttgactggtgcgtttcaagatgccttgaaattgataaacagttccatcaacgcagttaaggtaagagtttcaaacaaatgaacaatctctctctctctctctct

SEQ ID NO: 23689 - DNA, 1538 bp, Cannabis sativa
tcctttagaagtagtcaaaatcccttttcttaaacgatcataagttggaagcttttctagtgcagcccaagtaagagcctcttcatcatttatatcatcttctcttctagactttgaaaaatactcatctttattattattattattattattgcctctccatactgaagaagtactacttctcaagctaatatttctcaagctgtttccagctctataaaggtctcccacctccattttctaactatatgtatatctaaacctctctccaacccccttcaacttattacacatatataactttctatcatatatatataatatacacacatatagttatgccctgctacaaccaaaatctagttaattagttttaggaaaaattctataattatgactataactttattcttaaataaaattttaaacttaaaatactagggaaaatttgactaactatatatttattggaccaatttttttttttcttctaaactttaactatttaaaattagtagaatatgtcatttttttctaaaaccccattctctctctatgtaaacacgtatacggaggagcacacaatcgacccacaacccaccacccacaatcttggtcccttctctccgcgaccaccatgactacgactcaaggacccacggacccaatgaccactacaaacccaacgacttctctatcaaccacgacttcaacaatattgtcaaaggaataaattgtatgattaatgtttgttatctatgagtagatattagatttaggattgaaaatggccagatttgagttttgggcaaaaaaatagtttttttttttgtcaggtccgatggtggtccgatagtggtctgatgccttcctgttattaaaatgagtaaagattgaagacgaaagtccaatggtagcccgattatatggtctgatggggtcctatggtggtccgatagtggcccgatgccttcctgacgagcttaatgaatggagtttaacactataaatgaagatatggtctgatggtggcccgttggtggtctgatggtggcccgttggtggtctgatagtcacctgatgctactttttttatgtataaaaacataaaaaaaaaatgggcagcgtcgggttaccatcggaccaccatcagtatagaagagaaaagagaaaagtataatggatatgaatataaaatgtgtctatttttttttaattttaattagcttgtgttcaaaaatttaatatacaccaaatgtatgcatataaatttaaatttcccaaaaaaaaaaaactatacttatagcttttatagatttacataacactaaaaaaatacatggtctattttttttcaattaaatttatttattggctaaataaaaaaatagaattattatatggaaatataaattgacaaggaaaataagaaaaagcttctagaacaaagtagctagataataatatataggacgagctaaaacaataagttaggttttaaatttaatgagagtagtaagcttttttttttttttttt

SEQ ID NO: 23690 - DNA, 1999 bp, Cannabis sativa
  modified_base (68)..(73): a, c, t, g, unknown or other
  modified_base (1393)..(1394): a, c, t, g, unknown or other
aacattgggtacttatgccactaaaaaaatcattgggtttatgtcgcttacaaactcaaaactttggnnnnnnatgccgctatttaccctaattatatgataaatatgtatagtgtataatatatatattcggttagttatcggtttaatatgtcggtttgccattgacactagaaccgattgtgttaagacaattttaatcgaaggtagattttttagttttcagttttttcggtattcaggcagtctcattttgtgtaattttacgcttttgtttgttaatatttttaggtttagtatagagaggaagtgaatgagttggaaagaaatgattacaaaaaagatgaattaagtgaagctttgtagctagtgcaccaaaagatcatggaaaaatccaaaagattaggtgtggtcggagctcttaaagttgaagaactgaagaaagtggagtagcgccatggcataaaaatttaatgtcagggtgctaaaatgccaaaaataggcagtaaggtcgagattcaaaggtgtcaaggtgggtgtcaacgttagaatcttatgttgaggcattagaacgattaaagctcactgtctaaaaataacctacacgggtcgcgacattggataggcatgccgcgacccgttctaccttttgttgaaggcttcgtgtggggttcaaggacatgggtcgtggcatgcatatgaccatgttgcggcccacttatggtttttggcaaggaattttgagagcaaaaactttgagagatgagaattagaggtaggaagtaactttggagactatcatcattaattttttgatgagttctttattcttcttgacttttcatgttcttacttagttattattatcaattgttcataatgaaaatgagtagttaaactttttgttagggtgataatggatattgttgatttttctttatggcttaatgcaatttaattctttctcaatttcttatgtgcgtctattttatttgtgcttaattcttttaattgcatgatcactaattaattgtttatgtttttaattcaaaatataaaaaagtgaatgttgattactctatagtaaaataaacatagattttaatattggacgagagtacctgtatagtctatgtaacatttagaattttcatatttaatgcaaattgtatgtttaattcaccacagaattataagactttaccatacactttagattctatatatatcctaataataataatataaattgcaatagttaatccgatatcacatagaagttggaataggaactaaacttgtattagaccataagaacttgatgcaattgaaactaattgtcctagtttagtcattgtttttattgctttcaatttagatttttttttttttnnaaaaaaaaaaaaaaaactttttggaaattattgtcaccaaaaagaattagaaattgaattatttggtacttatttacagtcctgaatgatactttacttctattattatttgtagacgacacatgtacttgcgtattaaaatttccacaacagttgtccaaacaagttgaagatgttgaagtcatctatagacaagtcacaacaaaattatcatccttaagacgagccaaatagagctgcaagggaagctgagtgaggcaaatggcaaaataaagaaggcagggaaaaggtgacaactcttaacaaagacattgaaaccaagtaggagcggatttgggtccgcgatgcggagcttctcatggtcgctaatgattgaaacgacttgttgaagataaaaaaggacctgaagcagaagctggaagctatcaatgtggagaggatcactcaattatatgaggccaaggataaaagggttgcctagttgcaggacgtccttatgatcacgatctacacacttggcaagccgataaagatagaacggcttggaatcgactaaatgtaccccaaaaaaaatatatgaggaactacttgttggaaattatttt

SEQ ID NO: 23691 - DNA, 2435 bp, Cannabis sativa
aattttcaacggccaaaaaaattaataatttagtatatgtcaaagttgggggaaaaaattgctaattactctttatgttattgctatctttacattatatagattctaattattgagttttggtctttattttctacaagagatctttgtattttttttataagtcaaggtctttgttagaggtaataaagataacgagttttactagagtacctatcaatcacaaaagtaagtggaatacaccaatcaaaagacaacccgaccaagaaaaggcaccatatttgcactgattaagcttaaacaattgtacaccatccaatgttgatatactctagcctagtgaaaatgagtgtttacctcacccttaaacgtaacgaaagggatagactcttggaacgacatgaaaaattgatattcctaattttgacttgagttgacttgacttcgtacagtttacattgcacattctcagatagaaatgttaagggccaccacttgactccataatatactttacacattcttcccatctcaaaaaatggatcttagatcaaaacaaaagaaaaaaagaagaaatgctaatggatctgtccggtactgaaatgtggaaatatattgccaaattaatataagttatgtcatgtggtgttaaatattgattataaggtaggctcaacatgattagttaaattcgtgattagatgattagattttattagataatattattggcataaatattgagtcatatataaaaatataaattacttcacctattactaattaattttaagatgaaactataatttttaacgtggtattaaaattatatctctaacggattttcgatctacacctatcagatagttagtcatcactatcttcatggaatattggataacattatactacatggatcaaatgtaaaaatattaaatcatatataaaaacatagactactaattttgagataaaatcccgtaatttctaacaaatctaaataaaattttaaatgaaatatgttgtcttatacgaatgcgaattcgaactctactaaccatcattttaataattacaatgttagttaactactgaactatataaattgtattgtggtttaataataataataataataataataatttacataatttttttaagcaaatttatttcatacactatattaaattatattttattgtatataattttaataaattatactatataatattattttaaatcataacaacttcttctttttgaagcttcctccaggttttctctggtacagtaagtgagcgttctgctctatttctcttccctattccccctaacttctcttcctttcttctgtttattttgcattaattactccatgtcaaccttaatcattgcaaatacccccagatctttcgtgctcagcaaatatttaatgcactttctctttcccagttacatttaattttgacggcaccctcttttgggcatttaatgtttgcttagactctcactcttctctacttcttcctaaagtctcccaaatcaccctaaaccgtcttttctatcgcctccaatattaactcctgggtaatcattcctcctcctcctctgtagagagcctttccaggaatcgaagcgatgattcagagcttccctcatccctcgaggcgaccttctctctccaggtattttctacactcttcttctctatcctctgtctatttaatctctgtgtctggttcgatcgccatcctctcctcctttgtccattcttttcaccctaacccacccccctccttcaatggcttcctcttccaccaaccctaacattctcactgctctctctgaagaagaaagcctcatccacgatttcgaccacatttcactgcccaaatcactgaataccattctggcatctttttggcaactttccaatgtgatggggatcgccgccgtgtcttagaggaacagccttggcactttgataagttccttatcgttttctctcaccctgatgtctcccctacccccacccctgaaagtatctgatatacccccttctggattcaagcccaccttattccatttggccgtagaagtccccagctggctcaattcatagcggatgaattgtgtgatcttattgaaatatatcctctttcgctgctcgagaactctggtccttttcttaggattcgggtcttacttgatatcactaagcctttgcgtaggggaatgacaatccgatttcggtctatccatgaaccaaaatggataagctttaagtacgagagtctcccaaacttttgctacttctgtggcctcatggatcatacctataatcgatgttctaggtatcttcttcgttgtgacaactttccctcccctcccattttagaatatcgcgacactcttcgagcttcggctca

SEQ ID NO: 23692 - DNA, 2787 bp, Cannabis sativa
aaaaataatttttttttgtagtgaagtgcaggaaaataaaaaagtgcaggaaaataaaaaaaaaaagaaaaaaaaaagaaaaaaaccgaaaatgtttaaaacggttggaaatctaacgtggcatgtcaataataataatattaaaattattattgtaaattagataaaaaaaaaaatgttatactattataaacttcatttttaagaaagtagcttttagttttgtaaaaactgtgccaatcgggtctatatgttgacaaagatcataattggatacagatgttctcacgagcagcctaactagttaggaatctagttttccatgaatcgaaaggccattaaatttgtattttatcaaaattaattatgagttttttttttttttttcttgtatatatcacatgtgtaataataggttcgatggtggtttatgcccgtgatgaatatatataaatgtgtcatttcagagaggagatattatttggatgctctgaaaatgataaaattaggtataaaaaatatatattagatatttttttaaaaaataataaaattaagtttgccctaatttatattattatatggatgttaaaattggaggtttgcaactccaaagtgacctaacaggttcatatatacgtaccatatataacattataaattaatatccaattataattatggtacagatccgatgtggccaaatagatagagctcatttttgacagagtgtaagtgactgtcaccaattctacttattatattataattaacaagcatttacaagtgttaataaacagataatgtcttattcacgtgatacattaatgttaaatatatgtattatctctatttctgctcatgaataatttattaatatgacaacagtagaataattaagtttgtaattaaaaaaatggggtaagtaatatataattatcaccaaaggatttataataatataattgaaaaaatatatcttcactaccaattcatatatataaatatatggaggtaaaactaaaaaaatagtatccatgaagtctttaatgcaagttgcggtcgaagtgactaggccgaagacacgtttgtttgggcatcacacaccattgtcgaaaaaaaaaaaaaagccattaagactagcttaatagtgagagaaatataaaaaaaagagaggttataaattcgaactctaaacctttaaattattaaactattagttgattataaatactattacgttatactaaaaaaaaaaactattaaactagtatatatgtatagtatttaggaggtacgtacgtaggaatagtactttaattaattaatatattaagtatatggatacatatacagattaattatcacaaactgaggcaaatatatccatacatataatatgtgaaaaaataagaaagtcaaaatataaaaaaatatatgtataaatgtcagagtgatttataaaagaaaatataaaaatatatatgtaataaagaaaggaaacctatatgagatgtgatagtatgatataaattaaacatattcattttagattaatagtgattacgtgtacaaatctatacaatattgaagggctggcgtggaaggaacataaccatgcaagtatgcaacgaatgaggaccaaaatgacaagaaaaaaaaaaagaattaaggcaaaaacttcaactgatggagagagcagacaacacataataataataataataataataataataaaggcagagctctgtagaaacagcttggcaccaccctaaccacatacaagaaggggttagggttttaattgggttgacttgaagatcgagaagactggtctttggtcacactcgtgcttttgcttgtttcaattcaaattattaataattaaattaattaattattatatataagggctagagaagaagaagtactacaactactgacctaggatgaagggtcgttccaggaatttcaaaggaaataacagctacacaactttggacctttcacccaaattaagtatcctaatatattaatattattatattataatgagaaatgtaaatagacatcacgaaatgtcgtgtcatattattattagtataataatataagatttgacataatttaatttaataaatattataaaaatattatgtcttcttttgtgaggggttcaagaaaatcgtttgagagtgattcggttgggatcaaagacgttctctgtttgaaatttttgttttcatttattaatttactattattagtttaattcgaattaatgtttttatggcgttagaattatagagagttcattccttaattaattttaatattgtgatcgtatttatgtgttgaaactaatttagtttttcctattaatcttgtcttttgacataattctttagtcttttccttttaatttttcctattattagtcttgtcttttgacatgattttttagtcttttccttttagttttttctggttcgagtcttctcttttggcatgggttgtgtaactcagaataatcatggtgctatgacaacagcattcaagaagggaaagattggatgtgttcaacccaaaattgttgagattataagcattaaagaagcattgagttggattgcaactcattcaagggatagagtcatgttggaaacaaatagcttggtgtttgtccaaccgattcagagccgtatttttatgccttcacaatttggtcttattgttcaagatgttcgaaatttgattttggctttatcttttgttgatttatat

SEQ ID NO: 23693 - DNA, 2365 bp, Cannabis sativa
ataaaatacaatttaaatatatcttttattaattagtaaatctgattatattgaaataaattttatttagggcataaaattccaacaaatatagagaaaatatgattgattttttcactcatctctctcttttctcacgcctaatctctttctctttctagtctcacacgtgtacacactgttctaagtgtgtgtgagattaaaccctaatctcattatagtgtctcatgagttgagtacatattgtaatacctaaatttgttcatcttgtatgatctaatagcccactatattcttgagtattaaggatgacttagaagttcaaattgtggattcttcaatcaagttctggattagatgttcgattatttatacaaaaaaaattaaggatatcctaataggtatcaagaggtaaaaaatgttcatattagataaaaattattttatcaaaattttgcttctacttctgatatggaccataaaaactaacaattggtatcagagaaatcttcataatgatataaattaaatactgtgtttggtgattatgcatttatatatattgatatattgtgaatggatgtaattaagttttttatgcatgaatatgaatcgttaattatatggtaaattcgggttacgaattttacagttttactagaaaaattatacaccatatttgtggtatagattttgatgtaatttttattttaaatttatttgtaaatttttgttaaaaactgtaacattaaaaatccacaatacctcaattgatgagtgagctcaggtttaaggagtaaacctcgacctcatcgagatgacaagttttggacctcaaatggcgagccacaaatcccaaagggatgcaactataagcaatgaggcttgaaaggagaaaacacgtgatttctcacgtgtgcatgtgatccatgcaaggccatgcatggccatgcacgtgagaactaaagaaagagaacttgatagggttcgggtcacgtgaggagccatgaagggacctgattggtctcgttatcaattcgtggtggtcgatcgatcattgaggaccaatggtcgatgttggagacgaaggaaggctgaatatggtggttctcgagcctcatccccatcgtggtgagaaccgagtcttgcgacccgttttgggtaataacggagcacgactctgtgtccacctccactatcaccggtctagcaccgacgtcctcctcaattgccggcctcccatggtcgacgaccaccagccatgaccaccaccatccacggccaataggccagtctcacgtgtatgtatatatatttgtatatgcgtgtatgtgtatatttatagtattttatttattttagtaattaaattattaattggaaaaataaaataaaatgtaaaatataagatattttgttatgtgcattatccttttattttaatatgttaaaataaatctttttttaaaaaaatagttttattatttttgggtatatatatttatcattttttcaaataaatagaaatttagatattttatttttaaaattatattttataaaaaaaatatatatgtaccatataaaaattataattttttaaaaagttattagtgatgttttttaaaaatatattaaaataatattttttttaaaaaaaatttgttataagcttataatattttctaattaattaattattttgaataaataggataagtatttatatttatattattacataataaattaactattttccctagttataggtagttataacttattttgaaatgtgtttcataatattattttaaactaacctaaatgcacatttttcttgtcttatggttagtcaattaaaataattttaaacacctaactatatgttatagattgtataaaataattaattttagaaattaattaataactaattatttagaaatattttaaaatatttctatttaaataattaaataaattctaactatttaattatttaattacaattaataataaagacaagatatggagtttgaactaatttaataaaataatttggtaattagaaataatacttctaattacataatgatggattaatggtcaaaggtagatggtgtgaaattcctaaagctacattaaggaacaacaaagaaaaattctttatgagagagattagtttatttcttttattttaaaggttattattttaaaaatatctaatatttactcgattctcatttcattaaatgtttgattaattgtttgctaattgttagtacatgcatatttaattgtcatacataaaatctcacacaatttgctttgataatcatacatctcatactagaaacatgat

SEQ ID NO: 23694 - DNA, 4698 bp, Cannabis sativa
ccaaggaattccccttttataataaaatgaaccaaagttaacaatatttgtccaattgcagttcattgaaaagttacaggcaagttaagtttggttgtatatgcatccgaaagtgttgggtgttaaatattttacctacatttttttaccatgtattggatgaccaattttgttctcttagtacgaagaaatcataatcatattttggtgaactagtaatggaaaatatactgtgttatcctcaagccaaaattgatataataaacaatgattttcatcatatcataaacaaaacaaaagtgattgggcaaaataatagttgttcctttagtaatcttgcccaatttaagaaaccaaaacaaaaaatatactaataatacttactggaaagtgcagcacctaagttactaaaaaagttcatctaatatcactagaaagtagcagccagcccagattgaaatacatatatctgaacattaattgcatagcaaactacattagccaaaaaaattactcatctccaccctttgacttcttctttttcttcttcttttcgcttacagccacggaatcttctccatcttcacttttactcttcttcttcttctttttggctgtaccatcttcaagatcaccgttcacttgctcctccacctcatcatcaacctttctcttatccttcttcttcttcttcttttcagatttggaatcatcagcagccccatttgtagctggttcatctacagccatggcctcaccgtccttggacttcttcttcttgcttttctttgcagtaggcacttcatctgtatccatcgctgcatctgcgaagtgcaaagaaatctaatttagaaaagtaaaaattaagactatgcagatgggtaatacaaaagaagatttaggtccgggcaaaaaagaaacccttttttcagttctttcttgcatacctttgttttgatcactttcaatagcagatttcatcacatcaatgtttttccttggtgcaacacccttgtcataaaagtcgagacgctcctcaacttgttcacgcaatttctctccaaaagtagttgtactagtatctgcatcgcaagaggatacaagaaaagaaaattagtatccgagcaacaaaacaataagcaataaagcaccacacagcttcacagaagttttaccagcaaaacagtcaatacgggatgcaatagaacacttgtttgcaagataacgagccattcgacccttgtttttggcagaagctcggccaataaaagatgaatggaatataagtccatacttgggtgtgtttcctttggttttcaatgccctgaaaggaaaagaaagctaaagctaatgtgcatataaagagataattgaatgggtactagacattttctgcaccataataaatcaaaacaaactagctcagccaactttgaattcatcttttagaaaatgtttgaaatgcaaattaacttagcatactatcaagtttgacttttgacataatcacaaaacaattttggtaagcacctgaagagagccttctctgcaccgagaatttgaagggttgaggaagggcacttggccaaatttgtaaggctaccagcatgggaaatcaaacgagccccaacaacttctccaattaaggaggccagattgggtgcaatgtcgttcattttagtaactagataatcatataattttctcctgtagtcagaaaggtccatgaccctctgagcaaattggtggacattaatcaagtcaattggagacaaatcttgtcctgtgttgaaaaaagaaaaaaatcacagtcatgttaagttggtcgcaataataaaccagtaaaagcataaataaacatgcttgaagcaaacatattaacaagtttacccatggatgccttagcagcttcaacaatctcctttgccttgtcttcatctccaactatatcagttaattctgggatttggtcttctgacagctttgacttgtcctcaataaacttggtgactcgggcatacagatagttgtcattgacaatcttcaccaactcaggaaaatgccaggaataccattccctatatcaagtcaaaacaatgaatacaaccatttttacttaatcttcttcttataagttataaagcagtgtactcttcaccaaatggaaaattctcattaaaatatttagaacaaagatttatctatacaacaattaaagtatggaattcataagatgcttttatataaatttcaccacagtacctaactctcatggagaaggaattgatatctttatcaagagtatccaataggaagatagcttgaatgaccatattgtcgactctattcacattgaatttcactttagccctgctgtaactatgtgccagaccaagctgggccttgtcaaggtcaccaggctaagtaaaaagagccagaggaaaagaaacaaacagaactttgtaagaatagaatcatcaaaacaaaattacactacaaaactgcattgataaaaaattacaattataataagaaattttaaaataaagaatccaaaccttcaagtccttgataaacctatcaaaatgcaacctcacacctcgaatcagctcaagaacaaattcattacattggcaaggaattttagtagattcaaaaatgtttgaaccaagctttggttcagataatcctaagctgaactttggctttttaccttccttgacctttggaagattaagttccaaaaagcttctcaactcatcagtcataagccctgaaaatcaaccaaagtatacaataagcaacaaaccgacataaatccactcaaagctaaagtttctgaaaaacaaagagaacaaaacagaactgaacagaacaacataaatcaactcacactgaaagttcaaactaaacataagaaaaataaaaactagtttaaatggcaaaatcagtaaatgagaaagaaaaaaaatcaggtatatttccattcatcacactccacaaatccatatgaagcaaaaacaaaaaaaaaaagatagccacatgcacttgatactgtattgaggattaaaccacaaagagaaaaacaatgaatctccaatcaatcacttaaatgaaaacaaaatagagatttcttcaaccaagtacgaaggtattagactagggcaccagatattaagtcaaaagtacaaaaagtatgatattttgggtttcaaagttttcaccttcagagatagagttagactggttgagggcatcaatggtcgactcgaatggctgaaaagctataagctgaaccacctttccaaaacggttcaagtctgagaccgagttccgaacggcctcaatactctgaccgatctcatcgagtccctcagcgtgaaagaggccataaccggcggcgtgctcgtgtaaaaggtaaagcgccatggaagtccaaaacgcagagacactactcttgagtgtaaaccctgcaatcggctgaagtaaagaagaagaggaaaatggctagggtttaagaggttttatactttcatggctgcctcctttctctctctctctctttctctccctcttatttagggtttattacaataatggttctcaattatactcataataacacttcactcccccaattttaatatatatatttaaactaccacaacttttaaatttgttacatgttgagcccattaatgaaaaaacatacaatggtgaatctattaggaaaaaaattggaaaaaaaaagtgcaaattgataattgaatagctattttgaaatattatttttgacaatatattttgtaaaagttgccgattaaactttttattttattaaatgacaattgaaccttatattttctaaaatagtaaaaaaaaaaaaaaaatactctaaacttaatttttgtcaattttattttactataaacaacttgaagttagtttttagtataaacaaatctaagaaagtatataatgtcataatatttatacgtgtcaggttattattaagttttaacttggtgaaaattgagtttatattaatgttgcctaagatttttcctaaaatggccgcgtgtgagggtgacacgtggacctaagagaattcccacttacgaagatcaattaagtcttgggcagtgatgtgtatctcagggagcgagccttccagaggagagcacaaaacacggatttactctctgggaagctagaattacaataaggcatctctgggaagaaaagagatcttttgaacagtcacttcgtatttaatgccgcatgggggaaaacgtattggaacctctataaaagatatgacagatgtcgtaagcccttttacggcgattacacaacaatcgacgagtctagtgacgactacattatgaggaatcacatcagtcaatagaggataaaagattatatccacctaacctctaaaaaaaaacctacggtataggttatgtatttcctagtttgtatctgttaggaatatgtgcccctaaaaagctaacacataaatacatgtgatctcttcctagggatcccctaaaaaaacactataaataccccacagacaaaatgaaaaaggggtcaatcgatttaataaaggaatcaaagagagtaaagaagaaagagattcaccaagaacattctctgtaataaacactctcataaataacaaagactcgtggacta

SEQ ID NO: 23695 - DNA, 2846 bp, Cannabis sativa
gataatcctaggacaattgcactaaacaagcttgatatatgggtacaaatccatgatctccaatccggatttaaaactaaaagagcagtacaacaagcagggaattatatgggcgtatttcttgaattggatccaaaaaatttccaaggtgtttggcgtgaatacttgcgagttagagtccgtttgaatgttgatgttcccctcaagaggcgtatgaaattccgtaagaaaggtggtgaggcattttatgctaacttcaagtatgaaaaacttccaaccttttattttatttgtggtataatggatcattcagagcgcttttgtagtaagttatatgacactccgttggaggaaatagaaaagccttacaatatagccatgcgagccccaacgagaaaacaaaatttcctaacatcctctccatggctgcgatcaagtacagccgaagaaacacctaattctgtcgacaaaaatggtgctccgacgatcattactccgacaccatcaagaaaggctgatttggtgggatctcaacaactgcaaaataattcccacggtagtcaaggcaatataatatcatcatcccaagattctagggatgttggtcaaaggatagataatgccattaatgacccaacttttattgtgattgagaatgattccatgtttacctctgacgtggatatggatttggtggagttgaaaaggaaaagaatggaaagtgactcatataaagctaataatgtgtctaaacccaaggaagtggaccatgacgatgagcccaataatgttcttactaaagatatagtatttgcctttcaaaaaatgggagttcggtgggtcctggtttccaggcccagcaatcattatgagtatcatatgctgaaattatcgtgggcttgggaacccgcgggccttacaattccttgaagacatctgtgtcagtaagaaacccaaatttgtattcctttgtgagactatgtgtaaaaaggatattgtggaaagagtaaaaatcaaattgggctttgaaagttgtttcattattgaagcccaaggaaaaaaaggaggtcttgcactcttttggaaaatatcaagtgaggcccatctcttaggttactccaacaatcatatcaatattgagatttctagcactgggtacaataactggaggctgaccggattttatggtgaaccacaacgatttctccgcgcaacaacctggaacttgcttcgtgatcttgctgctgagtcgaccctcccatggtgtataattggagacttcaacaatattactgcccatggtgatgtgaaaggcggcccccttaccccgactcacttatcaacggcttcaaccttgccctctgcgattgccgattggatgaattgatactcggtgggtaccagtatacatgggagcgtggaagaggaggtcctgcacatgttgaaatcaggttagatagagcttttgctactcatgactggttctcaatttttcttgaagctaaactgtcaaattttgattacacctcctccgatcatacacccctgcttcttgaactcgaccctgctatgaattataaactagtaagattatttcgttatgagaatgcatgggctcgtgaacctttgtgtggccagctagttaaagattgctgggagattaataaaaatgtttctcttgctgaaaaaatccatctgtgcagctctattttaactgtatggggatatgaaattactggtaattttaagcagcggttaagtaaaagcaaaaaaatattgagtcacgtaaagtcagctactggctcttcttctactgatgatttctctgcagaacactgtaattattttgagattttagctcaacaagagatttattagaagcaacgatcgaaataattttggctccatgcgggtgacaaaaatagtaaatattttcatgctactgcaagtgctcgtaaatgcagtaatgaaattgttcaattgcaaaatcattctggagaatggaaggactggtctttgggtcttgatcatgttattgttgattatttatcttctttgtataatgccgaaggtaccgattgtgattatgttgtgagaggtatcaattgctctgtttctaatgaccataatgaggctcttttgcgaccgattacacctgaagagatgaagcaagcactcttcaaatgcatcctgacaaagctccaggtcctgatggtatgggtccagggttttttcagcagcattgggatgttgttggcactgatattgtgcaacttgttttgaatttctttgatacttaggagcttccacctggtataaatgacactcatctattgctgattccaaaaaagaaaaatttcactgctatgggtgatctgcgtcctattgccttgtgtaatgtctcttataaaattgtggccaaagttcttgcaaataggatgagagacatgattgatcttattatctcttccacccaaagtgcctttatccctggtagactcatatctgacaacattatggttgcttttgaagtcatgcattatctaaaacgaaaaagaagaggtaaaaacggtttcatggccttgaaacttgacataagtaaggcatatgatcgagttgagtgggactatttgaaagctgtcatggctaaaatgggttttgctagcaaatggatcaatctcattatgaagtgtgtcacctctgtcagatactctgtggttcatagaggtcatattttgggtcccattactccttctcgtgggattcgtcagggtgatccactgtcaacatacttgtttatcatctgcgcagaaggcttttcagctttaatcaaaagttatgaggct

SEQ ID NO: 23696 - DNA, 5590 bp, Cannabis sativa
  modified_base (3072)..(3075): a, c, t, g, unknown or other
tcgcacgtgggttgtggccgcccggagacgaggaggcacgaatttcgtcgttgctcagtgtgtggggcagtgaattattgctcacgcgcgtgtcaggcgcttgattggaaactccgccacaaggccgagtgtgcccccgtagaacgttgggtcgacgaagacggcgaaatccctgacggtgacggagccgttaatggtggcgacgacatgatgattgctgatagctaaaacagttttctttttttttcatctcaagaaggtcgtgataactttgactgtaacggatgttatacaagttaacggaaatgtttatccaaaaaagtaaaaaagtaaaagaaagtgagcgttagaaggactgttactgcgagggaaaccaggttggccattttagtgcaaacatatatagattttaagttaatcatggccgtcggatgaaacggagatttgttcccccaattgatgtatagagggggttttcggtaaaaatgatgggggctatttttttgttggggttttttttttttctggtactttttttgtactatagagcaacaccaattgtcagccttaattacggtcaaattaaaattctaaattcttcttaatagaaactaatcttttccatctttaatacaatatttttcctaaagtttttgtaaaatggtcaatactcatgaaataatcacaagaacctcacaagttttttgtggtctcgttttatacacgaatttgtattacctctatagatgagtttaagggtaacacaacactgggccaggcaaaatattttttttgatatggatgtataactacgtaccaatatccaataaataccaataaccatttatgatttttgaaaaggcttaactttggggtaaagataaggccatttcttgtcttgaattttaatgaaggatgttctcatttcaagctgtaatttaatttatagcatttgatttttctctctttatcttttggtaaaaataaaaaatgagatggaaaagcaggaatgcaggccaacctaaggctccaacggtactattttttttggctgcattattctgccatctttgcccaactttcttttctggcttttaggtagtcaaaaagagtcagacacatttaggtgattgaccaacaagtaaaggaaaataaaggaaaaataaataaaaggaaaaggaaaatggggtgagtagtggaattgagggacatacatttttgcagattggtgggatatggtcgtttgagaaatattttttttttaaaaaaaaaaaatttaagaaatatacatttattcataaagttttgtgggtagcataaaggaccaattgagtgggaagaaaataatagcaaaaatatatctatgtagccttgaatgcattttgtttttcaataaagaaagcatttttagtatatatttatttatatatatatcaatgtgggagtgcacttattctatcttttatcatggttttttctttatttttttagtctttaatttaattattttgggctaaaaatagctccaatattattttacttggtgctggtagtcatattatgtgttaatgaaattttaatttattgtgatggtggttcaaagttgagacattggtaaatccaactgttaatatggcaaatatgctcgcttttgattttttgtcaattaattctgagatttggcagatgcttgcagaggcttatttttgacatgtataatagaccataaatttaaaataaattaaaatttgtagcttagttgggatgatgtattttatgcatgttgtctaaatatgtatagtgtttggggaccaaagttgctattatagattagttattgagagagtgatagcctaatagggttaggttaagaaacggcatctactctcctactttgcatgtaatttataattaggcatattatagatttaagttcaaaaaatattaaactcaacatttaagttttaattatttttctttttctttttggaaagggcttattaacattaattataatttgaaattaagaagtaaaagattgttttttattttgtttcagttggagagtagcaatcaagtagtgtctttttcttggttttgttaataataattgtgtgtgccgtcctataattcttaattttatacaaaatatatagaagtagagattcatgacataataagttcattgagtggagaccattgtttgttgttgtagccactctattctcatagtgatccttctaatttggctacagtactaaaagctgtttattaagtctccagctagagtagcagtctatgattttgttaatttctgagctgttttttttttcattgaaaaataaaaagttataataaaaagctttttattagagaagctagtttatgaattcaaattcactgtttaaaaacttgcattgccgacaaactaactagatggttaaaggcctaaaaaaaaaatagattgtataactatttagactatgtagttattaaaataattaatatttaacaaaatatagttaataacttctcctttactatgtaatttaaatattatatttttaaaatatttatttatataaaaatatataataatattataaaataattctatcatacacttcaaggatcattccggtacattctctatctattttaaaatttatatatcacaataaattatttttcctaattgcaactgtttttattcaaagtataattataaatgctttttattcacatatctgactttaaatcatttgaatttagttgtatcattagttcatgggataattacatcaagaaactggttttttcatcaagaaatcgattttttcatcaagaaaccagttttttggtgatttttctagcgacaatattaattatgacgactttttctgcgttggcagcaatttcgacgttttttctggcaccaacagctactccgacgaattttttgacgccaacaataaactttggtgacttttccggcatcagtgacaaaataaaattgcctaaacaaaatatgggcttttaaaaaattttaattgggattatttcacaaatacnnnnaaataacaaaaaaattataaaaatttggtttcacagaatcttaaatatttttcttacaatttttttaattttatttacagaaaatacggtctttttatgttgtactcttgttaatttgttgttgattttcttatatatgtatgttattttttgttgttgttttgatattatttagatttatttttcatgttatttttatgtaatttttttgttgttttcatattatttctatagaaaaccgtaaaaatatttaaatataaaaatataattttttttacaaaaaatggtgctttaggttattattctaacctaatttatatatatggaatattaaataccataaaaataattaaaaacaaaaaaaatgatataaatttgtcaaacttaaaagtgtgatatttaagtaaactaatttcataatttgtctatcattttagactatcttttctttagttttctccactaaaggcccacctgatagaaattgggcctagaaatgatttagaatttgtagggttgggcctatagtgctgaagagaaacttctggtctgctaatccccaaattccatcttccaaaagggttgaagcttctttcagagtttgcgaccttagagcaaagaaggtggttcttccagtcacattctgtattcctatctaattcaattctagatttttacttcgacacaagtgttgctgcggttgttttctcaatcagtataatgtatataatttcttaaattttagttttttccatctttcatacatgatctagggtttttcctgttgtgattccttaatgatctatatgttttggttattataccgaagattttgagattgtgtgcataaatttgagttttaattaataattgatcaaaatgttggctcagattgttcaataaggaggtgaggaatggggttcataatggaatttgctgagaatttggtactgaagttgatggaggacccaaaagaaagggatcggaaattcagggaacatgtatatgcggtcaaggaccggtgcggtaagaccaaggagatgtggagctaccctcttcgtccgtacgggttttggaccttcgaacgtcacaacgctcagctccgttgggatgctcagattagccaggttcctggtcgtagggacccctatgatgacgtccttcaacagagctacaaaattgacaccaggtccaaatgaggtcagtcagtagttcttttcttatttactttcgttattttattttgagggttggatttaatttttcttgttttgtgattgtcctgaaaagcttaataaaattttatatttgtcatctctggttatattatagagttagagttagtaatacatatgattgaattttgttatggaattgacagagatgttctgagtttgtttgttggtaacttgtccatcagttcagtgataaaattgtcgtttgcaaattgctatgaatgatagctttactttgatggtagttttttagattgtaatgcacaaatgttttttcagattcatttcttgcaaagcatagaaaacattgcttatgtgtctttgggataattctcgtgctctacttatgaatcatcttttggagataatttggaaataaaggaagggagaagattaagtattatgaattaggtagaggatttaaaatactttgaaagaaactttggatattgtttcttggcaaacaatgtgcaaggaacatatacttgaagttgatcttaaaccctatgaaagtgttgtttaagttaatctgtccatttttgaacctgcaacccacttatgttatgcttgctagaactcccttatgaatcatgaatctgaagtttgtttaggtcttttatgaagaatagttaactagttatagcgtctatcaaattgtatatacatttctatcttttcgcctcccattgtttgtacattatttcagagcatctgtaatggagtgctaaaagtgtagtcactgtggtgtatatgcatatattttagtccatcttcataaaaataaattttaatggtgatgtataaaatgatccaaacttaacacatgctaaaagttgtgctaaatataatttatagactaaattttacactacaataaaaattacttttttatttagtcttttgccacttattaatataattaataactttttacattttattcatatatttgataaggtttttatatactttcaataaaaatataatatttttgttgatttttaaaaaagtaaattttgcattagagttttttagtaaatttgaataacattaactatggtaaaacgcccaattggctttggatgtgtccctcggttaggtggatgaaaatgggtatcaacgggcaaaattgtacagcagacacaatttgatttgaaatattctataagagagttttgtttgccgtttgcactccaacaatttataaatgcatcccaaatcaataaaataaaggctaattagtaatttttccccccgacctttgacatgtaccaaatcat

SEQ ID NO: 23697 - DNA, 3465 bp, Cannabis sativa
tatgtcgtaaacaaatcttatatacacatggacgacagaccaatatgacaattaattgtcaaaaatagatgaaaatagctaaatgctaacaaaatatcaattttaggagttttgtcatcaaaatttgaatttagagattaattgctaacaaagtaaatatattaaaaattatactgcaatttactcatatataaacatatatttatataaaagcatgtacgaaaacttagaaaattgtgtaaagaagaatttaaaaataatagtgtctcataatgaaattagataaatttaattttgaacttagtaaaattctcattaaattcatgcatctctctctatgtataaaattctaataacatttatttaagtatttcatttgaattttctaaattaagactattggggggttttgattttcagagagaaaaaaataaaatgttactatatggcaaagtttttatgggcaatctcaagtaagaaagacagtttttgggtcaaatagataaacgtcatttatctaaaagatcaagatttatggagcatttcagttaaacaggacttgagctactactttagaaagttgctaaagcttcgggaagtggctggaaaggatagaatagagtgagctaaaaaaggtggtaagttcaaggtgaaatacttttatgattctttaatttcagctaagaaggtggagtatgcggctaatgtttggaataggctaagcattcccaaacacaggttcacatgctggaaagtcattaacaactagttgttaacgagagatcatttcagtgaaatcatggttatccccaatagtctttgccctgtatgtgagttacatgaagaatcacacaaacacctatttactgaatgtatttttctagaaaggtggtggttgagattggttcttggttgggagttctgtagtggccgagagacatagcaaagttgaaaactttgtgttcgagacctcttactgatctgagaagcagagttattaattctgtgattgcagtgactgtttacatgctatggagaaatagaaataagtttgtttttgactctatctgtaattctattaattcaatttgtaaggaggtcaagaggctagtgaagtgaagagtattgagtttaaaaaattgtaatatgaaaaaaaaaaaaaaatcagtttgtgttaagcgtagttgagggttggtaggtctgtgctgttagcggtttgtttcagcttgtttgtattttgcccagttttgaataatgatgtttcttttgttaaaaaaaaaaagtttatgaaatttatgaatgtacttttcattaatttatttgtgcttatatatcatgctttaatttatttgtcttatatatcgtgcctaacacttatagggttcgtttgctacgccgtattacaccgtattatattgtatagtattttattgaattgtattttatgcaatatttttatgtaaaactatatgtagtattaatatttatgggcacctaaatacataatattttagtataaattaaaatttaacatagtattatataaaaatataatatataatccaattcaataaaatacaatacaatacgatctaatacgatgttccaaacgagctcaataatgtcatatcttgtctaaacctatgttcatattctcgtgaaaagtcctcccatatttaaattactagttcttagagcactcacattagtgtagctaaaataattcatctttaatttttagttaaaaaatgataaaatagtgctatatcatgagctaaattatttttaattttaactcaaatactattcatgttttacaagtaaatataattttctagggttttggacttcttcaaatatttttcttcaattttttattaattttttatttcaacattaattattatttattaatattttctatttcttaccttttttcttattttaattaataaaaagtatttaagttataaaattataatgttgtaaagaaaattataaagaaattggtgtataatgtaatgtaaaagtgtgagttaaaataaataaagttgagttttaataagattttttagaaaataaaatagagacattgatgtgagtgctcttatcagactttaggtggcatttgattggaggtaataaaatagaatgaatcaaaaagaatcaaatttcaccattcatttgttttttgcatttaaaagtattgaatgtcattacaatggaatgtcctttctactattatggtagaatgactattttatttttaaacaatttaataattttttaattaacttttttatataatttcaattttatttcattctaatgagaactgttattacttatttctttttttattcttatatattcattcattcgccactttaatttgcattctttagtcgcactaaaatggaaaatgtattattgagtgtacactatgtgttacttttatctttctatttttttttaaataaaaaaggtactcttatcttattaattagtgaccctacaacaaccacatattgttgatgtgtcacaccataaaggaaaaaatgggtcacaataattaccttgattaccttagaaaaaataaataagttaccagtattatgctaaagaatctaatctaacatagtgatgtcatagctaaaagaattgaaatggtactatcataatgtccatgtcaaaatgttgccgacttccttttcatgctttcgtttgtttatttgtaatatattcttctctagaaaaaaaaaatataactaaaaacaaaagcacatgttgttaaaggtttgttttatatcagccccaagggattgcattttatttgttggatttgctgctccatattgctctaatgtaacaacaaatatcacactattttaccgtacgtactaaagtgcacgatatatatgtcctgcactataatacacagagcattcatttttttttattattattttgtataataatatttatatatatttaggaaaattctattaatacaccttattatttgtgtttttgagaacaatgacatgtgtaaacttgtaacgttgcaagtcagcttaccggccaattcactaagccaaaatagactggcggccgagtgcatgaacaaagccggattgggatctaaagttaactacaagcacaattggactctgacttcaaatttaattatcgctctaccatgacgaagtcagacctttaagattcgaaagaataatacttgttcaaataaacgaatgctcaaaagaatgcattcggatgccgtcaggtgtcatcccaaaagagtagtcgcaagggtatcacggagagtcgactgtttgggaccaatccaacctggctcgcttctgacaccaaatttcgaagaatcagaagtttgttccctgtgtcagacctgggaaaagcacacaacgaaaaatcaaaccacattttggctaacatccactactc

SEQ ID NO: 23698 - DNA, 2003 bp, Cannabis sativa
taaatctcaagaccggccctaatatcatctctagaaactgttggacacctaatatcaagtaataatgcatggtatatgacacaacaagagtacttaatactactaagcatttctcaaataaatatattattgtttaaattaaacccataacattaacattaattgtttaaacccgcatgcctagttgaaaatcccaaaccatcaaaactatataaactcatcccaatgctcatcttgtcacccatcaagaacatatatagtataattattattattattattacaatttaattttctcaaacacaaaaacggcgtcaaaggatgtgacctttttagcaaatcattacattccatacctataaatatatatataacttacattaaattctttgttgaccaagcaaagcaatacttcattttgcttctcaattaaattttttcttttttgttcactcacgggggccaattaattaatccatttattgttttttgtgagtcccaaagtaccattttgaagtacaatttattatataattattcaatgttcccaaatggccaattaatacttaattgtgcttaatttcttcttcttcatatggatgcacatgcacacgattatatatatataaatttttgtgtttagtgcaagtggtgtaattaaactttattatttgattgttcaacaagctaataataataataattgaatcacttgttgtgctaagcaaatttaaagaattaatgttgttgtgagaccattaatattattatacaaagtttttgggttcgttagttcattcatcctagtcttactcttagttttaatatttatataaatatataattaattaaaatgttttgaccatgagaaaatgtctcccaataacattgcacctattgctggcagatgttcccatgccattgtcagccaatttgcaaattaattataaacaacattactcattaattaagctacctatatagttttctcatatatttatatataaatattatatatagcctaatatataggagaaaggcatcaccaagtatgtcatattattattattagtattgtcgagttttaatattaataatgtgaaaaaatttaaataatattattatttataaaatgtatgaactatacttatgtaattgattttgacaccttatatattattttcttattttactttcatattcaaaaactgagattcaccgacgtgattggtgatccaaaccgaatcaagaaaagaacacagtaaaaaaaaaaaaaaaactatttttagactcttattttttttttaaaaaaagaattatgtatttttttgtaaaagaaaaataaaataaaactcctaaactaagtgggccttaaatacgagcctaactcgtctatgcataggatcggactagctagctcgtaatcgatcctactttctcaaccacatttttataacaaactttgtgatagtattaattagataccaatatttaatatataataagatagattatgtatattgtatatatagataggaactcatcaaataaataatttattatttgtcgggagaaaaaagaccatgccttctggtcttaagacacaaaattataataatagcatatgttatttaattataatattaagcttaaaaataaattttagctttctattgtcctatattgtaattacaattaacctaatctctccatgtgttttgtatttaattactactcaaatagaagcttcctatggttgagcatatataggttccttgaatatgaccacacacataaaatgatatatttatatataaatatatgtatatcatatatgtatgtgagacttagagttgaggctatacatgtcatcacaaaaatcatttaatatttttagtggaatttctaacattttaaatctatgtttagcatattttgtgttctctatacttaatttacactatcaattcatattacaaaattttcaacatttctatatatat

SEQ ID NO: 23699 - DNA, 3416 bp, Cannabis sativa
  modified_base (920)..(928): a, c, t, g, unknown or other
  modified_base (1148)..(1152): a, c, t, g, unknown or other
  modified_base (1199)..(1204): a, c, t, g, unknown or other
agagagagagagagagaagaaaacccaacatcccccatatttgcttgctcctcttcttcgaactcttcaagatcgttgtccttttcagagaaatcaatagcttccacacccagtataaaagccacagatctcgttttttcatcacttgatcgaacaaggttaggccccttttcttattcttcttgccaaatccattgattttccctttaatccttgccccctttattatggtgccagtattcactaagagtgatgaagtctagaaagagagagagaaaatcttttattttctcttcactataacttttcttaatgtactttttataaaaggcaatgaattaatatattttcattaaactattttatttattattattatttttaaataagttacttttaaaatttatttaagcattttttttaattataatcgattttgtattctctttcatcaatattttggactacaaagtcagccccaacttggacatgggaccttaacctagtcgactcccgaccctaacctcggcccttgaccttggtacattggctcaaattcgagacccgacctccgaaccttagacctaagattcgagaccctagtccatacccatgatctcgactgaagccctggcctgaacatggatcccgatcatgagtctcgagtcaaacttgggactctagcccctaaccctagctcaaactcgagaccttgtacccccagtggaccaccaacttcagcctcgatctgggatctcaactatggctctgaactaaacaaagattaattgtacgtaaatagtgagtcaaatataacacaattttttttttttttttgtcgagttagcactaacattatatcttggagatggttttcaagaataagtaaggattcattaagggtaaatactattttggannnnnnnnnttgcaaaagttactaattggaccctctattttgttaaatgagaaaatggaccttgtattttccaaaattgtacaaataggaccatgaactaattttttgtcaaattaaaacttaataataatctgatctagagatgttatgacaaaactggttaaattttctgtatctgttcgtattaaaaattatcttaaagttatattaaaaagagtaatttgcggcnnnnntacctaagtttaactcccagttgcaaataaatatttaagtttaattnnnnnnggtaataatacttaagttataatcctgaaacttttatagatacctaactgttaattgttaagtaaattgccacgtggcaattcctaattggtccaagtcattaaatttttattttaaaaaaaataattaatataccaataagaaaatgacacgtggataataacataatattttaacggtaggtacctacagagttccaaaaatataacttaggtattattaacgccaaaaattaaacttaggtatttatttgcaactgggagttaaacttaggtatttatgccgtaaattactttattaaaaaataaaattgttgaaaattgagttaaaagtcttgtttttaccattttggaaaatacaaggtatattttatcatttatcaaaacagaaggttcaattaataatttttgcaaaacacaattcaaaatggtatttaaccattcattaatatatatcgattaggctgacataaaatcttaattaagatatattatttagtatttaaacagagtattgcaccatggtaaaagggttggtgagaaaattaaaagacattgagaagggccctcactcattttttaaaagggatattaattattgtgaaggaatatttgatatcgtaatattgatgtctgtggagaaacgtcacatatatggtactgtgttaaaagcacttaaccacttggggctagctcaagtggccataagtgggtgtgtgagtgttggaggtcctgggttcgagtcccaggtaaaaacatgttgtaatatattgttttaatatataaacgcttatttaatatataaacgcttaaatcaaaaaaaaaaaaaaaaaagcacttaaaccaaaagcaattgctggagagactgaaatacatctttttcagccactatatatgctaaattaattaataactaataagttaaggctaagctcttttttgtgtttgccgactgtgaatttctgaaagttgagattattattattagggcaatgataatgatattggcgtttgaccaatatatgttctcaatcaaaagcatatacatacagtatatagctgtatattgtccaacattattattattattattattatgagtaatctttggtacaattaattagcatattctatttattttaatttaataattattataaaataatattaatatattatatgtggtatactgggcaagtaataaaatgtacacagaacatttatattagaagagctataatgatatttcctttaaaatagagaagaaaaaatgacgaaaaattaatttcataggtgaattattttaactcaaatttttaaaaatgttacaattattcatttctcaaacaatattttaataatatgtaattcatattttattattatttattttatatatattaaaaaaaataatatttaaatgaatggagtgattaaaataaagaagctaatatatggtataatataaatatttgaggcaaaataaagaatatagaattttgccgtaatatattttaaagaattgagtaaagaaggagatgtgataggggtgtgcataaatcatccaatctaataacaactggccgatccaattagcaccgaccgtcaaacattgaatatataattgtgatcggatcggattggatattattttttaatatccaactggatcagatcagatattggatgaggtgtccgaaaattcaatacatccaacattcaattgaactaattagtattttcatttagtttggatgagtaattagattttatattgttatatgtaaaatatatatatgtttatgcaaaaattaacattaaaattttactctttttttttttgatagatccaatctaatccaatacatactggacctaaaatattagatagatctaatctgatccaaaatatactaggtctaaaatattgaataaatctaaatcaaaccaatgaatatatatgaaatacacccaacgaatatagaagcgatccaatctaacaaccaatggatgttggattgattggatgactgaaattaattggccatcagatcggatggtaaaatttaacatccaatgtataattgcatcggatctggataggcataaaatattggatgtgatccaataaacacccctaaatatgagtgctcttaaagcatctcgaatagaaatgccaattggtatagtttattgcaaaaaaaaaaaaaaaa

SEQ ID NO: 23700 - DNA, 3038 bp, Cannabis sativa
atccacataattattaatatttataacatttataaatatatatatatatatattcatatattgtgttaagctagacactcaaatattataactaagtctaattatggtattcgaattttttttcttttttttttaaaagggaaatcttcattaataacaaaatcaaatagcattaggcatgtcaagatatatttcttgactggacacaagggatcaaccccaattcacatggcactagctttgttaatcaatgcataattggctaatacatgagctactctattggcctcacgaaatacaaacgagataccatcaacactatcatacaacaagagagttcgaatttgatctagcaaacaatcaacatcatgacagccttcttccttttttttggattaactgaatggcttgtaaacaatccgattctatgctaaatcgatggaatttacgttgtattccaacctgcaatcccaataaaatagcctgcaactctagctgaagtggagcaagctctctaatgattactgtagcagaggcatagtgaacccgtcccccataatcacggacaacacaacctagtcctgatactcctcctccatctttaactccggcatccacatttaacttcatatgtcccaagtcaggtgccacctatttcgcacagtcccgcctaacccgactcccaccagctactccctccacctgaaattcagtcagaaaggacctacaccaatccaccatatccccagctataggagccttccctccatgaacgatattgttccttacattccaaatgttccaagtaattactaggaaaaactcaaacttggttttatcccaaagccgagccattttcatcaaaaaagaaagcaggtcctcacccttaatttgcttcatgtcatccttcaacccgctcacagcccagaattctttttgcactcacaacgcatgagctgccgtattggtgcctaatattaaatattttaattgatgtctcacataattaaattatgtaaaattcaattctaaattataacaaaacaaaaatattccatataaaatgatatttgacattactattgccgcttagcaattttcttaagtgtggagaatataataacttgtggaagactcatgccacgagtaacactgttaaccacatgccaaacattgcttttatgtacacaatataatttcataattcatatgagttctcccataaatacgatactatttcaaatattatatattttttattttaccccaaacataatattttaatgttttgataattggtaaaatatataatattaatgggtactatttatttgttacacaattttcattttccaattaattaatgtcaaatattttgattggcaaaagactcacaaaatttcacttatatactagtgtgtggagacgtactagagtcacgtaatcccgtcaaaatatatagattaattatgtattttattttcattacttacgtttaaataaagacagtgtgataaatttttttaaaaaaataatgtgtatcatttgtcatattgtttaaatgtatgctcgatcatatgatttttttcaacattatatactgataaaacaaaacaaaaatattaatataatgtgtaagatcatggttagtttaatgtaatgaaaattgttatgtaatcaaaattactattataatatttgattttcttttaaaagtgttgtaatgagataataacgtaatgatgattatattatatcatggaatttttattttattgaagaagttatgtaatgagaattacatcacaaatattaaataaaataaaaataaatggactcaaataccattttttatataagaataaaaattaaaatatagggataatttaatttattacttattcaaattttattccaacaaaacataaacatcgtaatcaattctaattattattcttatttcaccaaactaaatattatttaagctcgtataattttctacaatattttttactaataagaaaataaggaaaaaaaaaactaaaaaaagaatagcaaacaaaattgaaaaaacaaacaaaacataagagaaaaaatataggcaaaaaaatgtacaaatgaaaatgattaagtatatatattttttgaaagtggagtgcataaaagtttttttttttttaaatgagattaaaaaaggattgagatttatttattttttttttttttaaaaaagaaagaattagccaaatatagtacaatttttacatacatcattagagatagtcttgcaaatttacgtataattttaaaaaaatctaatcaaagttagaaagatatttacatattaataacgaaaatattaaggggcacattaaggtgtcaaacaccacaaaaggtaccatactgttattggtgcattttaatatcaactctcaaaaaatttaatttaataaataattgggaaaacttctaaccaattattgggtagcaaatcggtatggtattgaatacctcaaggtgttacatagcaataatagtattgtttacccaaaattttatgacgatgatatgtcaagagtagtaacacgtggcacaaaaatactgggactaaattaatgaagaatatgtaaagtcatgaccattgagataaccgccaaccatgaagtgttagtctaggtgtataccccaacctccctacaccttcatggtacaagtcatgcattttatcatagatacaatgacattctcaaaggtatatggggacatccacattacaccataactactgacaacggacaaggggtcacccaacgaagctggttgtcacccttgtcacccccttaagttgggtcacagggggtcacccaacgatggttgttgtcaccccctcaagttgggcccctgggggtcacccaacgatggttgttgtcagccccctcaagttggatcccaaggggtcacccccctcaagttggctccctgggggtcacccaacgatggttgttgtcaccccactcaagttggatcccggggggtca

SEQ ID NO: 23701 - DNA, 1133 bp, Cannabis sativa
tatatatatatatatatctcattgcacaatgcagtgcaaaccaacctaaattcacatgaagatcatattatcatagcatcaactcaattcagctaaatactctaactttattatatacatacatacacagatatatatatatatatatgtatatatatacgtacgtgtgaggtccaagttccttgacatcatgttcaacaatgaaatcatatcttcctccagctcgaatagactcaaccggagatttcgaagtatccaaaagcagaatcctctgtctctcagtttgaatttccgcctattacatcaaaaccaaaattaatcattacaaacgaacaaaaaccaaaaaaaaaaaaaaatcgaaatcatttcaaaactgagatcaaaatcaaaaccttaataatcacatccctaacttcaaaactagagctgttattgatactaatatagctacagaatgtttcgcccaaataaatagctccaaaagcttgaggaagaacgaggagtccagagagaccgattgagtcggagagatcagggaggaggaatctagaacggtaggtgagatcggaatcgacggtggaggaggatagagaagggagaagacgagggagttggaaggcggcgattggatcgtcgaatatgtcttcgcctacgaggagatcggttgggtcgagacggagtgggactggatcggaatggaatgaaggtctgcatagtctcattactctgaaagctaaggaatgggatcctccggtggctccggctccgcttccgcctccgccgccgccgctttggccggtggagctcattttcgaatctgaagagatttttcactgattttttttggaagtttggttgtttgagtcgttatttaggcctagtttgttaggagtaatattgtataatagtctctagataaaagcaatgaattatattaattattacaagtaaattttttaatataatttaagttgtattatttaatatataatataatagttcgtaatagtttttattataatatttataaaaaaatcggggttaactccaatctccgactaagattcggatcccggactcgggacacggatagactgaggatccggatttggacccgagacccagactcgtga

SEQ ID NO: 23702 - DNA, 3593 bp, Cannabis sativa
acataccatcatcatcatcatatagagcatgactgaagtttcaccaatactttacatgatccattgtttggacttgcaggattttatacttgtcagaagttggcaaaccaatcaatggtgattttgggttgactatcaaagtagtaacttgtgtgcttttgtgattttcttatagagttttagactgtaaaaacaacaaagtaatttgatggggtgaattgagcaggattgagagtgaacttctttgcagagcctatttcgtcgcgaaagagattttcgggcagtccatgcattctctcttcaaagtgaatgaagaaatggtttcaatcagaatgagtttattcttcatgtcattgtctgttttttctaaaaccacatttctcttgtttatatactcaaaaagagcaataatatatataaaaattatgaaggtcatttattttatacaatattttgatacaagactggtgttccacaccattacaaatgttgcagcatgcaaaaatgtttcagtagctcaacctctacagtggattggattttggcaaagaacactatcacatataactagccttgcatctaatttatcctcacttcaagaaaatcccaagtacatgatgatgaacaagaaagtgtatgcacataatttaaataaaacaactcatataaatgctgttgtaaaacttctggctatgaacctttcatttcaaatattagtgaaagcaaggctctttcatcctaacctcatctattgaaaaccccggcctggcatagtatgacaccatctttaaggctgttgttacaaatcagcgaaagccacgaagaaccttgctaggatcaagctggccactgcagtagcttgatgaaacagtagaaatctcttgatggcctttccattcttcaaaaggtttcaagacaatcgagttttccacagctgcagaatccacacacaacatggttttgtagtcctcgtcacccaaatcagaaatagccttggcccttttgtcccaaggattccatacagctaaaaccaccacatgaaattcaagcttcattagtcacagaattcagtattacaataaaatcatcaaatatatatatttttttgccataatagttttcatcattataagaacctgcatctggcatgccaaccttcctgagtacaaaggttcttttcttctcatgatctataatggcaatctttgttggagagctcaaataaactctatcaatctgataagaaataataacacattggcctcagaaattaccattcaaagtaataaaaagcagaaagatcattttgttacctctccatcgaatgtaattgcatcagcttgttctgtaaacctttctttgcgtatcagattatcgaagtaatcaagcgtttccaagccctctatacgcacttcactgcaaattaaacagcatcatgctacctacagcctacttctccagcttagttacacaatttcgaggcacatgcaaattctattgaggcctaaaagcagaggtaaattataacatctatgtcaactaccttacctgatatcagatacagacaagtagttacgcagagcaaatgtaaaagagaacggcttgttatccaagtttctcactcggggtatgagtgtgagctttccagaaccgagagtgactctaagccgcagttcatatcttcagaagcaccattgaaacgttaagtaaaagctgtcctttcacatatactgcaaaatgattttagttatcacattcttctcgagcatagcatagcatatcatagaatacctgcgcggccaggtcttagaatcctcttctgagggtctgaggatcaaatccactgatgactgagtgttaactgcagccaaaggagagggatcattatccaatgaccataacctgttccttgcaaatccatgctgctctagcgaacccatagtcccaaactgcaaaatttagcagtagttaaggcctcataatcacatctcaacaagatcaaaaacagaacaagcttcttgtagtgtttttcttgttcttattaacgaacctgtggaaagcaaactggtatacctccccttattgcttttgatgttttccgaattgcctatggaacaaaatttgtgtttagttaaaggaaagaaatttcatactcaacaatgaaagtttggctacaaatcgtggttttggttattttttaccttgctgctcataaatagaagttcttctcttctatcattcttccaagaaacaacctgccctccatgtagaagaaccttaaatcatagaatgcttaaatggttaattacaatcacaaattaaaaatgaaaaaaaacccaatttatataaatttacaaaacaagtcaaaataatcattacactattaaacacaaaatacccatataaacaaatttatctaaaattcattatgagaggtgattgtgatgataatagctctgcatgtcccactataatccacattcttatggagaattttcaacaaagttcaaaactttattcataccccaccatataattcttgacccttttgaaaagcttagctttgaataacctataacaatcaattatatcataatcccaacaaaggactgtgttgtccctatataaattggcaattattattcccccaaatttatatccatttcttactaaaacagaaaagagaaaaatcaaaaccaaaaaaaaaaaaaatcattaatggaacacaaaagtactaacctcggcagaagacccgcttggctctgttaatatgattctgggaaacccttcagcttcgtttactatatttaacggcataatcgttttgagacggaaagtctctttaatactactcacaattgggttcactttcccttttctcttctccagctacaacaccagaaaatttttctcatcaaccaaacaaaaacacaaaacttgactcactcacacacatacataataaataaacaaacacatattcatcatgatcaagattggttttttatgaaaacccgtttctctcctaaccaaaagagaaaagaaaagaaacagaacataattatatgatcgaaaggaaaaaatgggtcgtataaagcttacgttggtgtttgtttttattgtttttgtatattattaaaaaatgttatcggtttcgagtaaggaaaaattaatattaataataataattaagaagaagaagctaggctacaatagccaccaaacaaaaaccaactctgggtttcgtgaaaagtccatgtttatagtttatacaaccatcaaccatatatatatatatatgtatatatataaggagagagagaaagagtgagtgaaaaataagaatggatatccatggaaaaagaaccaactatactttctttttgtcctcggatgctctggtcgttgtccctttcagttaacttctataatcctctactctccaccacatacttatacctgcaccttatccaatatcatctcgccacgtcagctttctggaccaaggctgagattcctcaatctaataataatagtattttttttatttttatttaaataaattgtagtataagtattaaaattttaagttt

SEQ ID NO: 23703 - DNA, 3193 bp, Cannabis sativa
  modified_base (2372)..(2390): a, c, t, g, unknown or other
caatttttccttgtgtgtccaatacaactaacagagggttttctaaaaagttcaaatgcccaatgatgaacttaacaaccactaaatccagttttgaaggatcttccactgaataccattccatctggtcccttagcctcttaaacaattccatattctcctcactccaactgttattagaatccaggttaattggcacccaaacaacctcaaaattacttgatatacgtgatggattgtgccatttttccatgtacatttgttgaatgattgcacattcagccccagttgtgagatcattttccaaacccgagatgaacaatgctacaactttgttagtcaaatctttattagagacctgttttggtaaaacaccagtgatgggtaatgttacaatatgcttcttaatttcatcatagtgcaaaaatcaaaccagagttcaaagatatactgaaatagtaattgcacctttttcttgtagtagcaatcatagagtcctggtttgtcaaacaaaatgttcaaggtctttgagttatctgtagtgtttgatgatgatcctaataaaatttccgacaactcttgatatctgttagcagtactgcctcttttattttctgaatcagacaagattttatgagttagataccaaacatatataatttgtgcatagtgcaattctattgtagaaaacaaataaataaacgaagaaagaaaagaaatcattggtcctcactggcagatctgttacggttttcaattagctccagaagacggccttttatgtcgttgagttttttcactgatttcgattgctcagattttagcaacctaatagaacaagaaaagttttcattagaacaacacataagataagatagatgtatattccggcaaaagtgtccaaaattataaagttggtattattgtatttttttaaaaagaaagtttatcaatattataacaggaaaccactcaaacaaaagatgcacattatgctaaacagttagacaaattcagctaccaaacacgcagtgactcaagagagaaagctaattatacaagcgaatgagtattagcattattagtttgcttacaatgaaataatgtaatagaagaaaaagaatcctacacactgaaaatatcatgaagcacaatactaaacttaaaaaaaaaaaaaatcattctttacaacttacctttttcactagaagaagacaatccgagaatatcttcaaaaatataataaattattgctcttttgtaacaaaaatatctatattataaatagatttgataatgaaagtaattgggtacttaattgttgcaaaagtaataatttaattactttcacagataaataaataatttgcagcaaattatgtatgaagttgtgtaaaaaagtatacagatatgttacatacacgattctcttgtatgtgaagctcaaaatttgtgttagagaaaccacaataattcgaatgatccaataaacagcaaagggcatataagaattggcagccaagatttcaggcgattcgtcagtaaagaagttatgaagaggaaagtcataaaaatcgacaactttggtggtgacatcaagaatttgtttattgagtgtaaagaatgcatcgaccacttcatgctccaaacttaaatggggaaaatattgattgagaagagcaactgcattggccactggattggtcttgtaatggcacagcacaagcggaaactgactaatggacgttgcgaaagccagtgagactaacaccacctttgcatcccacttgtattgcttcgttatatgcaatatctctttcgttatcatctgtatttgatctactccaccatcccagcacttgttcagtatctgcaataataattataatacaagctattgtttttgtttataccatatatatgttatgatatatagggttaaagaagttttataatattttaaataattaacctcacagattgctctaatcatccttcttggaagttctttgtgcatgctttgataatgatcaggtaattcagttgcagccatattgttaccctgtttatttatctatttttttctaataaaaattaagacttcattgaaataaatcatttacttaatataaatcaactacatattgatgcttaccatgataaatatttgagcagaaagatgatcagttacgccattattaaagatgatatccataatgttaagaagaggccttacatgaagaatagtacaatttccggagtgaagaatgctactattaacaatgtcatgatattcatcatcatcattatcattgttgataatatcatgatcactacccgctgctgcgttattattattgttattattattnnnnnnnnnnnnnnnnnnnttattattattattattgtgtggtgattccatttggtgtatatgtaggactctaataagtggcattttggctactctcttgagaccttttatagcaacaacttaatctataacaattaaagcacttttatatgacacctcgtaattaaaagtaatcgatattcgatactataagtgtcatttagtatgtagagtgttgttttgggcattagtaacattaccgatattttttaaaagttattattatattaaaatatatatgaaattccatatttaattgaccaacagataataattttttattatgttaaatggtaaaattaattacatttaatggtaaaataaataaaaaagggtgaaaattcttttggatcgatatgtataaataccttgcttgggatgtggttagattattattatctctgccaagtttttctttttctttttctaaattacaaacatttaggatatgctatgcattgcttgatgttaggaattgggataatataatagctaaaaacgaaaagcaagaattgatttgacggaaaatttggagaaaagaatatcaggttagtagtaaagcttatgctaggtgaaatagggatttaattcgtttcttatattttttaccacatttctttttagagacagaggagaatagaaatttttatttatataaaattaaatgtacaatattataaaaaagtgaaaaaaaaaaacataattacataattttataattctatataattttataaatatttacaaataaacatgtagttttaacttgttgatcactttcaa

SEQ ID NO: 23704 - DNA, 1836 bp, Cannabis sativa
  modified_base (588)..(591): a, c, t, g, unknown or other
  modified_base (744)..(754): a, c, t, g, unknown or other
  modified_base (869)..(874): a, c, t, g, unknown or other
  modified_base (986)..(986): a, c, t, g, unknown or other
ttacctttgttattttaacctgtctttcaaaaaaaaaaaaaattaccatttcaaaactctcaattaatatattaatgtagaaattacatcaattatggaattttttttagtgcttacttttttatgatataattaaataatgcattcggtgtatgagttttgtgttttatttacatttttgtgggatttttatatgccatatttttgtaaataaaactaattttaccatattttatagtttcttcgtatatcacttctcttcttcctcgttcgttaagtcaatctgaacttgtttgtagccaccattgccactcctcttcgaacgccctaatgctaaggcacgctgcagtgcttttttatttacagtgctttctttgctaatcaaagaaattttcttgaaaaatgtgtcaaattaaaactttataataaatattaaagtttacaatttacatagtcatttataaacaccgggatcccgtttctaaacttttacacaaaatatgccaaaatacataactaggtcgcacagtgactacaaaatactaaacgccagatgtcccgagaccgaacactccaggtcgctccgcnnnnacatgtacaacctcatctcagccaggctcactcctgttcagctttcgcctttgctttacctacacatgaaataagcagaactgtgagtcgacaaactcactaagaaaagcatataacacatcatataataccgacttgtatctaggcgcccannnnnnnnnnnacaaggcttaacaaatgagtaagaacgttccatactagggtacaaccattataccacatacattatgtaccatattgtacgagtgttggcagggtttgtttcgtaccctgagtannnnnnagtgatataccacacacaccctgtactttgccgtacttgtgctaatatcaccgtaatgtactccttaacaatatatactataccaatacactctgtaccataactgtacaantgttggtagtgtaacaaacatataagcatgcatatacacttaacgtacacatatattcgtatattcatattacacattatacacagttcttaccttctttccggattcaagtgtgctggccgacctgaacggaaagtctcgtctagatgaatgccctaatcacataatgaaactgggtaaatcacatgatcaaaaacccttatccgggaaacccgaacctacaactctaggttctgctatactctctagggattatactaactcaagaagtagggaaacacccaactatggcattgaaatggacgagaattgagaaaacgagacactcagggaaccctgccaaaactggctatccgtttttacaggtactggtaaaaccggttactccgtttatactagttcaccccaaaaatcccatttcttgctcaaaactccaccaaatgaaaccaaaccttccagagtacctaattacggtatacacaatatattccagctagtaattcatagaaaagcccaatgaaattcatactattaaagacctaaagtttgagttcagagctcaaacttgagcaaaacaaattccatacatcaaaaccagctgctagaagttgaaactaactcaaatgaaccctacaatttgaactatacaataatcaaaccttaacagcccctaattttcaaaattacataatcaaaccaactcatagctttattaaaaacacatagttaaaggctctagggttttacctttgcttcaactcacaaagatcttgctcaatttctagaaaaaggttgaaacttgaagaattccaccccgatttctagtttggccgaacaaagagagagagag

SEQ ID NO: 23705 - DNA, 3136 bp, Cannabis sativa
acacatgaaaattcatgtaaaatgccgtgctttgaaaacaagttctggagcattatcagaacgaaacactcaacttgattgaattgagtttgtatgtaggatagaaattaaggtatgatgaaactaacatcagatttgtgctgcagcaaaaatatccaagtgaatctagaaaaatcatccactaaagtgagaaagaatctgtgatttgtgtgtgacacaatgtggtagggaccccaaatatcacatgaacaatatcaaaaactttattttaaacagtattactgctttgaaagggcagttttctttgtttagagacaggacaaacataacatggtatttctttgtgtaaaccagaaatattacagttcatagtatttttgagtaaattcaggcgtttgaaagataaatgcccaaggcgagagtgctaagtctcagcagtaacagacaacacttgattggagtttggtgtattatcaaggatgtacagatctttgatattactaccgcttccaatcatcctcttgctggcattttcctgcatagtaaatccattagaggtaaaaaagaatagaaatggcagatttgtttgtgagatagctcactgatataatatttatatttaaaagtgggagcatatagcacatcagttaagacaatttcattgtgtaacttaacagaaccactttgattcactatcaaacagtcatgattaggaaggattagtttaatagaaggtatcttacatatatactgaaatagtttcatgtttgaacaaacatgtctagtagctcctgtatctacaatccaagaattatgcaaaggagaactagaactatgggatagtatgatacttgtatttcccgtaggagtactggggttatcattattcgtaccattctgctgtgttgcaagtaagtttagcgactgctggtattgagccgttgatagctaagggagaatggcatgattttcagtggcagtgttgctgctttcttccttagtttgaacttgattcgctgaagcttccttgttcttgttttgtctgttgaatccaggagggtaaccgtggattttgtaacatttttcgatcgtatgtcctagaatgttgcagtgagtgcaaaagggtcggtttctcttgggtggatgagatttgtttgattgattgtcatctttctggtttcccttcttatcaccttgaaaagcaaatgccatggcagaattggtgttgttagaatttggtgtagtgcctctttgattttcctcttgagtcactagatgaaacaccctatttacttccggtaaagggtccataagcagtatgcttcctcgaacttgggagtaagaatccgagagccccatcaagaaagacatgatatactccatgtgatgatgatcttgaagcttcttgactcctccacatgtacatccattgcatgtacatgaagtcctgtagttggttagttcttcccaaatagttttgagcctagtaaagtacatgctactggttcgattttcctgcttaagattcataagatcctttctcaaattgtatatgtgaggaccatttttctaatgaaaacggatcctaagatcgttccatatagcagaggcacattcatcatacaagatacttgatgaaatttctttagaaacagaatttaaaatccaagatatgacaatgttgttattacgataccaagcattataaagattcagatcagagatggggggtttaagaatagaatcatcgaggaattcgatcttgttcttcactgaaattacaagctgcatcgccctgctccacgagatgtaattgtcttgtcctgtaagaggctgagagaccaaagcgtttccaggattatctccatgatgaagataaaaggggctggcaggatcttccaaagggttcttggcagtggcgattcgaaggctttgatttgtagaagaatcgccaagatcaactatggttgtaggagttctggtttgatcttcttctgtagacattgtgcgaaatcaatgaacagagaaaggaagaagatcaccggagacggagaaggcaagagccgagagacgcagcaacactgaaggagaaaacacaggagctggaaggatcagacgggagggcttatctctcccgctctgataccatattgagaaatgagagaaaagagaattttcattaagaagcaagaacaagtgaggcaagctttatataaggcttgaacctttgaacagactaacggtattaacagacaaaccgttacaactaaaaataaccaactgtcagaaaaagataacaaacaatccaaaactaacaatacaacaataccaataaacagaacaaaaccacctaagctagctgaccaaaagactaaataaaacagtaaacttaatacttagattcatagcattgcattggaataggttgtggacctgtggtaaatagcaattaacaaagaggatctaatagtgatatatgcttaattatgttagccataaataaacagcaagtaattaacaccaagatatttcagcagcccggttgggcttggcccgacccttttttttttcctccatatatagggaaatttacatgctttactaacttttccaattttctttcaattatactgtgacacgctgaatataacttttttactgtttttttttttattttaaatcggcagtatactgtcttggttcaaatatggccattagttataagttttatatattatgtgggttataggtgttttcatggggtttagcctcttcattttttaaaaagtagtactttaaaaagggatgatttgacgtgttatgtcactttttttgtgacagttttttttttttttatcttttttgatgatttgacgtggctcaacaactccatcagtccaataccaattccatcaggttttggtgtagacttttcaactccaacctcggcaaccgcacccatacagttggcctcaccaacaaagtaatttgaatttccatcccaaataggtaaagctaaaagctctttaaacaacacagagaaagcttcgatggaagcctacccaaaccattaccactttgtaaatctctcctttgatcaagttctctcgctttgggaacccaaaccatactcatc

SEQ ID NO: 23706 - DNA, 3099 bp, Cannabis sativa
ttatttttattagcgatggtccttaaaaaaaacaattttttgacaaacgagaatagtgatttttgtagtattgttggaagacttctctaaaaagatgtcctaggtgcattaggttgaaaatatgttaatttgggcccccaagatatcctggggcactaagcacccagatgtggggaaacatctccaaaatttgtctctttgattctcaatcttcatttggtgaaaagtactccacatattttatttttgtcaaattcgcacaggcatcaccgggtgaaacgaaattggtgtctaggttgaaatgtcaacctgagtgcccataagttgagttgggctcctttgggatatcactgataaaatatcatggcatggcattgttcctcgatatatttaaggaactgaggtccaagaatgtccccaagaacctaaacctagctattgtgcgcccatatcgagtagatgtcaacttaggagcccattagggcttcatggttcctgagtgttatttctcatagacttatctccaaagtctaaaactcggctttagcatgtctctcatgtatctaaagataatggcttagcatatttcccataagaagtttataggaaccaaagttgatgcgagacaaggcacaagatgtcaacatgggcgcccaacactgatgttggacccagattgaaccttgtgatctacacgtgacatcctcagcttaatggttcttcattttagtgggtgtcctcagtgtgcaggtaacactgccctatcctacgatgcgaggtccctgtgttgtttccttcatgccatgcgtcaaaagtgcccacataatcaagccaaatttttgggtaaacattttcccccaagttagtattttattctggtacaatggtgactttcaagcgtgaatattgcatacttcttatcgcgaagtaaccaggttggcattatttttgacactgcatgcccttagcttgggctcttctatatctcggctcaagtccatattctcaatccagggccaaattcttccccgtcttgggtgcatctcaaaatagttataagtgcagtttttattctttcctcagttgtagccttggaggtattcaacctcccctcaactgtgttcacagcagaggaggccttctttgtctccttggttgttttcacagcggatgatgttttattcgtctccttggctcttatcggaacagaagaggtcttgttcctctcctcgattgttattatagcagaggaggtcttgttcatctctcagctattttcacagcaaaggaggtcttcctggagaatgccaacaaagacttatagcatttgcgagctggtctttggttgaccaaggatgcgatgaatgcttgttgctatcggaacttgacaagcaggtcaaatgtggataaagcggcttggaagtctcctttgtttgacaaggttttaataaattattaatgtatttatttaaattataaattattgtagtgtcctcatcaaccaagtaatgtagagtgtggctataatgttatgaggatgataaaagatctagttcaatcgcctaatcgacgtgactatattaagaaagaggtacataaatatttgtaaaataattatcaaatataaatttatgttttatttatatttattatattattaatttatttctcttttatattttgtagctaatagactaaaagccatatccaaaagctatgattgacgagatgagagaatagtgagcgacagatatgcttccacacttgcagagtcatcgcattattggtcattagttaatttttttaaataaaatttattcatgacaaatatttagttacaataccagttaaatatgtatttttttttctaatacaatatttgttaattttgttatgtatatatctttatcaaatattgtaaactttgtgatacctatgatagttaaaaaaaaaaaattctttatatttacactttttatgtgtattaattgatgtaagttaattataaatagtttgttggaaaaaaatatattatataatataaataattatttataatataatataaaaataaagaaataaaattaattttgcagcatttaattttaaaaaaaaaacaaaaaatttagtttcaagtccaacttagctggactagaaaggggtttatagcgtgagatcgcttttagaaatatttttatatcccaggctattatgtccaacacaaaagggactcgaaaaatttatctagtccaatgttgatggacttaagaggagtttttctagtagtgtgagggagacgcgctgaagcatgtatactgaagctatttgctagcagcgacataaaccattaacgaggtatagtgggttatagcttatgcttccgatgttcaagcatatttcccatccggtgttgcataagtttttgcatcttttgttggcttggcccgtatttattcgtacttttaaaaaaaagaaagggttgtgccgtgccacaagaaaatatggtcgtgtcgtgtcgtggcaatatttttaaagggtaggcccagcacgacccgtgagctcgatattttagtgtcgtgctttgctcgtgtcgacccgtatttctaaaaaaatctagcctattttcaaatccgagcttaaattaatactttactttttcatatattttttttacaattactaaattatatgtatattttaaagcttcagttatattgatataacatttgaatattttataaataatcatataaaaaaaattattaacatcattagaatttgaatatttacttataaatactcaaatttttatatcacactctataaataaattaatatatcatcttaatttttcatgttttaatagttttaattatagaactataatattcaatattatatttaagttttattatcattttaactaatttataatcgataaatttatatcttattattattatgaaattattaatttttcaatatgtcgtgtcatgttttttgggcttatcacatttgtgcttttcaggctggtttatttgtgcttgtgtgttgagcctttcgtacttctcgttccatgtcgtgcttaaggacatattt

SEQ ID NO: 23707 - DNA, 2697 bp, Cannabis sativa
ttgcttagctagtattctattattagagatcagctatataagataaccatttattaatttattaaattaaaatacaaaaaattttatattaaattgcacctattactgtataacatctgtacgtggtgttagaactcttatttgagattccgaatctgccaccctagtcaatattttcccagctcatatttcatgctaatgattgaccttcctaatacatgattctgaaatatgttttgttttatgttttcgattcagccgcaagttatatatccgatagagaaatttatcctaaaagttcaaaaataaaagtaaatgggtgatataatcaaaattctcatttacctttttccttcttgtgatttacctaagctatataaacttttgtacctattatgtgtccctgcctagtagtattacttattttaaactatacaaaccttgcgctatcaccagcgttacttttaagaagaagttaactaagaatttaagatagaataaagccatgcaacgtgtctacataagcgcatgatctatatatgaatacccaacccagccaaaccactaaatcaatttgcacaagagaaaagaaaatataatgagctatacttctacaacagctctcagttttctcctagtccttcttattgcaaccaacttattaagcattaatgaagctaaaagatgcaatcccagtgggaaactaagaggcaaaaagccacctccaggaaaatgcaaccatgaaaatcaatcagaatgctgcaaaaagggccagttctatactacctacgagtgctcaccaagggtgtctcgccacactaaggcagttctgacaatcaacagcttccagaagggtggtgatggcggcgggaaatcagcatgtgacaacaagtttcactcggacaacattccggtggtggccttatccacaggatggttcaataaagggcacaggtgtttacagaacataaccatacatggtaatgggagaagtgtgagtgcaatggttgtggatgagtgtgattcaacagtagggtgtgatgatattcatgattatcagcccccatgtcctcataacattgttgatgcttctaaagccgtttggaaggcattaggagtccccaaacataaacggggtgagcttgatatcttctggtctgaagattgattctcctttttctatatatgtatgctaataattattgttattaaataagcaaaatgggaatgcatgcagaaaggttgaatagttaatctcataattgttattagacagggtcataattattctcctaatctttaatgaatcatgttattgattaatttgtatccatgtgtgtatttctaatattattactaataaagctatattcttccccctttttctatattaatcttctgaacttattgaactttgatggattatgggtctttagagtacatatctttaatttgttatgaattaagaaatgttaaacatacaagcgcgcggtcagtactccttactcattatctgactttgaaattttaacgagttatatctctatgtttgaacatcctacatatttatatctaaggacagttaattttattatttcaccaattagctatagtgttctcataggagttaggactagctactttaacaacagatcagaacactaagaaatatattacagatttagatgacactacaatcatacaaaatcatataagaacacgattaacttagccaaggactaccacaacggataaaaacaaaattcaatattgatatcgtactatatagaagaaggaaagtgatgatgagcgaactagttatgaattaggcatcagaccaggtaatatccaagtcaccccagtcccgaggaggaacaccaagagctttccaaacagccttggaggcatcaacaacgttgttggcgcatggaggttggtaatcctcatctttgccacaccccacagaggagtcacactcgtccaccaccatcgcctccacactacgcccactcggggctctgacggtcacgttcttgaggcacctgcttccaccttcgtaccaccccgtcgacagtgccaccacgggcgtgtcatccgagtagtagcggttgtcacacttggctggggcgccaccgtccccgccaccctcgaagctgttgattgtcatataggccttggtgtgtgcagttacggagggggagcactcgtagactttgtacattctgccctccacgcagcacaggtcgtcctccatgcattcgcccggtggtagcttctttcccttgattctaccgctcgggcggcattttgaggctgcaccctcgtcacaatttattaatactaatgttagaaagagaattattagtcccaagagaaaaatacggtgattattattagacatattgatattgattgatattctctcttattaataacttaaatttgtgtatatgttatatgtataatgaatgagttttgctttgcatgagatttagtagtacttatattcattagttagtgctccgctacatcagagagatcaatacatatattaataatatattgttttggaatttcacagcagatcactatcaacatgacggtacgtactgattaaaccatgcacattaaggtttttgaaatttattcccgaatccatctgattataagaacagttaaaatattactggaataaga

SEQ ID NO: 23708 - DNA, 2838 bp, Cannabis sativa
  modified_base (2546)..(2551): a, c, t, g, unknown or other
tatatattgtaactaattaaaataaatatacatttttttttcgattttttttttcagggggggcagtcgccccccctcgctacaatgtgggtccgcccctgtaaataagggacctcacatatttaaaaaaaaatgcagtatcaatagaaaatatacgaacacacaccaaacaaaaaacatgaccacattgaagcaccaagcaccatagacgttacattttcttcaaaattggtgtaaataaatatgcgaattatagttgtaacagtctcattctgaccacattgttgtaatcatcacctactatcctataagttggtgaatccacctccttttaaaggggactgatttggataaaaatacagaacaagagaattacttttactaggcaagttgagcctttgttgaaccattatatttttggtgtcaattatattttattttatttataatactcgcatataattttatattatattctttgaagacttactattttaagtaattatttgtaatttgtaatattgcttaaattccttccaaaagacaaatttctctataataaaattacaaaggtcgaactactataaaatatgttaaattttacaattcatatcttgttcaaaattttcggagtcaatatatgtaatctgtttttcattactagatacgaaacacaaacacacaaaaaaaaaaaagaaaaaaaaaatgatggaaattatttgttctcgttgcacaagagtttatcattcctagaaaacgggctggatcccatatagactagtattaggccgaccaaagaatagaaaattgcaaaattttgacttacagatagctcagtagacatttctggccatattaggcctatacctattgacaccatacgcacccatacatatcgagttcagacttgcggtaactataaccactcgtttggtggtgatccatgcatataatcattatagtcaactgggcaaagccaaataatatgataggccccttatataatcgacaagcatcttggttatttttatgttctcactagagagacacctaataatagtttcactataatgttatgggagcaatgagacatgggacacgtgtgtgtgacgtatatatggacttctggtgtgacgtgtccaacattattgatgaaaaatgaacattgaagtttacatcatctggatgcacctttactctttatctcttcaaaattttgaagaacattctagtttaaagtacttagaaatgttataatgttaatgtttttggctcctcattaagaagtctaattaagatagcattaagaatttgtacgttattacatacatggttaattagttttaacgtaatgaaaaattaacactgcgtgtaaaatagaatcactagattttgtagcaccatattttctgatatgagtctccaccaatcgcttggtaccaatctaatatttcagataatgtttgctatataaggccataatgtaaacacattcaataaattaatatcgttacatgtcacaaacatctatatatgacaaaattgttgctttctaaaatgggctataactagttaatgtgagggtcaacagatgtacatagcaggaaaattaggcaaaacaaaatgcataacttgataaggatgtcacaatctcacaaaaattgaatagatttctgcgcaatttccatttatcaaattaaaactagatatgttataattaaaacggaatctccaaatggtcaaaatattaaatataaaactgttgcaataccttagtgttctcttatttctttcgttattattatcacaatataattcaggattgtaggcaggtaaggggaaaggtaactgataatggaaggagtatgggatggtgcatcaaatttgttttcctggtcacgatcccaagaatgtaaacacaaaaacttagaagagattttccaattcaaagaatatataataatgtattatccatatatttcatgggcccggatgcacttaatacttctttgaaaattgaagtcgttaataatacgaaaaccgacttatatataacgtttagattatcttattatacggtatactgaaaaaattatgtttttagtcactaaaagtaaaaaaaaaaaaaaaaattacttataaattaaggatattgacgcctaaactaattgaactttaaattttttaacacttaattataaaagtcaattgtttgggggcaaaactacctaaactcccattccgttttactctgcacccctccatctaaaaattacagttaagtgccacagtagactgtgcaagtgtacacacttgtacacgtgacaaatttttagtggtccacgtaatattaattttaaaaaaaattataaatatctaaaaaatattttaattttttttcttcttctttcttctttcttcttttttttctactgaaccaaagcacccaggttggagccggagcacccaagctggagttggagccatttgccctctctctctctctctcccgatcttctccttcccaaactctctctctctctctnnnnnnctctttctctctctctctctcttagtggtggtcaccggaggtctttctctttgtggtggtcaccggggttggtcgagagattggagataggaggaggtcaaggttttgggtttcggggcatggggatttcaattttgtggtctcctggtccgttggtggctccgacaccgcacaagaaaagaaagggggggttggggttttcgccgacattagggtttgctagggttttttagtgaagaagaagaagaaaagaaaaaggaaaggaaaaaaaagaaagaaaagaaaaa

SEQ ID NO: 23709 - DNA, 6431 bp, Cannabis sativa
gtaggattagatgttggcagaggtaatgactcaggtgtttgagttggttgctgaaaagatgcatctggaggcaaaccactagcacgatcaatattgatctgaggcccagtagctgctgcattttctgctgcaagtggtgctacagctgttggtgtgggtggcacttcatgggatggcagatgttgtacctcagtaataacatgaggtgtgttagtaggcattgatggtgtaaaaaatgttgcagttggaatggtaaatgagggagaggaatgaacctggtttgtggttgttgcagctgaaaaaccagagaagtcctcttcattaaaatccacatttcgagcaatatatatacgaccatgcatactttcacaaagataacctttgtgactgagagagtaccccagaaaaatacatttttcagatctgaaccccattttatgattgctatatggtcggagataagggaaacaagcacatccaaacggttttagaaacttgtaatcaggtgctttatgaaataagcattcaaatggtgaaatgtctcctataatagatgtaggcatgcgattaatgacatatgtggctatggaaaatgcatgccaccaatatgacaagtcaagattggcttgagcaagtagtgtcaagccggtttcagtaatgtgacgatgctttctttcagcacgcccattttgttcatgatcatgtgggcaagggtgctgaaagtgaatcccatgttggttaagaaatgtggccaaagacctatattcacctccccaatcagattggacacacttaatgggtaagttaaattgcttttcagcaagcaacttaaactgaagaaaggtaggataagcttgagattttgtggtaagtgggaaaatccatgtgtacctactaaaatcgtctaggaaatggatgtaatatctatagccatctttcgagggtgtgtgggatggaccccataaatcagtgtgtaccaattcgaggggctgatttgctctagattcagataaggaataaggtaatctatgactctttccttgtttgcaagcctcacaaaattgtaagtcttttaagtttggtgggatatgcagttgagttaaaacttttgcaagaattcttggggcagggtgtcccaatttcatatgccacaaattaatattagttttctgtgaagtaagaacttgattgtgagaataagagggttgacaagaattatttttatttatgaaagagtcattacaaaggggaatagctgctgtagcagctatttgattacaattgatatctgatgctgaattaaaactactagcaggtgctataggaggcctaggtgaggaagtgccaatctgacattgaagtgggacttctggtatggcaaaggaacgatgagaaagagtgtatagaccattcttaaccctccccttgagcaaaacagtccctgtggccttgtccttgacaaaacaacatgtagagtgaaattctaagaatacatggttatctttagtgagttgaagaacactaactagattcttagttatgctagggactttaagaacagattgtaattttaaaggaagattggaggagggtagagatgtattaccaacatgagatatagcaagtttcttgccattgcctactgtgacaccatctgttccattgtaagggccctcagactccaagttttccattccttgtgccacatgattggttgcgccagtatctgcataccaatcataatcgtcaagaaattctggcagagaggtggaagaatatgcttgaggaggatcatgatcctcaatttcagtgaggaaagcctttgattcaccaactgtaggggtgacacaattcttgtcaaacctatagtggcaaacagctgcggtgtgacctgatttgtggcaaacttgacatagcaatcgtggaattgagggagagccaaatcttggatttctgggagggagtctgttgaagtggctgtaagatccccgattctgagatgggtaatggcgatttggggcaccagacgtatttcttgagctattaacactgagattagcagtaatctttgaagaaagatcagtgacattgaagtgtcgttagagtctgctttcatgagttagcaacaatgattgtatagactcaaaagaaagattatcaactaaacttgtgacatgaaccaccactggatcatattcaggtcccaagccattgagtaaatgcattattagatcactttcatccataggatgaccagcagtagataacaaatcagccaacaatttaactttatcatagtaatcagatatggaaagattacccttttgtattgtggataactgagacttgatctggagaagacgggctttagattgactggaaaagcgttgagccagggcacgccaagcatcataagacgattcatggtgagccaaagaaccaagaattgtctctgtcattgaggagtgtagccaactaagaagtagttggtcttttcttttccagacagtgaactcgggattgatttcgccggagacgagtcgagaaacaggagcaacaccggtgagtaaaatgtcgtcgagtccatggccgatgacagtgggaatgacctgagatttccacgcgaggtagttcgttcgatcaagacgaactgtaagagatgaattgagtgagttttggaacggattccattgatgcagagtagcagtgggtgcttgagtagtggcggaaggagtagcagtgggtgcttgagtagtggcggaaggagtagcagaggtgggttctgggtgtcgaggatccattatcgacgcgagtcaatggcttcctgataccatgaaagagaagcttatcaatacaattcctaactggaacaacaaagatttggacacaaagaattgtaaaagctctactaaacaaagagcttaaccttttcattatatagcagtaagaatgatacagaaggttcaaaaccaaaaaataacaaactctgttgaacagagtacaagtggcaagaaaagaataactaattcttttaacaagaaaaccaataacagaaagctgaaaaaactgttatttatcaccattacattaattggtggattcgaacccagaacataacacacaacaaaagagttccagtaatgtattttatcaactatatcttcatcacaaatcttaacacatttgcttatttcacttaatgtttctttttcaaattgaagaacaagaaattgaggatgagacttgcctgattttgattttgcacgaccactcatatcttccaagaaagtggctctgagctctgatatttagagcaattctatttcaaatgatttaggagatagacaaatcccaacttcatcatctccggttatgattgcaccacctcaatcgtcccactgggaaaagaatccctaattgcatcctcaaactcagaatcagaaaactgaattgcgtcaacccccaacacttgatccatcgatttagtcttcttcccacagtcaaaagaagtcaactctcttttcttatgaatcacgttctttttttttttctcttcctgaatcagagatttagttgctgatcttgtcttcttcattgccaattttctacttcttagtcacctgagctttgagtcgtggtcaccctacctttggctaaaccctaaaggccacctcttaagaaacaaattattatatagctaatatatatgttttattccattattacttcatccatataatttattttcttcattagctagggtttttttttttttttttgatttattaatttatttttcttagtcatatttatatacataaaactcattttcatcataaatagtttctctgtagaatttttattaagtactccctccacgttcttgtagcccatgttttgaaatattttatttgaatatgtttcttgccaagcaagaaatttgatttatttttcattttttatttcattcaaaactaaaactaaacgctacacatggctgactactacatgctagaccaatttcattaatatcattaattaatatatcatatataatttattattattattatttatatatgatatatattcatgaccacaacaagctttttctgagtattttttttttcataaggcttgaatttcgagatcgtcttttcaaggatttgaggtacgtaccatttaatttttcctttgtctgttcttaaatatttttttttttttgtgtaattatgttaaatatatatatatatatatatgatttcatttaattatgactacatgaatatcatgtattatttttgaaagaaagtgtatctatatatgtttatatatatgtatgatgatcgatcgatatatatcatatatgttaaagatgttcataaataaaattaaaaccctattgttgatttcaagttcttacatgtttgaatatacatataggaagatatatatattattattacaaagaatttctctttttcaattttgatatatatatatatgatgattaatatgaaacttgttttagcttatattaacagaaattaaagtcatatatatatatatatatcgatcgatcttacatatatatgtcaaataaaaaaactttttaaaacattattaattatcagaaattgatgctgacaagatcgaagcataggttgatccatgttaatttttatttattttttcataaaattataacttaaataatttgattgtaggctaattattcagattaattattgactcaaataggatatatatattttaatttgtgattattaattttactttttggtgaaaactatagtatatgagtaagatggcaagagagaaagtttataacatggatgagaatgatcataatgatgatgagattacaaagaacaacatttcaagaacaaattcttttgagaagttctcaagtgatgtatattcttccccggacaccccaacctcggtcctttctgagttagcttgcagtgattttaatgaacctaatatgaaggttgctagggtttcgggtagtgcttctcctcttcttttatcacttagagttcaagcattgggaaagttaaatccaattgatattgttaataagcatttgtggcttcactattcacaaaatacacaaagctttgataataattctacaattttagggcaaaaaaatagtcaaaatttagatatgaatgagacaatattatcaaatgatggtgataatattgataaaaacatttcaaatatggcattggaaaaagattcttcaagagggttattggttacgaaatcgaaatggtcatcactattatctgaacacccgaaaacaatactttctaaagcagtattagagcaaccaccaacgcctttgtttctatcaagaggaggagaaccgacaccatcaccaccacttaaggcaattggaaatattggaggtggtccgccgccaccacctcctccattcggtgcaaaaatatccttgcgacctaagaaaacagatagtaaattgaagagatcaactcaaattggtaacctatatcgtcgtctcaaaagcaaggtggaagggaccaataataaccctaatgggaaaaaaagtaatggaataagaagtggtacaaatggtggaaagcaaggaatggctgatgcattagcagagataacaaaaaggtatacaaatatagtgttataaaaaagtattataatatctcaagattatagttttcattacactaaaattatgttatgtaaatgttaggtcagcatactttagaaaaattgaagaagatgttgaaaagtacacaaatcccatcttggagctgaaatcttcaattagttgtttcgaaacaaaggacaaggataagcttttgaagtttcacaaaaatgtggaattagttcttgaaaacttaactgatgaaacacaggtaatactcaagggcctaagcattaagcagtttgagccattgttataataaaaatttgcagttctaaatacacataattctaaaaattttgcctattctagaattaatgtaacatttttttatgctgaatttgtaaattattgattgatttttttttttaaaaaagtccaattttaatttttcggctaaggcttccaacctgtttgggtcggccctaataatacttatatatcattaattattacaattaaatatatattcatatagtgtgttgattgatggtttaattatgattaggtgttgtcaaggtttgaagggtttcctataaagaagttggagacattgagaatttcatcttcattatacataaagtttgacaacataatcaatgagctaagaaattggaagattgaaagcccaatgggccaactccttgacaagcttgatcgttactttgacaaggtgatacactccaatctaaactctcaacacataaaaatgata

SEQ ID NO: 23710 - DNA, 3197 bp, Cannabis sativa
agtgaagaaaagagagtaagagagaacagaggtgaaatgttgaatgttcatctagtctatcgagatataaagaaatgttgaatcttcagcagatagacctaaggctgggcttttagaattggtgtttggattattcaatacaaaaatattttgtgctgatcattgttgtcacatatgattggattttgttagaaaatttaggcgtggacatgtaactaactattatgattattatttgttttattttcctttctgaaaccagaaactgtattagtcctactcatgttcccaaaaatttaagtcactgagtgagagagtgatgtgaaaaagaaagagagcatgggttcgaacttaatattggtaagttattagtaaattgtaataacactataaaaagaaaaatgtttggcttggagaatgtgttttcatacaagttcaagaacagagatggtacatgtcaaatgcccaacttttgttcaatcttaagtgtttgatgaataatcatgtgtaatattgatttgaaatttgactccaaatatatacactagtgttatatatttagaatatttaacactagtgtacccgaaatttttgtagatgtatgtattttagaaagtgatatatagccaaataaaaaaaaagtgacattattgtaaatttatcttgaagcaagaggtaaccaagttacattatatagtagaaacttttactaaaagaggatattgatgtaaaatcaaaagagaagaaaaagttgcattatatcttagtttcattgcaaccaaaaaggaagttgtaagaggaaaaaagttttagctattacttaccacatgttctaaccagtctcaagtacaggtactgaaatgagcaactgatactaattatggagcaattcaagtttttaagggaaaaaaaacacaatatcagtattagacaaaactaaattttgtaaaataacatgtttagtttaattatgtggtaagatatgtactcaaaaaaaaaaaaaattgtggtaagatatacgtatatagagagtagtactattagtgttgtaagtttgtggtggtcaggtttatatttattcgtgtttttcaaaaaattggttgtgtcatgtcgtgccacaaaaaaatataggatgtgttgtgttgtgccaatatctttaaaggataggttcggtacagcttgtagatcagatatttttgtgccatacttggagtcaaaaagtaaaacagtaatccgtcctaaaataaagtattttgtgtggagggcctttagtcatattttaccttgcggacttaacctctataagaagaaaatcctttgcactccaatttgtttcatctgttcaaggaaggatgagaccattatgcatgccttattagaattaatgttgtagggcaaagcttgtgtgaaaggagacctcttttatacagtttcatcttcttaacaaaaattgcgatattaaagagtttctcctaattaggggttttaataacctgtcgaaagagaacttttagtctatttgttggaattatttggttaatttggaatgtatatttaataataatgaaaaaaccttttaatttgaatgtagaatagaaacctatgttgcaaacctcgttacaggattattctaaagctcagcataagtgcacaagtaacaatcttaatgttactggaaatgcaatgaattaatcattcatcaagctatggggacaaagaccattcacaatacactatactattactaggatgttataaaatcaatgttgatgctcttgtgaacaacaagaggaaaaagtttagtatataggggcggtatgttaggaattgtaacaacaatattgtaattttttttgcaccaatagttggagcgtcttaattgtatgctgaagctcaagccctgtatgaggtcttgatttggtgccttgcagtaaaattacctcttttcattattgagattgattgtcttcagcttattttgaaaattaaatatgagtggaaagatcgctcgactttattagatttaatctcaaagattgtaaattcttaattttattatcttagtatatctctttttcatgttcctagagatagaaatgtaatagctcacattctaggtagagaatcattaagcctagataaggaatgggttaggagaattgttttcttaacctaagtttctatttgtaaatttgtaccggattgcttatatttatgagaagttacaagttttttttcaaaaaaataaaaataaaaattacaacattaaatatactaaaattattatattttattattatattatttttttaaaattataaaaaacacaaaaatatttgaaatagtagtgtcagtgtgtcacactaatattaatgctataaacaatattatatatagaattagggtgcttgaaataaatttaatgtaaaatctcaacaaatttagtactctattggtcttagtcaatacaaattgaatttttctctcttaattaatacttaattctctcaaaatcaaacataacataggcatgttttattattattattatttaattgaaaacatatagactcaaaatccaccacgtattttgattttccaccaatgcctagttgcaataatacttgtattgtctgacacgaaactttgaactggtattagatagttatgtttactggtcatgtttattatattgcttgcttaatatttatttggtgttatattgctgttggtataattaaatatcaggtcttatataatttataaaaaaataacttttaaacaatatcgctaatcaattgtagacaccacttataaaaagtgtcggacactactaataatactcaataaattattatatataagcaaatttggctttagagtatggccttcaattgaataggggtcccaactttaaagaagaataataaatatttaaagcatggatatatatatttatatatataaataaatatatatatgactggtttatatatgcaagatggtcatagtcatagatagtatagctgttccacattttttttctcacaaaaaggagatcctaatatcaaattctttatacattataaaataaaattatatatgcaaattataactttattgaaaatataaatttgtactcttttttttatataatttatgattaatttttgaatatttatgaaattatcctaata

SEQ ID NO: 23711 - DNA, 3074 bp, Cannabis sativa
ttaatagattgttaaaaaaaaaaaaacacctaaattccttttcagaaaaaaaaagacacctaaatagagcttttaatctaccacaattaaatcaaatagtactctaaaacttgaaactttttctctttttaataactttaatttagggatctagaactaaaaagataataagtaatgtataatatgtcgtgttcatatacatcgctcgatcaatgtaggctgtagctgcatataaattaattatgcatattcttcggatgaataaacaacttgtttagctagagactacttatttttttattatttggaatgtatcctttaactttaatgaaataatattagccattacttgtaaaaaaaatatatatagaataatatcacattttgtagtgcttcattaatattttttataccatattattattattggtataatttaatatcaaatcatatttattaaatttaataagaattataaaaaatcactaatagcaaagtattaaacactttgcctatacaataaaagccaaggcttcgagtatgagattaaaaaaaaaacagagaaaaatcattaattaaaccataaacccatttttatgtttatatgaactttgtaggagagagagagagtgaaagagattgagagtgattgagtgtgaggagagcttaaaataaggcctgatttagcatgcacgtcgtagtacggacacactgtaacatcgtgtatttatagtatcaaccgcaccattcactctctctctctctctcatctttgaaaatggtacgaagaaactgaatgaatcgttaacaagactcactgtcatggtgtgtgtgtgtgtgactggtattcttctcttcttacttctaacaggtttttttaatgctttattttgcttttggggtaatgggttttcatttttatttccttataattactcttgcttttgctcacttttttttttgttaatcttcacattttttttttgcgatcagtaatgcaaaagtaataaaatagctagtttttgctctgtaactattatattctctgcttcaatctccttggaaaaaaaaaactctgtttcacaaagagaagtgggtatgggtgacaagtattactgtacaagatacgtttatatatatatatatatgtattggtttttgtaactgttatagtcatggtggaactttctaacttgttctcatacttaatttcttaccagagaaatgtaactttgccaaagattgtagggttttgttgtagggttttagcgacatagaagcatgattttgatggattctctttcaactttttgtaaatttatcattttttttctgttggttattttgattttgaaacatattatacaagattagggattctaatccatgttttaatggttaggttctcaaagactatccgatgagtcaataagcatttagagttgttaaagactaatgagccattttcacaaagcttcggtggagaatggataatgaagttggatttaagtggggtaccaagataggaaatggtgtaagaaataaagacattcaattctttaattcttttactttaaggggcattgaatactctctttatgactgtgtgtgcttttactctgttggtaatcctgagacatatattggtaagcttgtgaaaatacttgagaccccaaatcatgaaaggaaagtaaaggttgtgtggttatttcgtcctactgaaatacgtaactatcttggtaatgccaaaccacaaccacaatggaatgagctgtttttggcatctggtcaaggaaagggacttttcaatttcaatgatgcggtaaagtttttatctataacacccttttcccatttgtgatctattattgagtttaactgatggtggttttcagtattcataatcatatttaaggtatgttgttttgcattgccacttgtgagaaaatgttatgtttttttgttagttcttaaatcatgacatttcatctgagacgcccattgttttcttgttctttcacaaatgttaattaaaaacttgaagagttatggccataatttattatagtttgttacatggtttatacttcttcaggaaaatgtagttgggaaatgcaatgttatatgcacctcagatgacaagagaaatcctcagccttctgaagaggagttgagaaaggcacactacattttctaccgcacttttgatgtaggtaaaactgaaatatcagagaagtttcctgatgagatttgtggaagtaaaggtcagtcatttctgatcagtaaagtgttttttttaatgatgaactgggttgtatgaataatttatttcttagtcttaaacattctgtattgcattgtagtggaattcttctttaaccagagaaaatatcagcggattcagaagcctaagataaagataaggcatgagtatcaattatttactgagtctccctcaccaaaattaaacaagggggttgacataccatgtaaaattccctctcctgctagtagaaatggctctttggtaaaaggtgatttctatgaaagccaaatggtcctccttttatgctaaagttttatcaccaatgtataaggaatgatttttcttttttggaagtgcagaatctgagaatgttgccggcaaagcttcacttgtggagcatggttgtggttcatcttcaagtgactctgccaaattgaaatatgttgctgttgaaggtgggagtgagcctgacatacaaatcaaagatagagttagatctttggaaatgatttcacctgagaaaacatcacactctcagccttacaagaaaaggataattgctctgtatgacaagagtcctgctaagcagaattctggagaaaccccaactaaaacgtttgcgaaagcagttcctgaacatgtatatgacaagagtgtgcccactaacaaccatgttttggaagcaagtaagcagcctggcgatgtaagtcttaacttgttagctaatgataaatctcgagttagattttcgaaaatgttctctcctgatagcacatcacattcccagccttacaagaaaaggataatt

SEQ ID NO: 23712 - DNA, 1157 bp, Cannabis sativa
aaaaaatgtaaatgtttattcatacataaataatggttttgttttggttcttttgatgttgataaggttggagtttccatctttaagatactcttgcaagtaactaggccaaggactgtggtgttgggaagcatacctggttctgatatttataggaatttgcatcactataaggatgcagtggaagtgcctggtttcctcattatatccattgaagctcctattaattttgctaacagcatgtacctcaatgaaaggttatttctaattttttaagttttatttttatgtatgtattctgtgcaagtcttatttattcttttcttccctgacaatgaacaaattttgtttgatgaaggattttgagatgggtggaagaatatgaggagaaagaaaatgcaaaaaagcattcaatcaatattcagtacgtgattctagacatgtcaggtaaagaaaagtcacatgttgccaaattcaattgtgaatggagaaatactaatcaaaattgggtttgtgttttatatgcaatttttttcagctgtgagtggcatagatacaaccggtgttacacttattaaggagctaaagaaagcaattgagaaaaaaggaatggaggtaagtaacaattaatcattgaaatattttacagcttatatatatagtttttttttttgttctgtttctcaactttgtaatgaataaaatttgatgtattgatcagcttgtgttggtgaacccattgggagaaattatagaaaaattacaaagagcagcggagacacgtgattttatgagaccagaaaatctgtacttgacagttggagaggctgtcacttctttgtcctcatcaatgaagattcatcctccaaccacgtacgacgaggaggcacaagccgctgttcctcatcccaactgaaaattgttgtcgtttatgaaaaatgaccaaaagttttataatatataaaatatttatataattataaaaggaaaaagtaaaatatatttgcttgtaattttgttgcatatgtaaaatgattttacctagtagtttttcaaatatagatagtaggcatgcaaatctttgatcggaaaaatggtgagggtgtatttggagaattttaattcggatcaatagacttgtattattggataattta

SEQ ID NO: 23713 - DNA, 5681 bp, Cannabis sativa
aaaaatattaattaaaaataaaaaaaaaaggatatagtgacactctatgtgtgttgctgttactttttcagttggataaaatctgactaaatgcgcctatagtgacgcgcagaaagtaaatgtaaaatggttcagtgacatgtgtggagtgtcactaaaaactgactttccagtcaccttcattagtgacgcgcgttgaagtgtcactaaatagttttagaattactcaatgtgtgtcactaaaacttgtttttctagtagtgtcatagagacagccttaacccttgtggcccatgcatctaccattaaagttttgggatgaagcagtgaaagcctccgcctctctaatcaataaactctcttctttagtaccgaaaggtgacactctcttagatgaactcttcaatctacagccagattatagttagctaagagtctatggtcgctcttgctatcctaacaccagaccatacaataaatacaaactagattttagatcaaaggagtgtatattttttggttatagtatcaagcacaaaggctataaatgcttgtctggaactgggagaatctatatctctcgagatgtaatattcaatgaacatagcttcccttatgctgcacaaactaagacatgtccctcatcttccacacccatccatctaaacacacatacggtccctatacttattgtctcacccacttaaacaacacaaaatcaatacacatcacatacacgtccagcagcctctccctaatctccaattcatgaaccagaacctatatcagcacatacaactcctgctgcttcaccttcacctatcataccagcagcagcacctcagccaccaactaatacacatccaatgacaacaagggcaaaagttggtgtctataagcctaaggtttacatcaactcaaaaacacctctgacattgtaggaagctttagaagaccctaagtggaatggagttatgaacattgagattgtggctctcaaagccaatggacctacattgttgttcccctttcccttagaagaaaggccatttgtgtgcaagtgggtatacaaggtaaaagagaataaagatgggagtgtctctaagatcaaggccagactggtaaccaagggatttcaccaagaatatggttttgacttctctaaaacattcaatcctgtagttaaatcactaaccattagaatcatcatcaccattgctcttcataatcacagggagataaaacaacttgatgtgaacaatgcattttcaaatactgacttggttgaagaagtatatatgtaacaaccacaagagtttgaggaacaaggtccacatatggtttgcaaattgcacaaggaaatttgtggcctaaaacaggctccaagggcttggtttaacttaagatagtcccttctacactatggctttcacagttcaagggctaatgcatctctcttcataaggttcaagaacggtcataccacttatgtgttagtttatgttgatgctattcttatcactggtagtgacacagctaaaatctctctattgatcactcaattgaacaatctatttgcacttaaagatcttagtgacatagctacttccaaggcatccaagtgacaccaacagaacatggtctccatctctctcaaaccaaatacatcatagatgtgatatgcaaggtaaaactacaattttccaatagcctaactactctcatgattggaggggagaaactgtccagctttgggagtgatccagttaaagatcctcaactttatcaaagcccggttggtgctctgcagtatgaaacactaaccagaccagaaatcttaaatgcagtcaacaaagtctgccagtttatgcactcacctctcaaatcacactagaaaactatgaaaagaatactaagatatctgaaaggtactcttgactatggccttgacatgtctcactcaccttctctggacttagaaggcttctgtgatgcagactaagcatcaaatgttgatgaaagattatccaccacatgtttctatgtttaccttggttctaatctaatctgctggtcctcgaaaaagtagcacacaaagtctcgatctagcaccgaggcagagtatcgaagcctagccagcctgactgctgaaatcacttggatacatgccctcattggtgagttaaaagtccagatccctcaaactccaacgatctggtgtgacaacctcagcacagtgttgatgtctgctaacctaattaattttgcatgctcgaacaaagcacatcaagcttgacttatactttgtcacggataaggttctagccaagacacttgtggtgaagcattctctctcaaccctaagtttgaggggggatgttaagagtatatgttagttatttctgttagtagttagaatcggttaggagggtagtttggtcattatatttttagctctatcattatacttatataagttgtatctttcacttggtcaatcaatgataatctatttatgtcaattcaatctttcttaacaacaccgacataataaagtcttaataaaattgtatttctcaaaataaaaacactaaattagatacaaggccaagattagtggccaaaggctttaaccaaagggaaggtattgacttcaatgacattttctctccaatagttagataaacctccataagaatcatgatgaccaaggtagcaaaatatgaccttaaaatggatcaaatggatgtaaagacaacattcttgcatggtagacttgaagaaaaaatctacatggaagaaccagatggttacaaaagcagaaaacgtaatcaaatttgtctattatagaaatctctttataggctcaagcaagcaccaagacagtgaaatatgaaatttcatgaattcatggttagcattgggtataacaagagtgactatgacccttgtgtgtattatatctgtgaaccgattttcttactgttatatgttgatgatattcttattattggaaagaaaagaaaagccatagataaactgaaacagagcttaaatgcagaatttgaaatgaaaaatttaggtgaagcaaggaggatacttggcattgacataaagagggacataccaaaaagaatatctctcataaaggagctacataccgaaaatgattgataaatttttcatgagtgaagcgaaaccagtaagcacacccttggcacaatatttcaaacttacttaagaacaatctcccaaaacagaagaagacaagatgtacatggatgcagtgccttatgcatcgatcttgtgctggcagcctcatgtaccgtgcacaaggccttatttggcttatgctctgagtatggttagcaaattcatagcatatctagaaaaagagcattggtctgcaatgaaatagatacttaattaggtatctacaatgctctatggatgtgggacttgtctatgataacaaagtctaagaatgaggttgaagtgaatggatacgtggattctgactatgctagaagcatagacacaaggagatccatcactggatatgcatttacagttttatgtggatgtattagctgaaaatcaaacctaaaaaaggtagttggtctgtcatcaattgaggcagaatacctggctgcaatagaggccataaaagaagttttttggctcaaaggtttcacaaaagagttgggttcaaattagaaaatataacagtgcattgtgacaaccaaagtgctctacatttgatgaggaatcccatgttccatgagaggtccaagcatatagatattaaattgtattacataagagacatcatagctgaaaaagaagtgaatgtgaagaaaattagaactaaggagaaccctgcagataagatgacaaaatatgtgagtttagctaagtttaggcttagtctaaacttactaaacatcctcaagtgctagatgaggatttaagaccagttcaacctcaaatctcaacagcttattcctctcttaatgatcaaggtggataatcgttgtgattggtctttaaattaggaaacatttggcactaacagttttcaactgttttaaccaactgtcagttataacggttagaatcaagtctaaataccaaaggctatatattgtcattccctgccgttattttgggacaactttagagacaccttgagaggtgtttgtgttagagagctagtttagagaaaagaagagagaaaaaagagtgttctattggcttatggtgtgtttacttcatagtgtcacaagtgagatgaatatagattgaagttgagcttcattgagagattgagtcgagtacacattaaagaacaacatcttgtaatcaattctatctagctcaataaaaattgaagccactaaagttgttctcgcagaggagtaagcatgtgatactcaatcactttgttcaaacatccttatatctttgtgttgcatctattttaagttttttgtcaaattgttcttatgtttttggttctttatgggtggttactattgatcttgatcatattgttattgttctgtttttattttgattgtgcatgagttacatgatcgagtacttatcgatgacatcaatgtataaatttgatgaggaatattattagtttgttccatattccaatatgttaaaaaattctattcgttcatctcatttttttaatatgatcatcatcattttaccgataaggcctccacaatttctaaccttttgccacctcaatcaaaggaaaaagccaaaaaaaaaataaaattaaaattagaaaggggacaaagaaatgggacacatctttataaaagagacatcacacattgatgataataaatccaaaatctctataaaatcaataatgttcactggctgccaacctaaccattcattgtatcaaaaccacgttcttaaacaaatcatgtctcgtgacgccgcatatgctttttactttattattttttttttcttaatattaaaacttgatattatataagaaaatactaaatattactaataccttttaacatttctctaatttaatattacactgtttgaaaaacatgatatattaaattatattcatatccactatatatatttatatatataataataaattagtttatttagtagtagagatgtggtccattgtcacttaacctagttagtcatcgatctctctatctttccctccgatatattaaaatatttgtatggatttggatttggtccccaagaatcatttatctatagtgcttagaagtacttaattatatatatgtatacccctttaatatatacataaatatttttgttttaaattaaagaaaaaacacatacatataaagtaacatgtaaaatataattaataatatatgctacagcgaaatgaaattgttgtaactcattgcaaaattaaatgacattttatataggatgcaaagtatatttttacagaatattcgagtgtaattattattagcatgcattgctatattatatagtggtgcattatagagatagctttttataatttattagtaatattttataaaaattagactaattaggatttttaccgtccgaaacatgtattaaattatatcgcctaaacgtttaaggtcgttaaaaatacctcatgaactatt

SEQ ID NO: 23714 - DNA, 3643 bp, Cannabis sativa
  modified_base (26)..(52): a, c, t, g, unknown or other
ctctttctctcttcatcttcttcttnnnnnnnnnnnnnnnnnnnnnnnnnnnttatattattttataacaatataatatatatggattattttttaatggatattacttatcgttgatcagagattttttctatgaacaatacaaatcggaatttgaagaaggggaaggaggagtcctcgacccgcagcgaatagaggaggatttatttaatcacattgtttgtgctcctataatagggcgcccttggatttttcgatacaatcaagtagaaagccccaatgaattgggattttcctagaatgaatttttttaaaaaaatagttgtaactaaatatcaatttaaaaaatattaacttctaaaaataaagttttaatccaatgatccataatttaagaaatcttagaatttttgtgctcaattttactacttaatttaaaaaaaatctctctaattatactatataaaaatatatatttttatacatcttcctaactcaaactcaactttttttttaatcttttctcaggtttcgatagaataactttttttttttatttatttaagcgtttatatattacaaccatgcataacttgggactcgaactcaagtccaacacacacacactctcctatgaccacttgagctagcctcaaataatttccgatggaacaacttcaaccatatggcatataatacaaaatgaaagatttctattacataacaaaattaactatagaaattcaaattaagcacttttatcttcccaatttttgtattggataattgtccactttgtcaaacccaaaaacaaaaaaagtcttccaaaaatgaaaaaaaaaaaaattaaatattttatatagagcaaaatgaagaatgaaacgtaccaattcaacaaagtagactaagcacgccgttgacatattaattaataatgagtttgacattgtaaaatccacaaaacattacaataccaagtcacaatataaataataatcaaatattgaaatcaaaataacaaaatgtcataaaaaaaaaaacaacttaccaatttcttatttttaaagaaacttcttctcacgcgcttttcatatttgtataaaatctattgaaaccaaaggctgtctttctcacacctgtcatttctttccttcaagaaaagtatttttttgttctttcaagaaaaaatatcaaagccagaaactcttaaaatcaattaagagatataatatatagaattagaaatgtgtcctttgagatttctcttggtgtttttttctgcagttttagctgcatattttgcatggaaaacaactcattcttcttcatcttcttcttcttcacaaaatcttggttataaagatttgacaaatgaaaaaaattcttcacccaaagaaggacaagaaacaagtttcaaaagggtatgttttgcttttattattttttatgtttttatgttcttaaatatgaattttgtattgaattatattggttcccatttcagatggtggagaatagtttctgggtttttgttgatatggctagtggaagatatttgtggaggaatatgaaggagatgaagaatgtagaggagaaagatacaaagctagtcttgtaaataacaaagattattttttaatcttctttaatattcaaatttgttaaatgtaatataattttgtaattgagaaatatgtttaacacaaaacctttgtagtgaaagagcattttcttttatcttcttaagaaagtggaatgagcaaaatgtaattgaatcaaatcatacaatttcattggtttcaagtttttctcttttatttataagtacattttcacaaaatcatacattcatattttatccattaatgccttaacaaaggaaaaaatataaagacacaaacaaaaatctattgggtggttcggtaaacacctctatttgttttggcattaaaaagagttttttagtctaattttttttttcataattagttttttcataactatttaggatgatttataaattttcaaaaaaatttaaataatatacagtgcggaaaaataaagttgaaaccattatttaccaagtgtataaaaaaaacaatcacgcatgcaataaaatatttaaattttaaattttataaattttattttcggcattttaaactcttcaaaaatttcaaaaatttctaaatcaaaaaccatatggtgagtcacaactagctatagaaaatttggagatcagactaaaataaaatttgaaatttgaacacatcatattcatttttttcattatataacaggtctgaacaagataatgatgattgaatttgatacctatttgtatcaatacaagaagcagactaaacaatggtttatcttagatcagcttgtaatttaatagacatgtacagaagagttagaagagcaccttgcggtagcggtgcataccttgcgagattggagccaacccacattgctgccacaaccagagcaaccatgctgctgctcgtttttccacaagcccaacttgcgaacgacagagacaaagtgagcaaaatgccacctttccctcccaaagcccaagcaatgacatacccgattttgtatcccgcgtcaagcttcttatcccataaggccatcaagctactgaaggtgagagatagtttagatccaaaagtatgcaataagaaaagggagataaatgcagatctcaggacttcaataaaggggcctcttttgtgtattgaactactttcgtcgtctgatactccatttgtttcattaaaggaagagcttttctcttgccaatatctctcacgttggattctctgtcgcatttcatcccatctattgacccttacttcactgtcgaattcggagctatagttcctttgccttctatattgtctactggtatgttctctaaatttaagggttctgtcatactgaattcttgttacttcatttgatagcacctggtgtaacagttaaacaggcttaattttgttgttgtatcatgtatgaagcaaggaaaactagagtctatggagacttgttcatatactactgcctctcccccaaactagaaattatgaaacctgtttcgatgattgattaacagaaagtggttatgtcacacacaaccccaattcctccttccaaaaaggccagtactattttggctctaaagacagcttagtgagttgttagggcattggaagttctttaatcaattaagcaaagaataattggtaaaaagctcaaagcatttgagtatatgtaatctattagtagatttacaaattaaaacagtaaataacagctactcacttcataagcacaacgaatgttcttgaatagctctgaagcttgagaatccttgctaacatcaggatgatactgcaaacaattgcagaagagagcataaaaaaattgatccatttaatgtgatcatataacaaagttccttgatggttcaatcatgtatatcaatactgaatctgtataatcacaatcacaaaccaacgagcaggataatataatttatgactactaccttacatgagctagcctcaaatgaccaattcagattctcattattcttttgaacacattcaaatttgaaattgaattgttatttcat

SEQ ID NO: 23715 - DNA, 3769 bp, Cannabis sativa
gagaagaggaaacgacacaatctcggagattattgagagaagaagaagaagaagaagaagaagacgatgatgagaaaaagggcaagaacgaagaacgattcaatttagggctaaggggctgccacggccactgcctacacccattgggcctatgggcttttcgaactaaggcccaaataagaaccaagcccaattgttacaatgatctattatgagctcaaacacatgcaaatcacactttttaaacatttttacggaatttttttatatatatttttaaaaaaacatgaattaaaataataaatataggtaacttaaaaaataaagtgcctccattagagttgcccttaggatgtatatgtaattgtgtatatgaagaatatcatataatttacttatttcatcaaaatttatttgtctatattgatagaaatattgagcaaggtttgcattcttatgaagttagaaatcatagcaagtctatgattctatatgaaagtgtaaactatagagtgtttattcatcataaaatatatttactattttacccttatccctttatcaacacttagtagcttataagcctaatatattgattttttttaatggaaatatgcaacttcaattcaaccaaatcacttactaatattacgattttaatattataagccaattcaaaaacaacaaagaaagtaataaatgtctattttaatatgtttaaataaaataaatttgaaacttttagcctctatttggacaacaagatagaaacattaaatacaagatttcagtgtataaattcaatttgctagcaaacattatgacatatgatgtctacttttgattattctcacatacaagaaaattggcaataaattgaaagttgttatgtaaacactatttttattattgtttataaggtgttaatctcaccaccaaacaactcatcaaaacatttcacaagaaagcaatttttgattagataatcaaatacaaaatgtatagaaagaataatacaagcaagtttgaacaattccttattatgctaaaaaaaaaagaccaaaggaagtatttatcatttcagcttggttttttttgccttaaaaagtttcaccaaacatacaagaatggatatcaatattttgcagccatcataagctatggaaatatgacacctcactttcacattcttagtggtgatgatcctgaaagtagcgaagaccacaatacttgcagacggctggctctttccgatcgaggcatatgtattcaattgggtgcccaagtgccgggttgttgtctgcacaccaaaaaaatgttatgccccaaatggcgttagcttcttcaccatatctttttctttgttttgttaaagaacaaaccatcaaaaccaacaagatttggagaccaagaaattgtaacaattgctatgtaatgtacttttctggactcgaacctcaaatctgtcgatagtttgagctgcccctattgggttcaacgtacattttctttaaagactatgttttctgcctattatgaggatcaagacctatgggagcaaatcacatgcccaacacaacaattgatatgtatgtacttttctggactagaacctcaatccattgatattttcagctgcccctattgggttcaaattcaacgtacattttcttaaaaagactaggttcctcgtcttttacgagaattacaaggatctagacctcagtactcatgggagcaaatcacatgcccgacaacaagtgctatttatgtacttttttggacttgaacactcaatccttcgattgtttgagctgcccctattgagttcaacttacattttcttaaaaagactaggttccccgcctattacaaggattacgaggatctagacctcagttctcatgggagtaaattacatgcctgacaacaattgctttgtaggtacttttctggactcgaacgtcaatacttcaatagtttgagctgctcctattaggttcatcgtgcattttcttaaaggactaggttcctcgcctattacgagaatctataacctcatttctcgtgggagcaaatcacatgaccggccatttgagctatttttcacagttattcttcaccataccatacataagcaagataaacaaaaaagaactaagaacatgagagcataagaaaaactaacctccttcacaagcaacaatcctgccttcaactttgatgggtggaacatcattgatcaactccatgggagatttcttactagtatcctattaatcaaacaatgggaagcttaattccttatgtcttattccattatatcttaaactcaaaatcaaaatcaaatgatactgaaatgaatgaattgtactattcaattatcatcgctatttgtatttgaatcaaatgatgcccattgcctactttcttatgagctcaaattggtcttaaaattaatccaaataaccaaacaaatgattttaaactcttaaaaatgcaaaacaaaaaaaaaaaaaaaaatcatttcacaagcaaattcaccgttgaaatgtattacattaacttcctcaaagctgttccaaatcgaaaatggaaatttttaaagataaaatttttatttacctgcatccacttggcagtgtggttactgacttgattaggaacaagacagagatttctgactcccaatttggatgattcaattagggttttcatcaaactcgacgccattgttatgaagatacaaatgccctgaaattgaaattagggcatcgttaagttccaaccaaatttaatttctacctaaatcaaatttattagtaaaagaattcaattatctcagaaaataatgaaaattcatacgaaaaagaaatcgaaaaggaacgaaaaaactcaacttgaagagaagaagacgacgatgagagagaaggaaaagggatttttgattctctgctaatcgaagaacaatgaaattgagatgaccagttaattgggccgactgggcctgctctaaggttgaaagcccatagcccaattaaggtcaaggcccaaaaaaaacccgggaaagcggtagtagaagcatttttacacaatacttttcataaataccaaaatatgataagaagaattataaaaatacggatttacagcttttttcaacttttttacagatttattttttgtttacaaaatacggacaaccatgatattggtttaatattgttttatctttgtattatgttcttaggttaactaataaattgttacgtgataatcttcaattggtctaagtttttaaatttttaattttagtttaaatatactaataaaaaaaaaggacatcgtgaataataacttgatatttaagaaattttaaaaatataacttagacattattacctcaaaaaattaaacttaactatttattttacagccaggagctaaactcaaagtgtcgtttggtaacacagtaacacttttggatttttaattttttaatcacaaaatgaaagtaaaattttatttttgaaaaataaatatgctttctataactacttttcttttttaattttaaaaatagaaataaaaaatgtgttctgtaaagttcaattttattttaattttttgatttaatttaagtttggtttaggtccggggtgagattcaggtttaggttagagaacaggttcagcgccagggacgtaggagggatttgggtttgggcgtgggtctggttagagtctaaaatattgattaagaaaaaaaa

SEQ ID NO: 23716 - DNA, 1656 bp, Cannabis sativa
  modified_base (1606)..(1608): a, c, t, g, unknown or other
gtctcccattattttattatgttttgtgggtaaagtatgtattaccctaacgggtataggatacccacatgtaaaccatatcttaataacttttaagaaaaataattaaaaaaaaaaccaataaaattatgttcaatactaaaatttaccgatatatatatgtaattactttagtaattagtattaattctattatttgtaaaatgaatatgaattaaaaagtataattactaacaattaaaataataaaaagtattatataattattttaggactatatgtttttatatatttttcaaatatgaataaaacctatattattcaaatatacatataaatataaccgaatagggtcgggtaggataataggcaaggtacacttatactcataccttactctatacccgcatcggttacatgttttcatactcttatcctggccaaaactctaattcaacaggcattaccctacccacatgggtagaatactcacgggtaaacgaatttttggtaaaattgtcatccctaacagatagtagttgaaaacttgtatacccttaaatgaaaaaaaaaaaaaacaaatgaataaaaacacgtaaataaaaatttaagaacaataaataaaaagtaaataataagaatctaaaactaaatcgaataaatttaggttttcttgacttttaaaaaataattttagttccacacaaccggtaacaacaccaccaatttttaactggccaaagaagaagaagtttttgttgaactctacaccttctattttgaattggcaagacaaaaacgattgggatcgttttaatgaaattatttttattaaatttttattttttaaagagtttatgaaatagttttttttaaatcgtttcttagttttttttctttaactccgtaatataatacaagagaattctattcttcttttatcgtcacttatgccacctcataattaattttgaggaattttatttgcacctaaattttttttataagtgtacctcatttttataaattttattttacataaaatatatatctttaattatattagtttttttttttgtttcaactcatattcttaaaatatatacctatcaaataaaaataaattatattttaaatatagggatatattatcattttgtagagtgcaaataaaatttcccatcaatttttctcttgaaagaggtaaatttactactctatcctttattacactgtcttttgaacagtgcttttgaagagtacttccaataacttctctactctattctttaaagtatctcactaaaataccattttctttattttacctcacacatttatattacatcatacatcagcttctttatattttgctttaaattatttaaatattatatttttacatatattttacttattaaaacaaaaaaaaaaatgaaaatgagtaaaaaagagggaaagaaaaatataaaatatattttacctcttcactattcatgagctaaatgtagagaagttttttttgaagtttgggatgacgtataataacaaggggaattccccatatactgtttttttcacattttttttttttttcaaatttacnnnttgggtttctaaagtggtttctatgtgggttgctatacgattttttgt

SEQ ID NO: 23717 - DNA, 3447 bp, Cannabis sativa
  modified_base (1856)..(1859): a, c, t, g, unknown or other
atattgcacgtcgttcataaatcaattcaaaataacaataaaatactattttgccttgtctactttcttcaaattctttttcacatatattttttaatcattcaatgatgtcatttttaggtctacttatttttaaatgaaatttctaatatgatcattatgtcgttcatatataatacttgtatgcatttatttattttattttttttgctaatttaaaaatttcataccaaagaaaaactaaacacaaagtccatggtggagagttgtaacaccctactagtttaggcgtgcgagagtgcttcttataattactgtgcaatattttctaataaaagagtttattaaaatgtgataaaatttaagttttaataaataaacataaactgtattgcatttataaaatctgggatctcgtatctatatttttcaactatacataatcaaaagatgtcacgcagcgactacaaaatcgtgagccctagttgtcccgaagatctaacactccaggtcgaactgtctcgatatgtacaatcttcatccagctccaaactcattatcattcaacaacatttttacctttaccttcacataatatagcatttatgagtctacaaactcagtaagaaaaacataaaacctaacatataatcgacctgcggctaagcacccatagacctatcaataaagtcattaaccatgtagaatacgtataactaagtctcgaacattcttgatcatagtacaattgactataatatcacatacactcagtagtctagttgtactagtgttggtagcatcaatccatactataagtacaactagccataatataccatatgcacacagtactctaacgtattagtgttggtagcactagttcatgctttcgaaagtataactaaccgtaataccacatgcacttagtaatctgtcgtactagtgttggtagcattggttcatactttctgaatttctaaatacatatattcacgatatcaagatggaattatatatacaccaattatcattgtaacggataggtcctacatctggcaaacataaacatgcacatatgtatgtgtgttgggttttgtgccctaactaaaattctatttcaatataatcttgaatattcatttctaaataaagaaacaaaactatttctttacttgattaatatattgcttggttcacatgtttgtttcatggtcatttatttgatttataaattcatctaaatccttattacattgttattcatgattactgtattgtctacacagtggaaagtaatcaagattatgtgattaaatatagtctcatgatttattagtacacaagatttctactgatgtgataatcaacaatatagtttacttacaccttggataggtgttatgccctttccaatgtattggtaaagtaagcttagattggatgtattgttatgcatcagacttgagcgatattaaacattggataagatatcataaacttactgtaatatctatctaagtcaatatgacttagtttatttaagattaatgatctcaattctgagatggttaggttctagttcaattgtattatttgtgttctttgatttgttcgttaaagttgaccacttggatcttcccgatacttacatattgagaacatagtagtccatttgagtgggagcgcgaatcatagatacagaatcctataacttctataaatgcatagaggtaaaatgatgattttcttcgagcttggattaatagagataaatggtggagtattcatttcagtaattatattagtttactaaaatatcatttatagctaactaagtgttttaagaataaaannnnttgaagggtagaatggtaaatttgtctttactcgatgtacatcatctatagaggatcattgattatttggaatataacaatggataattaatagcgtattattatagtgaaaaattttcccctaaaaactcgagaccaatttcttataagattgacatgtggactcacatctctatcgattgctcagatgtcaagaatggacttctcgagaataagcctcacctaaactgaacttgcaagatgatgtgaccatgatagagtctagtcgcattattatgcttcgcgtaatataaaataagcaagaccaagaagggattatataggttgcgcatatcccgagatatatgcaatgactaggtagccttctcttgcaacctagtaaagatcatttctttacataatgaattagttcgaatgacaaagtatattcgatgactcgataaggactagcatgtcctatgttgtcgatgcatatgaggtgtccatatatacgactagtcagaacgcagacaccttaacacgaggctcgttagccctccttcgaaagatagaatgcactcgaagcctatgagcttgtgtgagaatatgaacaggcaactcgcaccctagaggtcgcttatgttgccatacttattaaaacagatttaaattgttcttcgttttttctcttttacgtttatactcatttaatgttgatattaattgtaaaatggttctataactgattagctatgtataactttaatgacacttgctttgtatataaaggagtgatcagacatgaataaactaagaaaaaaaatcccttgcaacagtatactaagtagactgtgatttgattgaaccactacacatctttgtgttcattgtattttttatttttcctctattgtctgggtagtctcgtttgaatactcgctattctaagttgtttactcactattttttttttgttaaatatttattatttattttctatttggtgttgtccaaattcctcctacaacatttggggtcgtctgtgggaagtttcattattgattttggaggaaaatcaacatggctgccaactagacaaatggaaacaacaacacgaggtcttttagtgtcaaaaccatgaatgttccactcctagataatggaactaatccaactgatacaatcgttagaggtgtgggacggacctacatcacccctctcaacctattcccaaaaattgatggtcacattagagaaacatcgacaccaacagccaccatgggccacttcctgcctatcacgccagccatagtctctgaaggtattatccagcttatgataacacaatacaaagacatgtagaaatagatgcaggcattgtaggccgaggtcgatggaagagagagagtcaggacccaacgtccaccccgggtcccaaacacgcattcaggcaacccttaggtaaccaccacaactaggtaacacacagagcatccaaacaataatcgtactcgcagggaacatgtgactgaacaaggaggcgttgatctgaatcaacctacgcacaactttgtgcaaaattgggagccagttattgttgggttttgtg

SEQ ID NO: 23718 - DNA, 6141 bp, Cannabis sativa
ttctaatgacttttccgaagtttgttgtcggtgccggaaaagtcgccggagtagctgctagcatcagaaaagtcgtcagaattggcattgtgaacggaaaaattaccaagaaaccgaaaccgaaaccgaaatcgaaactgaaatcggtttctttaagaagaaactagtttcttggtgatttgttcagtgatttttttcggcgacaatgtcaattccgacgaattttctggtgctggcagcaactccggtgacttttccggcaccaaccattttcgggcaccggcagtaaactccggtgacttttctgtcatcaataacaaataaaacttcctaaacaaatgaaaacattaaatatgggatttgaaaacctaattacatatatatggcatatcaaataccctaaaaagacctaaaaacaaaaaaataccataccacttggtcaaatttaaatgtgtcatatttatcataaaaacttttaaaatcttatagtaagtgtaatttcctctttaacgacagaataaattagattcataatgattggtgggcttggacaccagtacccaccaaactcaactcatttgaaccatttactacttcgcccgttaccacatcattcctcacatggaccccatcagtatcttccaaggccgttcttctccttttcgtgtcaagaaccaaaaaacaagcctcctcattaatatcttcagataatcccttatgtgtttgttttattaatatataaaaaaatacaaaaaaatattccaagtagattcaaaagatattattaaaaatatttatttataatgtatgaatttaattttataataaatatcaactaaaaatatttaagtaatttcataataaatatttttaaattttaaatttaaatttctattttatctttttaaattttaaaaatattttatttattaataataactcaaaaaaattataaaaaataatttaaaaaacaaaatatctaaagcaactcacaaaaataaatatttaaaactaccgcacaaaaagcagttatactaactagttattttaatatgcatattttagattagtgtttctgaacacttttttttctgaaaatggaacaacttacttttaaaaatagttatgtgtttgtttttgtaaattaatattaaaaaaaaataaaaaaaaaaccaaaaaatattacaattaattagatttaatggatattattaaaaatatctattaatgatgcatcaattgtttttttttgttttacacttcaaatattctttttttttttttttttttttgtattttttaacggaacaacttaaaacacaataaaaattcatataacaacccatataaaatctaccggagcaacccaaaccgtaaatgaatgtaaaaaaaaaaaattaaaaaatattttatttattaataataactcaaaaaaattataaaaaataatttaaaaaataaatattcaaaactactgcacaaaaatccgacaatatacctagttattaatatgcatattgtagattagtgtttttgaacagttttttttagaaaatggaactacttttttaattgagcttaaattagatttatattgataattgaacttttaaaaatagttactaaaatactgaggacagtattttgaaagaaaaaaatccaatataaacacacagtgagtactttttataaaatatggatgtaaaaattgagaaagaaaaacaaaaatagaagtgaaaacaaattgtcttcaacaaattaaacaacataaaaattcaaataattaataaaaaaagtcaaaaaaataaagtaaataaatacccgtatttttgcaaattattaatgtaaaaaccataaaataaaaaatctcctataaccaataagagttttgaataataaaggcagatgaaaatatttcaaatgttagctctttcttccctttcaatatttatgcaaagcaaatacatgtattttagcagccaaatgagttgaccaaagaaaaaaggaacaaaaataaaaataaaacccataaatgcctattttatttacaagcagccggaaaagaaagaaagaaagaaagaaaaagaaaaaagttcttgtggattttcctttacagcctcttttaagaatgtggttgttgtccaaactaacctgaaacattgattaagaacagtatagatttcataataaaaagtgaaaccaaattaagactagtaaaaaaaataaacaaagagactactgaccttgacaaaggcactagagcttacaaggtcaccaaaagaagccttttattatttagcaagtaggactctccaactatccaatttcaacatcaaaattatcccaaaagacaagggggaaatgacccggattgttgtggtgtaatatacacaggtaaaatgagttagtccaaaatctcatcaggacaaatcaaaggatccttgcccttcactaattgcatagaccagtttcttgtacatgatttcctgttcatattaaatggcatacagtacacatcaaattgattgacaaataaaatatttaagttttcatctcatgatgcattgattagcataaaataataatagctaccttggtagagtaaggaggaagcttcagataattagcacatgtcatgacactaggtaagtcatcatctgctgactctgaaggccctgttccattagatgccgcattacttggggaggaggaatgctgcagaaggctttcaaatcattagcatttacaaaatataaaccaaagaatgaatgaaacatcgtcataccaaaatgagaaagagagaaggaaagccacatcaatgcatgtacaagcaatcttgtttttacgtcatcacaatgaagaatacaatacataccacatacaaacaatatttgatgaaaatctcagctttgatatgtaattttacaacacatacgaaaaacaccaatctgatgagacatttgatgctaaattttgtaatatatattacctttctgacaatggtcaattttggatttagtactgctagaccacctggtggaagcctaggtgcaccagtgacaaactggcagaaggcccgctgctgttcaggtgtgaactctcccataatctcaagcaactaaaataataaaacaggcctcagcatcagcatcatcaaaaagttaaatgcttaactagcaaagccacaactgtggagctataaaacttacattcacaattgcaggactcttggcagtgtaaccatgatcgaactttaggtgatcagaaagtgtttcagcctgcatattttaaaaccatgaacttgaactattagtacttttgtatagtgatgataagtgatggtaatgaagttaccgattccaaaggcatttacctcccacatctctctacgcccacaaagtagatggtccaactcatatggtgtgaatatttgtaaagatgagatgtcaaatacctgattgttatgaagagtatataatttacttgaaagtagaaagtaacatttcatagagaaacagatgatataaacagtgtaaagtaaaaatgaactgtcacaacatagtgtaaacctgattgtggcttaaaatatacaataacgaagaaagcaacatcatagagagaagcagatgatacagtgtgaaccaaaaatgaaatatgtcacatgtctgggagattgtggctaagagtataaaatacacaataacgaagaaagcaacatcatagagagaagcagatgatacaaacagtatgaaccaaaaatgaactatgtcacatgtctgggacagctacctatcagattgacaaattcaggatcatctttaaaacttcatgcacataaaggcacatgtacatatcgacaaattcaggatcatctttgaaacttcatgcaaataaaggcacatgtacctaaagcctacagattcatattgatcactacaaaaactctgccactgcacttatcctttagcttattaattaaaattcactcttaatcaaaataacaagtcccatgacccacttctctgataataaacttccaccaaaaccaagaaggatcacaaatgtacccaaaatcacctaaccactatcgaataaagtgccaatagttggtcccaatcaaattgaaaaggagaataatgatgcatatgaaatgacaatcatgttgttaattagatccaaatagatgtaaacatgtcatgtgcaatacaaactcgcaattgttatttaaaccagcaactttatttacctgattgaaaccagccctaaatgcttccaattgccgcacaattccagtcttgaccgttgcatcaacaaccaaggatatgtactcttccaagttggtaatatcaacctgagaacattacaaccgtttaaacagtattcacagcaaatttaaagtttttaaaaataaaatcaaaacgtattttcatacattttcatctcctcctttcagcaaataatctggaaagccaggaagtgtgaaatctaagcagagatcttcaattggagccccacggaaacgtaaatcggcaattgcactgccactgacaccatttgattctaaatattgcttgcgacagacaaggacatgcagttcttgcaaagtcctccccagctcggcatcaaaggaaataatatcgtgcaaatcaagatcctgaaatatgtttaaaaaaattacagtgaaaatcagtaaaatctacacaaaaaaaagaaaaaaaaaattcaaggctaacaaactaaaaacatacacttgtttctataattataagagtacatatatcttacctgaccaagtataagtttgtaaaatgctgtggacagaggaaggtccaacagccgtccatcttgaagagccttagccataacacgcccaactaaccggaaatactcgatcactttaaaaaactgactcccgtcagaagtgtctgcatttggaggccatggacgagggaataatccaaggggagcttggacaaggtccccactgccagcagcgtaacgaagttcagaacgattgttgctttttccatgtttctgttcatcaatatcagtttccatagaaggtttgtccactgaaaaattcgacctccacatgttgagtccaaccttctgtaaatcatggctcaaaagagtataaaactcaagagtaggacccagcccagtgcctacttcgccaaagtattcaacttcaagcacagccttttggcttgaatacatttccattacttttgctgccgaatccaaaatgcggtttcgagagacccgaaccttttggcgttgcaatctcccaaccctcacctctctagaatttgctgacccatgcccatcagctccctgctgttgctgaaggcgatacaaggcacgagataatccaaatgcagttgagtagaaatactgtctgcgagtttcaaaaggaaacaagaatgggcatgcctttgtcagctggtagcaccatgagggaagacttccactacacaatgcaagagcatcttgaatttgtcgagctaatttgggagtgagcttgttgttaacaaactcctcaaaaggaacccgagaacctgtagaaatcatgttttctatatttgaaactctcccctcagcaaaattgtcagaaattgtctgagccctcaaacgaggtgcaagctgatttaagccctccaacacacgcagtagcgccaatatattgtacgtagaattagatttctccaaatcacatggaagctcaccctgaagaatactatccagcagcgacattctatcagaattagaattggaagcagaagccaatttggttgatttggatgtagtaatagagcttgatcctccagctgaacccctttcagcttgactatctgccctctggtatgcaatggtatatatatcactccacaacctgcttccatcacttgacacaaaatcactaccagtaaaacgctcttcatcgtcctcatccagcacaagctgtcgttgtatggcctgatagatagtcaaatgcctattcagttgcttcccaccagaagtaaagatcaattttggcggatcactagaactaccaaaaagaggacgcccatgtcgatctcgacctcctctaaggcctctaccattagcagatccaagaccagccatagcagcggcagcaaa

SEQ ID NO: 23719 - DNA, 2594 bp, Cannabis sativa
tactgcataattttcacatattaacactactgttttgaaaggctaaatcgcgatgcggggcaatttcccatagtaccgtgaggtgtaagcctcaaggggcatcgaggagtaagcctcaacaataagaataaacaattcataacatcatataaaacataaaatttatatatcaacagataataccatatcaaagtcaaaaaattcatgatgttactagttataagtcttaaaatcataggtaatatcattaaaggttcaaaataaaaatccttgagagagatggaaggactgcctaaaggagatggactagttgggtgtgattaaagaggagagagaggatgagacctagttgtgttgctgcatgagtgactgaacaggaggaaagcttgttgtatttgttagagtgtgaagagaagagggggggagagatgatgtgctgctggagactaccgcaaaagagataaagaaaaaagatgagtattttcagggctttatccatttacttttatgctttcaacattgttaatttcaaatttctcaaaattaaacttaaaatagcctaagaaatttaaaaaaaaaaacaaaaaaaggcctacaaaactcttaaaaaatggcccaaaatacccccatagcttagacgtgagccttaagcgtcttagaggcttaagcctcaaggcgtaagcctcatgaacaatgactgaagctaagcgtctaaggctatttttgagcacttcgttccgagagcgtacgcctcttttagaacatggatattaactagtaactgtgtaaattgttaacggaaaaaaaaaaaaaaaaagggtggctctgtgaacggtgaacaataacatgaaatttgttttgattgagtgaaccatgaaattgattaattgattttattctaacaagaggaacaaaaagaccaagaaaaggtttcaatgaaaagttgttagatatttaatcaaatgaattaataacagagaaagttattccaaaaaaaaaaaaaacaatgctgaagagatgcaaatgaataaaccataagtgttcacagcttctctaaataggtttattagttgggagctaagctattcgatggtgtattttccattttgattcaaaacttctctaaacaggttataaattggtaactattcaatgaatcattgcttactttgattcagatgaaggaaacataattcttttttaggtgtaatcctattgaattaaaatcaaaaaagtctggaagtttctttggcgtggcccctaacattcaaacggaaaaaaatactgagaacaaaatatcggaaccatgaagattagaacagaatctcatgattattaccacatattcatattattaatgttttaagagttagaaataaggtctacacatacgcacaatttctaaaccttagaaccaaacatcataaactaattatgacaaacaaaactattaagaataagaaaaaaaaaaaaaaaaagaaaagagaatcgaacaatagctaaatcacatccctgtaaaaagacctagaataccaatgtagaactctatacaaaacataaagaatcacttgaaaaactcaaacaactagacaaagtttccatcatctctctgtatggagggctgcataaaaatataggttagaagtagagaactcaattggggctctttctttcatgatcaggttttcaagaatacatctttacctattatatctaaaataaaacaaaaacatactgaaaagttgcatcctacaaagttacaacaatctgaaattcatttcagagtaacaaaaggtataaaatccccctttacatagttagttaaatatgattacggcataaaatattaacatatttggcaagaactaactaatgctcttcttctgaactattttttcggatgggtactggtagtctcatcacagggtttaaaagaacaaaaacacaggttgatttaattgctttaaaactaagcagaggatataaataaaattacacttaaaaaaaaaaaagaaagaaacggagagaaatcaaaaaattatgaaaagggaaacaagaaatctatgtagaaataaaagaagggtacaaggaatgaatccgtacctgtcagtgaagtaattcgaaaacccaacggaattccttctcgccgatcagttagtaaacagttgatgagttagcgagagaagaaagtcgagaagagcgatagagagattgagtaacggagagagagagagggtggtcgatggagggagaaaactcagaagttgtggtctggagattttgaagcaaaaccctggctaattaatgccaatatagttgatttgaggggttttctaatatttttttttccggctaattagtattttttttcccgaattttgacatataccaaatcataccccctgaacttttttgaccgctaaaaatttcacctgaactattaagattgttagatttaaggagttttgtctaatttcattcaattttacagtttctggatttagactggtataataatcagtgataaggtaagcgttatgtcctttccagggcattcgcaaagtttatcagtatcagatatatggagtatacat

SEQ ID NO: 23720 - DNA, 6594 bp, Cannabis sativa
cctggtaaaataaattcaaacactctccacatcagcttaagtgccatggcctccatgaacattaacgagcttccaaactcgagggccacggaccctcactgaagatgctttcataaaggatagagctggagtggactacccaaaactaccattctaggagtgataacaagccagctggagctcctttctaaggaaaagttagctatcctgagagaagaatctggagtggccatgatagtcatctgggaatccatttttgggctcgactatcattccacaagactcattctgggactgcgattgaacaacttcccagagataacgttacagagacttttttattggaggaactataccacaaattctacctagttacttcaaattaaaagaatgatgatgatgaagaaagaatgcagcgatcattggttggtgttccaggaatcttagtatactaacttctgagattgatcaagttcaagcaatgcttgaacttgtttaaggttatgaccttagtcccaatatcgatcagcatgattatcttcagtatttacttcctctaaatcaactagcccttcttctatcttctccctgattcaatagagtcttatatctatgcgtttgctcttttcatgaaaaaccaaattcttacaaaggtggatggaagactggctacctgaatacacaatcactcatcctttgatttattttaactcataaatttttcctgaaggcataacgcttccttaaaagcttctctagtcgccataaattctgcttccatggtggaaagagaaaccacgaattgtaattgagccttccaacatatatagttccagcttgtcaataaaacataggaagtaggttattttctcgtatctctgtttgaggcatagtccgcgtccacgaacccttttaactccgattctctttttcttttctcatatgtcagacaataatctcatgtgccattcaaatatctcaataacaatttaagggttttccaatgttctatccccagattggacatgaaccgacttaaaatacttaaggcgtgagctatgttcggtctcgtgcttaccattatgtacattaaacatccttgaaccactacacagggtacatctttcattacttctttgtctttcgtaatgttaggacattgttcctttgacataataaactgtccccctaatagaacgaatgtactctttgcatcttccatgttgaacctctgaattatcttcttgatgaactcggattgcttcaagctaatagtcccttccttccggtttcgtgagacttcgataccaagtatcttttaaactggcccaagctctttcatctcaaattctctctcgagcttggctttaatacttttgatcaccgatttatctttgctcatgataagaatatcatttacatagagcaatgagaacactgccgtagattggtccagattcttaaaatataagcagtgatcgtattcgaattgtttgaacctaatttgatgtatgtatacatcgaatctcttattccattgccttgggaactatctcaaaccatacaaagatctattaagcttgcacactaatttaactcctttcccttccatctgaaacccaagtggttgcttcatatagatctcttcatcgaggaacccatttttggaaaagcaatcttgacatcaagttgttcaacttcaaactccatttgagcagctaaagacaacatcaaccttattgtgttgtattttaccacaggtgagaagattttagaatagtctataccttccacttgagtaaaacgcttagccactagcctggctttgaatgttcattctcattgattccttctttcaccttgataatccatttgcactccacaattttcttgttctccagcctcgacacaactacccaagtcttgttctttagtagtgagtccatctcctcatccatggccgtaatccatttagacttgtctccacctgaaattgcctcttcatagcttctgggctcttcaatttcagattgttaaaccaccgccagtacaaatgttattatgtctatccaaaccctatagctggaggttgaatctctctctaggttctatcacgagccaacttttaaccttctagacctgtctgtccaaacccttctggcacttctattttgccttcattatcttgtttttcggctttataagagcttccctatgctcaatgtcttttagttccacattatcttcagcctgtgaaccttctttcgggagcttcgttccttactccacttctacagttgcagtgtctttgtttcctatttttttagtaagacacggagacacactacccttcttggaggtcaactgaggatattctaacacatggaaaataacatttctagcaatcacaacctttggtttacccttcctagaaatgtagattctataccccttggttcctaaggcataacctaggaaagtttccttcacgcatctaggttccagtttgtcaatggactggtgtacatatgcagtacacccaaatgttcttaaaagctttaggttggggattctggtataccacatttcataaggtgtcttaaggtctataactctattagagctcctgttaacaaggtaagttgtagttgctaaggcttccacccaaaatggtttgtctaacctagaactgaatagtaaacatccatctttttttaacaaggtttggttcatccttttaccaacaccattttgctctggggtcttcactacggttctatgcctagtaattccaaattcttgacatttcaaatttagagttaacaaactccaacccagatccagacgccgaagcctcattccgcgcacttactgggcctctctctaagagtggagagcctgttcttgaacagtcttggaacactttcaagcactcgtaaggtctcgtacttcctcaggttattttaattattcctgaacatgttaacatgctggtccaactcccatggactatcattcaagattaattttggagcgtcttctcactccattacttcctcctctgaatcagctttttcttgacgagttcgcttaggcatcatttctgtacaaaaggaggaaaatttaagcaattagccaccctaactacctagcatagaaagggagctagacgtccttccccataaagtgcttggagaggtcctaactagactaactatccagaaacaaaaacttacagtagttactcattctagatgggaagtgaggaacaatgcagagcgaaagaggacggagattaatgacgaacccaaaaccagaggattttgggcaaaaggaaatttcgccaacacttttgccagaaattgatcaactctaggaatttttaaataggaaattcaaaagacaatatggcatacaacacttaaatctacttaagatggaaaacacacaaacaaaaaaccctaattgcatcacagaaaagagcatgaaaatacaatttgaaacgacgaattcagaaaacacaatccgtagatgaaggaacaacatacctgatattgataattgggatgttaagctaattgtctctggatctggctagggaatttatttgcaccattcacaaaggggagatgctagagcgatcatcgaatcaatttctgtgtaaaaatccaggctcgcgatttcttctactgtaaaagtcctgatcactggagatggaaggtgtgggaactctcgtgccctaatcctcaatagcggacagaggaaaaatccacggaattttccaggttgaagaagaaagctttgttttgaatttgatttgtagttttagggattgcagagaaattcgtgtgctaggaagggttgaaaatttaaaaaaggaggaaaagtggtaactagaaggcataagggtatttatatccaaaaaagcgatccacgtaagaggagatggatgactcacgatcttacttctagaaacacaaaactcatccaacagttggggagtctaacaatctatgtgtatccttgcatttaatgcaccccaaaaccaaggcgtggaataatgatgaaaatgctattttttgatttttgcgccaaaaactgaacaaccttaaaaaatatactcattttttaaagatgactcctcgatggtcacgccctgtcactcacgcgcgactgacatgtagacatatcatcatcacaaacggaagccaacttctgcggtcgagtggcatttaaaatgtcacaatttcattttttaatttccacatgtccaaattaagagagtgtgatgcaagcttccaccatatgcaacattttggaagcttggagtgtaaatgtcatccgtgtttccagtattggacatgtggactcaaactcagcatccgagacccatcaatgggaccctcagtaaagataaaaagggccaatcccatctggattttaccttccaataatgtatcatggttctgctcttgcaaagcctttcgccttcagtaagccgtgcccggaatacatgtttggtaccatgagtttgaagagacaagataacgcgttcgcagaagacccttctagtttccctttttattcatgcacacaaataaggaaactccagttgtcatattacaactgagcatcgtataaagattaaaggggaaacttttttcaataaatattatgcaattaattcaaattaactgcccataattagtgtacacggtgttgaccatatcaatcccaatccaatctgcctagtcagtagatcctcttctccatggactggacttcatcagaaagtccaagagtattattgtaacgccctattctacagggacgccacgtttgtacttttcaaaagaattacttttctattaaattgtataagtatatgaaaattgtgggtaattaaaattttgtaattaaataaacacatagatttataaaagataaatattaacattcacgaggaccccttgttaccaaaatatttacattcagaaagaaaggtgcttttacaaaataagtttatacataaaaatacaatcaaaatgggacatcctttccaccgagtcgtgccaccgcggctaatatgtacattgctgcagtgacctcaaactcatggttgcccaactttgccctttcctttacatacaccatgtaacacccgtgagtcacaaagacttaacaagaaaagtgattaattccataagcagtataaaatccatttagttacattctaactaaaatatactcaattacaacatatcacataataacatgcttaatctatttcacagcatcgtaatcacacaatcttggtgcttcattaagcaccaataccactcgtcaaccatgagctacgtatgtcactatcgttgcccgatacaacgaacgataagtaagaaacctatctgcagtttcaagaataattacttgtaacggtaatgaccgtttccaaccttcggtcataactgaggcataacaaacacataaccagaatctcgatcatatttgagattataacaaacacattcgctaatcacttaatcctaagtgatgcgtaacatttttcttacctctatccagaaattatgtgtgcgggccgacctaagtgaaaacaaagttaggcgatcccgatcctatgtcacgataaccaaaactcaataaatgccttaaaccaaaactccggaataaaaccctaattcaaagttgaacgagaacctaacttctaacaactccaaaataggtcatcaacacataaacaaccttaaatagatactacgcaccaccccgagccaaaatagatattgaagaaaactcgggaatttcccctacagggcaaccggttgaccggttctggcagaccaaaaattcaacggttttctcccgcaaactcgaaccaataccttcccaaaagtgataaacaactctagaagaactcaatatcatagaaataatattttcaaatcatcagttcaccacaactcatcaaattatacaaatcattatacaaaagccaagaataagcttttaaacctaaatttgcaaactccaattctaacagccacacaatacatctaaaagaacctaatcaaaccctaaaaaacatcctctaaacacagcttaacaccaccgttcagaaaccttaaaactctaaccaaaatcatttcaaaccttatgataaattaaggaaaagacaccacaaacttacctcaatctagctagcacctagtgctatggaattctaacaaaaattgcttgaaatgggctaaagtcttcctaaggttcagctggttcacttgagtcgaaagaggagagagagagagagagaaaaaaaaaatgatgggttctaattttcttctttttgctttctaatcttatcttatttcatataattaaataattcttattatataaaattctacctaaaaaaagatgacactaatacaaaattaaatcctaaaaccaacctagtacatttaccattttgcctttgttcctattcttaaaccaaaacataacctagggtaacttaggtaatttttaactaatacagtccaccctctattgttgtgacatttctgaccactccgccaa

SEQ ID NO: 23721 - DNA, 2726 bp, Cannabis sativa
taaatattataatttaattaatgagatttaactattataaatagaatcctaatttgagagggtcggccctatgctaatttgggccttaggaaaaaataaaaattggggtctagtgaaaaagtgaggttattgggatttgaactctcaacctcttaaaagttaaactaatcaaattacaactaagctacaacatatatttagcattaaaagtattattatttattttattactaactatattttaattttttcttgaaatggggccgtgagcggtggggggcctaaggcagccgcctccttcgtcttagctcagggccggccctgtacatattaaaataataataaaattgattaccataaggctaaggagtcgttagctgaccaattctctcagttgatgctctaggaagatagaggcaccaactttgcaggggagagtttctgtgataaggagttccctagctactagtaacacggagaatatctgtgagtcaaagccttcttcagttccaggaaccaaagccatctactcccaagaagaataagggttttcctagaggggccaaggaattttgagacacgtaaaatcgggctacacccttagcccatgagagctctacctatacgtgtcagtctacgaacctagtgacgaggcattttcaggtgcaacatcagaagttacctcccatgacaagctatggtacagagcatgcatgtccttgtgtaccttaccaaatgatccaacaactagggataaaggatattcaaaaaggaaaagcccagggatgacatgcgtatgaggcccatcttgtacgatcggacacccttaaattccatatgggaaaatgccacctaccaatccaacagtcatattttgccccaatgatgatcaatctacggccacccatgcaaaggagttggcctataaatatcctcgaaaaagcactagagggggaattttctgagagaccttttttttcagagagaagactgattgttcataaaaaaacctcatttgtattacacctagaaaactctaaaatattcctactaagcttcctcttcttcaggaggaacacgggggagaggagatccagtccaccatattcctacttgtatgaattgttaccgaccgatgagcctaataaaatagactcgcagactacggatatttaacatctgaactacataaaaatattttatttgttgtttttctatttatattatttgttaattccttaagctctacaaatatttagtttccgaaaaacttggtaaacacaaaataaaatgatttctgatcttttatcaattaagaaatctgattatattgaaatgaattttatttaggacataaaatcccgaaaaacttccaattttactaatataaaactaaaaattttatttcaagtaatcttaaaatcttgatatccaaatcaagtgtagtatgtagtaatatctttgtaataggatctgacatgttgtattcagtacaaactttctccaccattacatctccttagtcacaaaattcttgatattgtgaaattcctttctatatgtttactcctcttagggtattggattctttactatttggcaactatatatgttttatcaggaagtaacactagtagttaatctatgactagaataatgccaaaaattatatagaacttcccataggctgaataattatctagtagccttctaggccacttaaatattcagtcttactggtagagttagagactccagattggttcttacacttctccaaaaaaaactgctccatccctagactattcaccatctcataagtagactttctagcaataacacaagtctagcaacttgatttggtgtagcctaggagtattaaaagaccacccttattgactaacatatagttcctctttttatcgtaagatttatataattgtcttccaatgttcttttccaagattaaactgatacatactcataactcccactcatagcaagtgtctggtctaatgcatacaagagcatacacgagacctctcactatcgatgcttaaggaattcttttcatgacctttatcttttctgaaatagttcaaaatgttcgttagataaaatctatgtctagaatccgaaagaatttctttagagttagccattagaaaaatgctccaacatcttactaaagtaatttgcttgcactagagtaagtaaattaccaggtatactacaatcctatgatactaggatcgggaagttttgttaagtcaattcaatatacttattatcaaaattttccttcttgtccctgtaatagaaaacgtttggttactctatatgaatggttttaaccacagttatcttggctttgcttcttagttcctcattctgactatccattgattatttaaactaacaatgtatttttatcacaattgtcttccaagtcataacagggtgggttcgtcgaaaccctcccactatgacgaggtacgacgactttctttctaggaacattagtaatattgacctcatctgttgtgtcaatacaacagaggtagtgggaccatcttatataaaactaaatgataaactatctcctctactttgctactttgtttttagatttagtcatgttcttagaaaaatagtatttgttaacataaacactttcttatcttaatgaccataagatggttcacccctaatcactttagaatagc

SEQ ID NO: 23722 - DNA, 1663 bp, Cannabis sativa
aaagagaaacagagaaaaaaaaatgaatgagaagaatagggcagttattgaggaggtggggtgttagaatggataaaatatgacatatgcatggtaaaggtgtatttgtaattattgaacttttgaaaaagtaaaattgaaaaataaaaaatgtaaaaaagtttaaataaccgaataaataaaaatgtaaaaaaaaagtaaaaaaggacatcaagtgtaaaaatctcctaaacatttgtctcctcattggagttgttttttttttttaaaaaaaaatgggaataattattgttatactgtagcaaactccaagaattatgctccatatatcactaattttataccaatgttttttaacaagattatctctagttttaaacccattaaaaataaaatttaacacaaaaatatatctgttacattattcataaatccttgcactctcttatctcataaatcaatatatctatacatctaacattccacattgctgcatcctgcctacataattcgaaatttcttaaacccacattctaattttttattatatattgcacaaattttacacagtaaaaattgttagaaaatttcaatatgaattattaagaaatggaaatgtgcattttgaagtccttaaaggactgatctcatatcaaggaagacttattgataagtgtatgtatagtgtagatatgaataattaggtcgaacctcaagaaatgttcacttttgtagaagagagaagaattacaccaggaacggagccaaaaccatgataaaggtggttataacttatagcccccaaaacattttgatcccctatataacataattataaaataatatatatttatatataaacaaatttattattaatttaaacatataactatctaaaagggtgttatcatgttatagtagatctcttatctagtttaacatttaggagagttttttactctatttttttttttttttttatgattctatgtgttatacttatttaggtttatttgtaaattttgataaaatcttaaatagtatacagtaccgaaaataaagttcaaatattttgttacacgtgtgactgttttttctaatacgtgtggtaaacaattctttgaactttatttttgacacttaaactattaaaaaaaattaaaaatttcaagtgatcctaaatagctatgacatacacgactgtaataaaaaaaaaatagattaaaaaacacttttaaatattgaaacatataggagtgttctcctagagtgcactacatatttttcttatatatatttagtttactaaaaaatgaaatatattatattttaatagaaataaatttgaattgattttttttttatatatatatagaattggctttttaaattaaatttaagctaattaggatttttgtccctcgaattttgacatgtaccaaattatgtcttttgaacttttaaggcctttaaacatctccctgaactattcagaatgttggattgaagaaactttgtccaattttagtaattaaggtataatatggatgaaagttcaggaggcacgatttgatacatgttaaagttcgagcaacataatttggtagacatcaaaatctagggagtatgatttagtacataaacaatcattgaattagtaaaa

SEQ ID NO: 23723 - DNA, 2761 bp, Cannabis sativa
atctgtatggcagacagagcagtaataattcgagcgattatccaatctaaagaaccctacctttttcctgtccgtcctcatggagttagcctttatgctgtagaagtaaaggatttcctccaaagaagggacctctagcttgtttatcttgcaaacgtaccacccaaccaaaagcctatatgacgaagggattaactggaaaggggaaatctcgattctcacaatcaggtctgcgaaataagttctcaaaggaaggtgagccccactggaaatgtgaaaccaactccaagcactgaatccctctgcactaacggaagcatattctcccatatagaaagtctgtgccacacattaatccagggacattgcgaaggccagcgacgtcagaataagcttacagcgtcccataagatcgaaattagttggctttctgatccatttcccaaatggagttcttatgggcctgcaccggtgggggagttttgacccccttttctcttctaattctcgcagggggtccttttcagcagtgggttcattttgtggaatagtttccaaggccccctcaggttgaaatgttaccataggagtcatggtttgatcctatctcaccgaaatactttcaatagaagagataagcacatcctcggtaggcgcaaccatgcttgtgggaaggtcctgattcaagcccattgctaccaacacaaaaatgaaggaaacggcaaacctcttgaaatgactgatggatggaaggaaaataattaccagactaaggcccatggcaacataatctctcagttcacgggtgtaagaatagagtttctctcatgcactctaccttcctatttgacacatgaacattcctagccctaacctgaacaaaaattcttgccctagacacgaaatgccaaaagtttagacaaggggttagtgtacttacttgtcaaatagggaaagaagggtggcgtgttggaaaagcctgcctgaaagctttgaagccagttgatgcaacagtcgcaactagcctgaaaatcaaatgcttcccctaacgaagagctttgtcggtccagtcgaaggggtgcgatgtctggaaagagctcagtgcggatgatgagtaatcgttggatcaagccctctaactcttcttacatgcaaaggctgactagagaagaaaaaggtcataaggaaaaatatgaagcttcgtggagaaagtaaaaagaacgccactaaaggtggtttatatttctaaaagaaaataggccaatgcgaaatcaacggttcaaatttttgcaatagatccaacaaccagggtgatgagaagtcccgtatgattagcctggggcccacaaaattatcaaggtgactctctacacgtcatttaatcgtcagttgcactccaccttttttgttgaatgcgccctaccacacgcgaaaggggcttggcaagatttttgaagtgccacgtgattaccacgtaagaggaggtaaatgccgtatttgcccttagtagagtatagctcatgcagagatgtatccgcgacttaaatcatcatcacgtgtcaacaatcaatgggaaagatagcaagctcccgcaattcaaagagtctctaaagctttggggtaaatgttatccaaattttcatgcataagacatatggcacaattgaaggcaaaatatagcagtgggaagaattagtcaaaattattcataaggtaaggaacgtctcccggaccaagaaggtagttagaatggatgactcccaaaaggaacttccttaagtgatgaacccggagcgcaatagtagcttcgtaggccatggccacgttaacatcatacatggattgctctatagacattaattatacctttttctgacacaggataagattttgtcccctgtgccaggccatgatagtgcgcgtacgcaccttcagacatgctttttgcccaacgacctggttagagagtattttgtaaaggagagacctttgcatgacgggtcacctagtttgtacgaaaaccctcactgtagctgtacaccacacgatgaagaaggtttttactagtcaatggtcagatggtccttcaagctgtaccgaccttggcagcgtataaagtacgaaaccctaggtgggtaaagggtatgccctttaccccatgtgttcctataaatactcttattttctttgagtaaagggtgaacaattttcatttacaggttaaaattcctagagagctttctcccaagagaaacaagaggaatagagaaactcttaccgtaaacacttgtaatacctaaacacttgcccaaagaggctaatactatttactcgtggactaaggatcattatcgcctgaaccatgtaaaaaacctgtttgtttattgtttatgatcttttattttcttaagctctaaatataatcagttttcaaaaattttggtaaacaactatcataaatagaataaaattaatattataactaactaaatgccaaaaacacatagagctatcaagtagacctatttataggggtacacgtgctgtaaatcttgctaagcacctatatttatttgtattttttaaaatatgagtcatgttgtgtcgtaccacaaaaatatggtcatgatgtaccgtgcagtgctaatatttttaaagggtaggcccaacacgacacaaatgatatccgagctcgaattcgtactttactttttcatattacttttttacaattaccaaaatatatgtatattttataact

SEQ ID NO: 23724 - DNA, 7529 bp, Cannabis sativa
gtataataattaaaagttaactaaaatataattaaatatacgtacattgtattgtacgtaactttaatctagtatatatatatatatttatataatgatatacctttctttatatttttatgatcatcgattgaactagatggtaaaggtagaggttcatctatctcaatatcatctgaacaaagaagaaatcaaacagtaagtacagtaagagaaacacttttccaagaaaaacataaagaacttagcatatgcataagacctatattaagctccacagcttcttgatgatcaacatatgaagtagaggttgcatgctgagacttgagaaatattccctctaattgattaaaagtggatttaggactttttgtagaatcgacactgtggtccacttttccaaccttcagacctttgacaataccacctataattcctggggctgtaccctgtagcaagatattcatctacttatggactgacagaatagttcattaaattaagcatgcatggaagctgagatcgtatctctaaccggctttttcttctgatttattgagtgactaacggcagcatctgcagcagctgcaagaacgtgatcgtggagacatggcaaagactctgggatcctatcaacagcaaaagaaaatatgttgaacactagctaaaataaaataaataaaagcactagctaaaaacagcaaaaaaagatacctaaaatcattttcactagctaaaacagagatgaatgccacttcacaaccatttgcctgtagaatcatcaaaaccaggtatttgacatttaacttgtatttcttattttaatttatctgtaaagcgtcaagttcatggaattcagcaaaaaataccagtgttatctgtccgttatcggaagaactcatcatcttattcatatttgccttaaaattccacctcagaatagacatcaaggagctttctttcaccaattctaaatctggtattgacctgcaaagcattggactcagcaacaaatcattaataaatggaaaagctaacatgatatggcatcacaaaaacaggggcatgtgttggtttgccactaaaacatcggaattagaagagaatatgttataaggtattagttgtcttcagttcttcactattgtttcagtgctgtcattctgggaaggaatgcaagaaatgggaaacgaaaattaatcacctgatttcaactgctccagtctgaaacagcaacactaatccctgaacattttcatctttcctaaaaattgaagtccagatgcatggttttgcatgttttactttgtaaatagatttattgtttccctgaaaagattttaccaacttagcatttatatataaacctacagaatattgcaaatgaaactaaatgattcaagaggcacctgaattacagattttgtggagtacaggcgtgatgaatcctcacaacatagcaaaacaaatgtatccaataaattttcccccgaattcttagaaggatcggataaagggttgtgttcactttcatctgaagttattccactcggagaaccatctggaccaggcccctctggaatagctttatcctttaagctctcttctggctgcttttcattgtataccttagaagtagaaatgataccctctggaagtagacataaatctctcagatgttttcaaccgataattgttactaaaattcagaaaccctaagttttgagaacaatacttgcctatgacatacattgaaactgcaattgatttttttttcaagttccctggtcgcggactgatcgaattaccattactgccgtcaatgacattaatatttgcatcctttgttaagatgaacatcacttcccttgcagcgttaagagaaggctgagaagtgtttgtttctgagttctttgatggactatgagagtttgccatttctgtccaacttattgaaatcactggagagttggaggatgataaatcatttagtaggaacacaactgataaggaactcatgtcaactactgcaacctgaaaaaaatcaataaatttcagaatcccttgtattaatgcagcagcaaatgaaatggcgtactctgaaaatattctacagtggggcacagtctaattgaagcacttctaatattctttttatgatggttctcattgtagtcataataggttctctgcaaattttcgaaaatccttcggacaatttacagtacctaaatcagggtcgtttttcacgcatgagaaaaaaaaacagacaagcatgctacaaactatttcaaccctgatttgggcactcttaagtgtcttaattagatcgtacctcaccatatgcacaatttagcataccccattgtagttgcatcctatatataaataattacgcaaggtgaataaatagcttatactcacacggccacatttatatccaacagcaagtttagctccagaatgcacaaactctaatgtttgaacaggggaagtagcaagagcaaaaacagcactacactgaacctcttttccttgagacaaactgtgaactgtgcagaaaatgcatttacatcagcttttgagaataaaaaggatttttaataaaatcacctcaaaacaaattaaacaacaaataggtatactatgtagtaggatatacaataaaacttctatatactaataagcttggaccaaataaaatgactaatttatcgattgattaacattataatcaatgaactctacaatccatttttctttaatatttcgttttaccatctacaattaagttccaaatatcttcttttgccaagagaaatacacacaaagaagtactcaaagaaaaaatgactttgaataatttctaaaatacaagactaaagtctgaaatacagaatttcagatatcaaagcttcttaagatctttcaaaaaagtaagaagaggtaagattcaagtcgacataagaagaaacaaataacaatatatgattttctgcaagagcctaagaatatattctagagtttaaaaactattaattaatatttaagtggattccttatctatttgtcgagtttatactgtataatgaagagagctcctttctatatgttggaatacatcacaataaaataaaacgaatacgcagttgaattgactatggcccttctccaacagctttgagaaacattttgttcatcttgatattcaaaatctataagttaattagtcatttataaatcgtgaagtgtgatattgctgaattgatttcagtgtggttatgaagaaagcaacatttagaaagtcaacatatttttccaggatagaaagatggtatcttatgccctagttgaaaatcaataagatacaatcacagtgatggggtgtcatttacactttaccttcatgtttagaatctgtgacgaagtggaagtttcctccatctaagcatcctttaagattataaatacgaacctatacaagtcaagataaatatcattaggagtgaaaatggaagacaaaaaattattataagactaaaatacgaaactttagatatctgaccagaccacattcattgccaatagccaaacttaaagtcagaaagcagaaatccaactctgagatgggagcacctgaaccagcgacttcaatactttgcacctgctagtcatatgatctgatttgatgccaagaatactttttttttttcataatattgataaaaaataatccagttctattcttacctgcccttctaaaagaagaacaaaagataagactggtaaagtggcatcccatatcctaacagatccatctgaatacccagctagatacagtctctccgtctttttatttttactagtagacaactgactaggcacccccccagttagtggccacttcgctccatcagctggggatgaaattgagcctgttctcataattgagtttatctaataaagaagaataagattatttagtgagacatgtgaacaaaagagtaaggtgtatgaaccacttctgagatgaagaaaaaagaaagtaatacctcttcggatatgtctgagttcttcccaagagggaccttaataaattttgctacagtgatggttggatcactcacaggtatcactgcaggaaattctactgcactaatagattgtttcttctcttcctgggatgtcaaggaagagaggctaacaccgtcataaaagtgcagctccccagggcttgttagcacaaaaacgtcagcatttttgttactcccggttacccaagcactaggtaccaaagccatgtctgcaaaagagccactgagtgtaagatctgtgcgactaacacatcttacagactccattccagatgaccattcaagtgttaaaacctgacggaggcagaacattaagaaatattgtaagttaggtgctgaaaggcatttaaagaagaaaaacaccactgcacttagagatgtctaaccaaaacagtttgacatttcaaataatatttgttatcacttacattacatatgccaaatgtgtgtaatttataatatggataaattgagaactacggtggcgcttggttgggaggaataaaaatatagtaataggaatgagaacgggaataagaatggagtaaaatttaaaatgcataaaaaaaattgataaaaaaattaagttaattaggattttcgcctcttgaactttgacatgtatcaaatcatgcctcctgaacttttctggccgttaaaaattcttcctgaactattaagaatgttggattcaaagacttttgtccaatttcattcaattttactaattcggtgattgtctatgtacaaaatcatgctcctcagactttttgacggtctttaaagttcagggggcatgatttggtaaatgtcaaagtttcaggaaaaaaaatcataattagtcaaaaaataataaaattttttcttcaattctttccttccatttcaaaatggaagtcattccaccaaaatggtggaaaggtcattctattagaatgacattccaatactttaatatgcaaccaaacaaaagatagaatggaattatttccttttcattctattccatttcattacctcaaccaaacgccacttaagagaaatacttaaaaagcattatccaaactcaaaagtcctttattctgtcaaacatattgcatagtcaatgaaaagttaacattttaaaaaagcattaatacctctcatgatagtatacaaaataaaacttgaatgctaaacataccgttaaaacttcctcagatcctatttcatcaccaccataaataaacagctggccatcacaatcattacgggatttattacttgcagaccattgtaagacaatgacagggagtctcctttcggcagatgataattgtaacttaacaacatttttagatgatgacaaagcctgttgttgacctttacttgaagcagaggatgatgtgttccaaaacaaaatatctccatccacgtaccccacagcaagaatggacccactagaagatgcccaacaaagagcacttatttccttctcttccaactgatgtttagatgaatgttctagagaatctacattggtgtcacctgagggttctataaattcatccttaagctggagatccttaccacctccagaaaaaacaactcgagagtcaataacatcccaaagggctaccaacccattctgatatgcaatcagtactctgctaaacgattcagaaataaaagagttagttgttgtaattacacacatataagagactaagtttcacaattaatgagtattttgtttaatagtcaatatgacttagctactgaaactgaaagttgcattttcaagctaaccaaatattggagctacttaaaccaaatattactaatgatttaattaaaaagctacttaaacagagaacgaagtagatttagtgttaattactgaatataatggaaatttgtcttgcctgtttcctgaggaacgaggttgaggaagaacgccaacaattggttggtcatcaagaaatggaaattcggtgacatctgttaaaatgattgggaaaaaagaattaaaagaaaaatagaagtgaacagattcaataacttaatattaagagatgttttaattcattacagaaaagacatgtagccttctgctgacattattttttacaatattatatcacgccattgcctctggaagtagctgtacaaaatttggaccctagagtcaaataagcatattgcatttgcaattatgttcataatgttaacgattgcatatctgaatatatatttatatgtatatatataaactattggatcaaatgactattgatcatttggagaataaaaagtatttgacaaaagtttaaatgagcagcttgtaccttagtataccatagtatgaactatggagacatcaaaactttccagttatggcaatattacaggttttagcaattcatggtgtcatggtgattatatacaaatgttgtttatgagaaatttcttccataagcaattcaaatcggtaacagagttgaatgattatggtgctcacaaggagaagcaaaatcattctatacgtgggttcttattgtaataatcataatttgtcaagaaacggttgagatgagtaattggacccctaagaaaaatatttatgtgatggcatgaaattcagcaaaagagattgttataggtaaataaaacattaagaaacatatgatatcattttatctttactactaatgattggcaatatatagattatttaaattataaggctgcacaaccacgtatacctgtttcgcaaccttaaggatgacaactcaatagaaaaaatagcaaaacaacttacactattttggagtagaaattaccacttatagtacttgctgaaacatgatacggaaactgcaaaagactttcctcttcaacattgtactttatcacagacatcaaaccatactcatcaccaacatacctgcaatttatagtatgaaatgaagttgattttccagcacttgttaactagacaactaatcagcaattaattaagaatacgtaaatttttcatttggtcagttatgtacatgaaattggagccatggattgcagcaaaagcagttatgttggtctcccactgtaaacagcaaactaagccccttctctcaagattccaaacctgtaaattaaaaagtgaattattaaactgttggaacttctgtgaaattgtataaaaatgagttttattattttaaattcagtataacataaacttcttcaacaattgaaatactgtgttgaatttaagcccttcctaatggttaaattttacaggtcaactagcgtacaaaatcaaaagccacagcattgtccacaatcacctgctaacaaacttcctaccttgaacagagatacaaaatttttgccaaattaagactaaaatatacaattaagaaaagaaacgaccaacccaaacttgagagtcat

SEQ ID NO: 23725 - DNA, 3410 bp, Cannabis sativa
cggaacaaatttacatatattttcggcccttcaattaactttttcttacactgattaaaaataattaaaatggaataaaataaaataagaaaaacctagaacactataaatttgactttcgtctccttcatcctcgaccataccataccattcgtgaaagtcagaaaggacgagtccctttttctcctcactctccggtggctgctgtaacatcgacggcgtcactactccactcccgatctcccactgcctttgctcttctgttcgttgccatcagccgcttaagaaaggtatcactgagctttgagtagctgaagaaaacccccaaataagatggtgagttttggctttgagtttgaaattaacctttccgtgttatttttttcattcttcaaaatatcttggcagttttgggctcaccttcgggtctatattaaactaaatgttctgggattttcaattttctactgttcatttggttttcttctttttttgcttcagtattggcttatagtttatttaatatgtattccagtcaggcaggaaagagacagttttggatctcgctaagtttgtggacaaaggtgtacaagtaaagctcactggtggtagacaaggttagtgtgctcaaattctctgcttactgttgaattataaatcaccaatatttttaattttgctatttataaatagttgatttttgtgtaaaattatctctcaatacctgaatcatgtttgtgaatcattgtatagaaacaaggatttgatgttgaattttgagtaaactttgaagagaaattatggccttataccacatttgatcaaagaagcaatattgaggacatacaaactctagtcaaagaattaatgggaaggaaatcaaaacagtgggaaggatcatgaaaatttataacaaacttgatttgaaataggaatgtgtgccctttttttttttggttctggcagttctagccccaaagtttttgagtctgtggggatttgagccttggaatagatgccctaccaacagtcctccttaacactagaccacccacgcatgttaaaaaaagaaagtatctaatggattttgatttcggtttcataaatgaataacactgactataagaaaatgagccaagttaaaatggaacaaaagaagaagagtcgtggacaagagggaagcactaaagcaatgtgatttcagtttaattactgatgcgttttattgtaagaccttatgtgtatagaattgaaatgaggaggttagtcttggttgtgtggctgtgttagggtgtcgttagctagacaaacaagcttggaagtcaagtttacttcccttaattgataattgtgtggcattgacaataaactctctcaacttgtgtgatacttaaaatcaaccgtagttttctcttgagaaacaaatagaagaggtaggtagcctattgtgtaaattatataacagacatggttggtgtggctcaaccttctggttggtggtcgctatcataatataaagcgaagtagttttacactacaggttttatgtgcttctggattacttctgggttttggatttctgatttttaggattgccagttattcttcatgtgttgtaaatgaatggagctgtaaattagattacattaggtaaatggcatctgatgataacgtgtatactttccttatacatggagaagtaaatttggaaagtattttttgagtgagaacaataccatcaagaatgcttttctcaagaaagtaggagatcatgtcctcaattcagcaaaaagtaaatcttgcttgattaacatttgcaataacaccagtgaaggctgtgaagccattactgaatttaaacttcctcttagaagcatacacacatatatagatatattgccttttatccggacaacatgcaaatcatttgcagttgtctctcacatatttaaccattagatctagactttccttaaaaggggaaagtaatgttgtcatacatccttttattttgtgtatgttctcttgttcaatgagattttatgactgctctgctgtgaatgtctgattatgcattgcattttgtgattgatcacagtaacagggactttaaaaggatatgatcagctgttgaaccttgttctagacgaagcagtagaatttcttagaggtaattgttttgggatgtgttggtaattctgcacaagtatttttgtatctgttttagctatatgcatgtgtacttaatgtaatttcatgtgttaattgttattcttgatatttgtgtttatccttgttgtaactgaaactaagtaaaagaatctagtaacttctaagctgtgttctttatgtagtgctatatccgtgagataacagaaaattgtttcaaacaacaatgtgaattttctttttctttagagctctaacaattttgtggagtgacacgatcaaatctctcagagatggttttgaaattggaatcagtttacctcctttttgcacttgtaccttttttagaaccaaatcttattgacaataacttatttttaagctgttttcttgcttaaaggcatggcttatgagggttaactgcatgttgacttcaagtttcctgtaatgtgcagatgctgatgatcccttaaagacaactgatcagaccagaagccttggcttaatagtatgtattttgctgctatttatatatcttaatctgttgatttcttttttaaaaaatggagataagctaaacaaatattatgtgtatatataaccacaggtttgtagaggaactgctgtgatgcttgtgtctccaactgatggtacagatgagattgccaacccttttatccagccagatggagcatagacaggtctctccttgcagtatctgaccttaatttcgtattcaatttcaactctcagactattgatttgaatgtttttgtgacattatgggtcaaattttaactcttagatcatgtcatattgggtctcagtagagaaccggaaatgtaacatatggtatctcacctatatgaatgagattctgatagatgagtagtcacctttttttttttgcgataaatattgtagcttgttgtagctgatagcgtattgcaaaagaagttgcctatctttaaaaaacgtaacaggagttatcaccaccttactagtaatttgccaatttaaaactaaccattgacacaagtgtaaatataccctaaggaggaagtaaattataaattctcaaagataattagtaaataaaggggaaatttcactatgctatgcatgcttaaaatatgcatattatcaaaatttagactcccaatcaatttatacaaaatcgtactttagtattgttacactataaaatagtgtaggggtagtagtaatttctacagagtgtg

SEQ ID NO: 23726 - DNA, 1928 bp, Cannabis sativa
atagacacaacactattttcttaacatataatttttactaaactaatatatttttacaaataaatcttcacaaactatttgttgtgacatatttgatacattccaactttgattatgtttgtctatgtaccaattgttgcaagttgtaacctaaactaacaacaataatagtccctaatccatcctttcactctttctttttggtactttatcaaccaaccaaacaaacaattgataatcttaataataataataataagtagaaaaattaataacattactatagttgattttcaagtgcaattgaattgtcaactctcaacttcctaactattaagttaaatcattttaaggttaattatatgagcattattattaagtattttaaggtgtctaacaccatactgatgtagcacgttgtgagtggttagcgattaacggttctttatatattatgagtattgttattggacaccaatagtgcccaacaccttcaataggtggcgccctatgattgattagcattattttttaaaaattacttttttaattatatggaacttgatacttaattatatcagtaacagtatgacgtcgagaaaggtgttaggcaccaataatactttttaacatttctcaaatattatttattaaattaaacttattctaatagtaatatccatttcttaactccttaaaatataccatatatatatatatatatataaaaagattatggcccatgtcattattagtgcttgtgacttgtttggggggtaaacaagataagggtgatgcctattcaagttgccatacattggatttggatatgtctattacaatttacatcaaatcatttatttctatttatgaaggttaatagtgctttctcttgtcttgttttgttttccaacattatcaaattcaaattgcttttaaataataaataaataaaggcactttcatgggtgatattttttgtttgtttttttttttttggtaggattaatttcttaatagattttgagcttttctatatgacacaaaatctaactataaatctcccccttttcaaaaatatgtggtttttatttgacctcattaattaaatgtataagggtccttttttcaaattggataacacattaaacaaagtgatactactttttgtaattcaaagcaaaaaaacaatatcattaatatttcccatttctcaaaagggatttgcagtctttactttttgattactattttttgatactcactttgtgtatgtagggttagaataatatattatatagttttatttattctaaaaaaataaattatagtttagatgaaattggatattctcttttagtttttagcataataacaattggttacaactaaagaatataataccattataattcaactaaaaacaagtaaaaaccattataaaaataacaatttggaagagaattaaattaaaattacacaattaacatattccatcaatatttgacattttaccaagtctttaaaaggactctaatcatggatgaacactacacacaatatgtgtccctaaatgtgtcccttgcctatacttaaaggacttatttgcccattttatatttttttttccttttcttatttttgaacacatagtgataataagtagaaaaaaggagtaagaaaagggttagttgcaagtgtatatccaaaggagaaaaaataaagttatttattagggaaagcaaaaaaagggttcaaaaagaagaaaaaaaaaacaacttaatagtaagtcacaaaatgggtacttttggtacaaaagttgtaagaaaaaagtaattatgaacgtgaagtagcgtttgtgtaactatactcaaacacaagataaataacaagtaacaacttttattatgtcattattgcttattctt

SEQ ID NO: 23727 - DNA, 3142 bp, Cannabis sativa
gacatttgcaaaaacacggtttttcactctagaaagaaggaatgaagataccaacaattctggtggatatgtgcctagaagtgaggatattaatgatccaactagtgatgtaccattagtggaattagaaaatagacaactctaaactgcttcgctgaatctaaccgacaaaacactaagttggaaagagaggttgtaactgctagggcaacacaaggaacaaatccttagaatcaacctgatcctggggtaagaagaccatgaggtagacctcgaggttctataaccaggagagagtaaacaaactagggaaattctcaaaacacctaagaagaatagcctgggggtatgagggatgttccattgtataatcaaacaaataatcaagagcaacgacgagacgttcctcaaggatcccaaggatttatgaactaaggaaacgaacaaaatgacgtactagaagcttctcccaggaatgaggaagcaagatagcctcgacctagggatcagggaatccctcgtgaaaatgataaaaaccctggaaatcaacccaggaaaagtgggctacctccaagacaccctcatcgtccttctcgatcagaaaaggaagatgtatacacgtatctaaatagagggcgtgtgtctaacctcttccaaaggagaaggctgatacagaacaaagcaagttctagttcaggacacttaaggtctcaaggacacagtcgatcaggtaggcaaacgcgacaggaaagtagacctcaacattatgctggccaagaaagcatgagcaatacacgaagctaccaatctgagagttacttagaaacaaggtctgtgagtaattacgagcgaagacagcctaatcttcgtgagcacttgaattgaagacacactttataggattgtttggatctaaaatcacctcaaaaaaagaaattaattgctattttagttcttcctccaaacttttcccaatgtagacacactttatgggattgtttggatctaaaatcaccttttctaactcttcaattggtttgagttggttgttatcatcttggattctaggatccaaatcttgtgtttccttctcgactttttcattcagaattaccatcagttgataactagtttttctattttgaagttacactcgataacattctcgagccaataattggtcgcctctaactgttcctactcttgagtgagtaggaaatttcaaagataagtgctttatcaagctcaatgcctctagaccaatcagtgttggtcgacccatcagtacattatacacggatgggatgtcaacaaccaaaaactcttgcatttgtgtcgttgacaatggaggttcacccatagttaagagaagctcgattatgcctaagctcgcaacactgtcgcccatgaacccgcataattcaccatgcaaggtcttagttttgcctcttctaaccacattttcttcaatgtgtctttgtagaggatgttgacagaacttccattatctaccaatactcttttcacccttttattagtgagttgaactattatcacgagaggatcaacatgtggataccgcacatgttctgtatcttctttagagaagatgataggcggttcatttgacttcgctctttttaaaggttttggagcgaatgctaattgctcattttttttacttcgtttatatacctcttttgtgcagtgttactgttttctacgaggtcggacctccagaaataaccaagatatcctcaccctctacaagaggttgtaatcttgggttatttgggttattgggttgattaggcttatttccctgagttctcacatattgcctaaagtatccccgtgagattaaacttttaatctcatctttcaattgttggcattcctcggtggtatgcccaatgtctttgtggaaacgacagtacttggttgaatcttgtttgttcctcgcatgcctcattggttctggtctagaaaatgcgaccctattctcattggcgaggtagatattctcacaagtttcattaaactctatatatactgaataaatgggtacaaacttctcatgctttttctgtttcttcttgtccttggataattctttcgactcatcctttcttttggtatatgatccgctgggattttatttatctttgttgtcacggtgcttgctgttgcagtacttgtgctagatttgtctcccgagccggtctttaacagcttcatttcactccatgcttcctctttatgcacaaaaacttatgctctttcaataaattcataaatattctttacaaggcgaccctgaaaaatcatcccataattctcccccgactgttgacaaatcagacgtgattccagcctgaagggctgttaattcaatgttatcagtcaggtttttgacttttgcagcagtcgtactgaagcgactcaagtaagctttaagagattcccttggttgttgttttatgtttgtcaaagataatgcctatggtcgacgatctcttgcagcctaaaactgctttttcaaatcctttgacaactattcctaggatgttatggaatgatttgtgcatttatcaaaccaaatgcttgcgactccaattaaggaggttgggaataatatgcaacgcaaattatttgaaacattgcttgctcgcataatagtattaaaattgttcaaatgggcgactgaatctatggttacatcgtattgcgagacatgtaaattcttaaatccttgaggaaactctgaatttaagatatcaagatggaatggctcagtttcttcgtctgagtcataccctgacaacttgtcatattctccatcttaatattttctaaatttattctccaattgaattactcctaattgaattggatccataggtttttgatttgcattttagttacgttgataacgtaaatcaagcgcatttcaatttaaatgatcgtgaaggtctggctgccttcggtttaatctctcgtggaaataaggtttgcgatgcctttgatcatagttacttacagacctggtctccgagtagcttttggactggtaactacgtgagttacttatactctcctggtcagcaaaataacatcaagatctacttccatctcgcgtttg

SEQ ID NO: 23728 - DNA, 2614 bp, Cannabis sativa
tattcagcagaaggtgcaagtgtgaggtgataagctatgagtttggggaagggatattacgacaaagtttagggaaaggataaaagcatgtaaagtcaaactttaaaagatttgcaataagaataattttgagcctgtggttgcagttaattcaaaagaaactatttactatttttatcagaaggagatttattggcgccaacagtcaaagcagttgtggctgcaatctggagatcaaaatagcaaattttttcatgcgaaagtaagttctcagcgtcgtaccaattacattcataagttgaaaactaatcaaggtgattgggtggaatgggaccatggcctgcaagagttggtggtgaattatttttctaatttatttttgacttctaatgctaacttgcgggaggtggttgctcaagcttgtattaaaagaagaagtgaagcatactctgttccaaatgcacccagacaagaggccaggaccgaatggtatgactcccgctttttttcaaaaatattgagagatagttggtcctgatatggtgaggatggttcgaggtttttttaattgtggtattctctggaaggtattaatgaaactaatgtggttctcattcccaagaaaaagaactcttttgtgatggggcttgctgtctattttttttgtataatgtgttggtcaaagtgattacaaaggtgattgttagtagaatgaaagggttgttggatgttgttgtgtctgatactcaaagtgcatttattttgggtcatctaatctccgacaatatcatggtctcttttgaagtcatgcgctacttgaaaaaaaaggagaggtcgagagggtagtatgactcttaatttggatataagtaaggcgtatgacaaggtggaatggggttatcttcgcgcaattttgcttcaaatggaatttacggagagatggcttgatttgattcttacttgtgtcactttagtatcttatactattgtacacggtggtagagagatggggcctatctttccaactcattgcatccgataaggatatccattgtctccatatttatttataatatgtgctgagggtctttcctcatttatttgagtgtatgaatctcgaaagtggattagagaaatcaaagtttacaggcaagctcctgttatctctcatatgttttgtgctgatgatagttatactttttgcaaaactctcctaaagatgctacgagagttttggagtttcttcataagttttaagaggcatcaggtcaacaagttaatttggcaaaatctaatgtctttattagtgccaatgtggaggggtgaagtcgattggatctttgcaatatttcacaaatggcagaagtttctgaacacaatacttatcttggtttgcttaatatattgggtcggtctaagtccatgattatgggctttttgaatgatagaattcaagttcaagattgggatgggaagcttcttttttatgttgggaaaactgattacacaactagaaaaatagcctttctctttagtttttaggtcagtttgtctttggtttttataaaaagataaattgttagttcatatatatatatatatatagttttgtaatatttaaaatattttttgatttaattttaaaaaaatacacataaataaaaatatatatttttcttcttatttcgatatatttaaaaaaaaacatatcttgatttgtttttattttattttggtgcacatttaaaaaattacatataaataaaaatatatctttttctaaatttaataaggtatatcaatataaaaattatttaaaattaatataaaactaaataaataaataaattacaaagatttaagagtaaggactttatgtataaaaaaaaattaagaactaatttacaaaaaagaaaaaaaaatttaaggaccaacgaattaattttccaattttattttttataataataatctttttttttttcatgtgagacaccttgagaagagcatcactgtgaagctctacgtaaaagaggtaattgatagaaactcaaaaaccttgttagtccaagcacctagaagccacaaagatgaagttagtgctattgaccaaaattttcttttcaacatcattgtcgtaagaatataaacttaggctatcacataatttgaaccatcaatgaaatttttaagtctacacaaaaaaagaccttaccctatggtgcccttcttagctacctattttctcttttaagtattcccaccaataatgaaactgaagttctagaatttaaagattccgatgtttagaaatcactattaagggtatgtcctacaaatttgatgaagatgaagaaagatagatttacaccaaacaagactcccaagctcaaggagagggccaagcactcttcctaatgctagtgaagaagaagaaggagaggaagatgaagaagaagtgtatcctcaagcgcctcccgtgccttactttccccaatacagcattgaggaggattttgctcgccttcacacctcggttgatactcaatttcaaactttgagaaatgacatcaactctcaattcaccaatctcaacaatgagatcggaagagcg

SEQ ID NO: 23729 - DNA, 908 bp, Cannabis sativa
ctcaacactcctcttcaaaaccgagaactccatttaatgcactcccagagaaccattgtctatactcttccatgagatcaaatctatcatttactctccatcgccattttcaggtggattcgaaccatcatcacgattttctgcagacgtagacacaaactagtgatggctatgattgatctagcccctcttcagcttcttcatactttcgcctccatgtattctctctgcatttttttctatttaaggtcatgctggcaattcaggtgctttactatccctgtttttgcccttttattccatttgtcctctattattctcccactttgcatgtcttccacaatgaatactctttgatgatcccaaccattccatctaactcactaccaaggaggcgttgatccatgacttcgatcacgtctctattcacgcagaacctcaaacagattccttttgcctggttgttaaaatattgtctaccgaaccccttaagcttgactggatttgtaacgccatgaaagagacctgggtggcccgttgccctttcatcttctccgaatattacgctggaatgtttatggttcgcttttgatacgaaggtgactgtagaagggttatggagggacaaccctggcactttgatcgttccttaatgatctttgccatccctgacggttagataccatcttacccagccaactctgtttatatcccactttgggttcaagttcattatattccctttggctctagatcctatggcctcgcccaatttgttgctgataacatcggggatctcatcgaggtgcacctatcctccctctatgatcccgtcactcctttcatgaggattagagttttactcgacaccactaaactgttggaatttactttaccaggatcttaga

SEQ ID NO: 23730 - DNA, 3140 bp, Cannabis sativa
accggagctatgtcaaaaaagggggaaaatagccaaaaagggaattctaagaggaagaaaactggtcctacatcttcggatagggtcatcaagaccagatatatggatgcggtactaggagtgcaggaattagagatcactgatgatgcagaaccaatggaacagtgcactgagaaaattttcttgcctgaagaaatagaatccttcttcaggagacaaagtgaaattaggcaagacttttctgattagcttactgtggcaaattgaacaactcaagatatcagtacagggaagaatccttctcgcccaatactcagatttgtagtagttcgtaacctggagaacaattttgcgagtttagggaaacctgtcgaggcaaatcagactgagactaagaaagttaagattgattttgctgatattgctgatgaagtgaactattggcaaccttcgcttgtctgttatgtaattggagctaatcctccaatcagcatactagaggggtatgctcgaaggttatggaaagaaacggttgtcaaggtgggattacttgctaaaggaatctgcattataagattttagaacatggagtagagggataaagtgatgcaatagggctatgtgttttttgataggaaatcaatggttatgaaaccatggaatcctattgatgatttcaccaaaagaagtcacaaatgtcccaacttggattcaactgaagggcctggacattaaatactggggagagtcttctttgttcaaattgtggcatagctgggagatcctttataggtggatgaaatcactaaaaatagagattgcctccagtatcccaggattctaattcaggtatgtttatctcaaacttttcctgataagatttcattcattgatgggcatgatcatgaggtggagttggagatgaaatatgaatggatacctttggtatgcttcaattgtttaggaataggtcatagtactgaggtatgtaggaagaaagaatctaaagatgaacaggggaaacaggtatggattcctaagaaaaagcagaaaaaaaaaaagaagtccaaattgatgcttaaggttttcaaaaagtagtgaagggtaaaaaagtgattgtggaaaaagaaattgtggagactattgtgaataacatattcaaattcttagtgtttaaacaagggaatttggccaacattggagaggggggaggtccccctaattccaatggatagttttctttgttggaatgttaggggaattaacaaccaccagaagcataatgatttcaagcggttgatttattcaaaagaggtggggtttgttagtctcctagaaagtaaggtgcaaaataagaatatgggggatctcaatactagtctatttcaaggttggtgtttttcaaataataacccttgccttgataaagggagaataattattgcttcgcaacctaatgtctactctgttggcatcaacttctgcacaagtcaactaattcattgctatgttcactcgaagcaacaagttgggaaatttcatgtcacttttgtctatggattcaatgatgagaaaaaaagagaagaattatggactgatttggagggtctagcacagaaaattaatgagccatgactgatgttcgggaactttaatgagatactaaatgctaatgaaaggcttgggaggaaagttcatgctctgccttcccaaagattcaaggattgtgttgagaaatgtaatatggaggatttgaaatactttggagccttccttacatagaatatcaagtagaagcttgaagatagaagttattctaaaattgatcgtgctatgatcaattctttttagatgaattctttcccatgctctgaagctgtcttcctccctgaaatgaaatttgaccacagccccatcttggtatctatttacaaggataggagctttggtaagaaacctttcaagtattttaatatgtggaagctggctcctcaatttgagaaacacgttgtagaatcctggagagaagaagtcattcgctctaaaatgtttaaagtagtcatcaagttaagaaggttgaaagatgtgctgaagaagatcaataaggaagggttttctgagataaataaagcagaaataatggctaattctgctcttgcaggtgctcatatgagattgaccaaggaccctatgaacgcagagttagtggatacataatgtgtacttgaaaggagaacaatggtgggagtatgaagctcctgtagactattgctagtcttggaagaaaatagttggggtgaagaacaaattgaaataggtaactgatcttgctggttttgtgcagcaacaatacaaagttcagcaaggataccagttgttattttctaataatgagagaatttcatggtctaaaagtgtttgggataggataatcattcctaagcacaagtttatactatggctagtgtattgggaaagattaaataccaaagaaaggataggcaaatatgatcataacatggacatggcatgtttgctgtgtggaaaagaaaaagaaacagcagaacatttgttctttgagtgtgaatatagcagaatatgtttgaaggagattaaagctaggctgcaatggggatcgaagacagaacaatgtgcagcagttactgcagaacattagcaagaacaagaccttttcaactgctcgaaagaggatgctgagatagtatgggaaggtctagtatattacatttggagagcaagaaatgaagtataggtgttagtgcagagaattcaacaagaaagcaaactgagaattctagggctaccaagcaaaattaaagaagaagataaacaatggcttttaaagatgtaaaatggatacatatgatgtacatttgatttgttttttgaaaaacaaaatagatagaagaaatttgtaaagatgtagacagatgtaaatatattggttgagcaatacaatgaatcttaattcataaaaaaaaaagcatcagtaaaacataggactgaacatttcgagcgggtttgacctaaacccgagcaacccgcacgaacccgatcctgtcaactcacaattttttttaaaagaaaatgttcaggcgggtcgggttcaactcggtacc

SEQ ID NO: 23731 - DNA, 4448 bp, Cannabis sativa
  modified_base (51)..(59): a, c, t, g, unknown or other
  modified_base (4273)..(4274): a, c, t, g, unknown or other
actgcatcagtatgtgcaaatatactaaatttagttatatatatatatatnnnnnnnnntatatatatatataaattttaacattgggggagggtgaactgaacttgcatctcctccttgtaaaagaaaagtgtaaaaccacgatatctttagttctattttagtatagatataaattaacattttttttttcatatactgtttatataacagtgtattgtatataatatgattttaaaatttttttaaaaaaaaacaatgtatatatagtatatatatgctttaccaacataaatatatatagattttaagaaaattttaaataatttccaatatttcaaatatatttatttcagcatttatacgtgtaggttttttgaaattttgaattataagttctgacatgcattttaaattattaaaaatattataaaaatctataaaagtatcactcccatgtaactaaattaatgctgaaatagaagttagtcatgtagcaaaaataaaagttgcaacttgtttttatgtatgaaaatatttttacatgcagtaaattaaaacaatgcaggctgcaataataatataatttttgtatatttatttatatatacgaacctttacaatatcagaccatctttcttgtgagtaatcagtttcttcaagggagttgaggcctccaactaagatgtggggctcgttatttgattggattatggcgtttatctgcttcatccgccaattctcatcaaggtgatcaaggtgagtacagtggaagtttatttctccaacttcaggaacatcaattgtggctttcagcacattcctgatcatccagaatatacaataataataatcaaccaaaagtagacaattaataatagttacacatatattcatttggagcatttgctattgggcactaacggtgtccagcacttttcataggtggcgcttcacaatttgttagcgatattgtctaaaagttattttcttaagttatatgagatccgatacttaattacaccaatagcggtatgacactaaagagagtgttatgcaccaatagtgatttttagcaattctcattcatttgccaccaccattaattcttttatttctctcaaagcccaaataatactacaccactttagaaatttcactttctgattgcaccttgctccaaacaaatgctcaaaataatgcaccttattataaagtgctcaaagatgacatgggttgatattttatgtttggtttaattacggtacctggccaacacactatttattcatgttttttttattttaaattttaattaaaaagaatttttatttagcattaatttatggtttttaaaagtattttcttagaaaagaaagtataatttttgacaaaaatatgttctctcaaaaatacatctcgaacataattgtaacacatactcaatatctaccaaatatcaacaatactaactaaaaagagtaaaaaataataaagaaagaaatatatttttgtaagaagtatactgatataaattttctctttttaaaattaaaaatttagaaaatatatttttaacccttatattttggttaaaatgtgttgggacattatatatttttttaaaaaaaaattatatttcaaaggtcttatttttacaaaagagatcaaaatagtacataaacttgaccaaatatagtacatttctttctttgtccctcagttatctttgttgcttttttgagtcatcgtatcagaacttagcaattgattttatatttcaaattattttcaccaaaatcgggtccatattccataacactattttgattcattttgcgaaacatatagtttgaaatgaaactaaaaataattgagtcgaaacaaagaaacataggttaatctattatttaatattatctaaatttaaccataaatatcaactcaaagtaacaaataatcaagacattattaaacaagataatgcatgatgataaataaaagattaaattagagtggtgggagtcaacagccgttggtcaattcatacagctgttattttatagtggcccatgtcctggtccttttagtcctcactcacatcggttttttattttgatatatagcgtaaataccaaccagacaagatgatatgaggaaaaaatagtacattaactttttcagagcaaggaatcagatagaaaaaaaatcacaaagtcagctatgtaaaatgtatagaacaaaatacattttacagagctattttattattattattatttggggaataatttaaataaatggatgttggcaatttaactttgtagattcttatctaaaaaacacaatgatgaaaatgaaaaccttctttacaagaaaagtgattgatcatttcagcacttaaatgatgaagaaatttcctagaagtactaagcatttcataactttattcaggcaataataaaagaatcatcatcgaagaataaaaaaacaaataaatgaagggaaaataataaaaggtaatgtaaaaaggaaataaataattatcaatgaataatgaatattaattagtattattgaatacctgaaatcagtgtcgtcgaaaatcttctgaaccttccagcttttaatgggccactttgaaaagatggcgttaccgtactccggcgcccaactctcggcgaaaacgtagttcatacccaaagctgaagctaaatctgacaagggtttcatggctttttcttcctctgctttcacatcttgcagagctaatatatcagcgtctagctctctcaaaacttcaagcacagtcctcttgcttctgtacggatcatctccttctccaccgtagtctatacagccggaaaagctcatactcgatctcaatggagcttttcctctgagaaatctagttatggaagatgaagaagaaccctctttctctttctcaatctcaccttctacaaagcttaatttcctgtttcgtagtaacgaaatctcattatccggcaaattaatcgaaaccctcaatttcgatttcgtgaacttctgttgctttgagagattttcagagctattattggtaatatttacagaattgggatgtaatggagattgcttgagaatactcttgggtcgctcattaactgatttggttcgtaaattgacgctcctagactttaaaacgtcgccgttttcgtcgtcgaagctctccgttttgggtaccgccggagccatagaaaacagggctgcgttaaacgtcgcaacccgtacagacgatatagccgttgccggctcacctaaatgaccatttgggtgtaccgcagccgaagccactgagccagaaaccctggttggttcagtttgggctcggtcgtgaggtttagagctcgatttgccgaacctcctgatgatgactttgggttttgacctccggcgaatcggccaccggaaacgggagcatagaagacgaaggttcttattgaaaagtttaaacattgtaagaaaatgggtatatgggtcacaagaaagctctgactttgcctctctcttcaaaaatcaccatgaaaagttttagagaatattgaagagagcaacttcggcatgaatgaatgaataagtagttttacaagtattttaataaataaataaaaaaaaacaaaagaaaattgtgcgtggtgacacgtggcagtgaatgagtgtttgactgtgacgtttgttttttttttttttttggtgacggacagtgagaaagaagagatgtcgttcttaactgctccggtctccggagaaaaattggtacagaacagaaaagatgtgaggtacaatatgataatcatgtaattggaaatgaaaaatagaacaatttgtttttgtaaatttaactaagaaaagaattaataataataataattataattaatttaagtataaataaagaaataatatagcagccaacaactctgatccaagccatgcagggaggcaggattcttatttggaacgccacgtcacctgaaatccggcgtatccaactccaatgcatctttgtggagcctacaatccgttttatctttgagattaaacttaatcaattttatattattcagtattattgctcgctagtgtctataaagttaagcttaacctcatgactttaaagtaacattttttgttggattacattacatcaataaataataatgataagtataagggtaaattgcaatataaatacctaatgtttttgattttatacacttaaatacgtaanntttatttttggtggcaaaaatatccaatgttacaatttttttatcccgttactaccacttccgttactaaataataaatatagacacctggagggcccaaatacattatatttatttattttcttttaaaatttaatattcttaatataaaatactaaatattatttgtttttt

SEQ ID NO: 23732 - DNA, 4726 bp, Cannabis sativa
atcgtactggttaagagtgatatcatggccaattatacttttggatgctattgatgctatcatagcggcacgaacatagtgccggtcctgtagtatgatcatagtgctggtagggggtgatataatggtcaatagcacaaccaattagaacgttcttactcatctgttaagccttgtaaataggtgtgtgggtgcctagatacaagtctatattatatgaaatactatatgcttttcttactgagtctgtcgactcacagttctacatccatgtgtaggtaacggaaaggcgaaagctgaacaggagtgagtctaagatgggatgaagttgtacatgtcatggtggcgcgacctagagtgtttggtctcgggacatccgggctttattattttgtagtcgctgtgcgacctagttatgtattttgtatgaaagattagaaacgggatcccggtgtttgtaaatgactatgtaaattataaagtttaatatttattacaaaagttttaatttgacacgtttttcgagaaaattctttaattagcaaagatagcactataattaaaaaagcactgtagcgtaccttagcattagggcattatagtatatgagcgctctgttattgattccatttatcaatcttattggacatccttgtatctcatcccgcagctcgcttcctggtgttattcccgcttacaaggcagttaatggatgctatcattcaaatttgtaaccttggttacaactattttaaaacgtctcaaaaaatcctttaaggattcattaggttgttactttatgttggttaaggataatgcctcgggtctcctatttcttgcgactgagaatcgtttcctaaagtcccgcgacaattgttctcaggaagtaatggaatttcaataaatttgtcaaactaactgctcgctgcccctgtgagggacgtaggaaataatatgtaatgcatattattctctacatttttggctcgcattatgatattgaaattgtttaagtgagccaccaagtcagttgtcccatcataaggtgtgacatgtgggttcttaaatcctcatggaaattgagaacttaatatggcgggatgaaaaggttcagggtcatcgtcagagttgtaactagggaactttccatattcccatcctgatattgtctgaacttctcttccaactaaatggcccttaactgagtagagtcatcaacgggttgattgacttgtttacatgcaggtggagcatttctattcaatctctctctaagatctagtgcatttatgtttatctacttgcgtaggttaggaaaccttcgatttatcttctctcgcagatcgagatgatcgtgtacattttgtcgtcaatcttgcctattatcgtaattacttattaagagactaggggaaacacgttctgattggtaactttgcaagttgctgacactttcttgttcattttactattcacgatggggagttctctcgcctcgtggtggattttcccctgtgcgagatctaggggattgactttgtccatggctttaaatagacctacgttgggcgatgtttgattctgatccttgatgttcttcacaggctggctttcgcctttcaaacacattagcgaatcgtcccctgtttaagtaagtatacatattgtccctttctaccctccttggtccacgaggtggacatagagggctagcagatcgattagctaggtgctcatttatctcttttccagttctatgagacattgctaacctcttgatcgtgctattgaagtagtggcaccttgattaggtcgaccttattcatcaacatgaatttcccttgtttcccctggttgttgttcttgggtgcgagtaggtttatttggctcctattttgtggcattgggtccacattcccttcttgtttgcgaccctcgaggtcttcctcgtggttgcctaacatgttgttcttcttgaacaagtcgttcatcattcgaagttgttctagcaatagccattgcttgttctaattcttcattccttcaaattgacttctgtcagtctttgctgaagtttgtgattctccaattctacgattggaacataacttgttgggttgtaagcatcaaaactcctcctcttcagaatctcttcgtcatgaatatccctctcagaatcccttcccaaaggaccctttcctttgtttggtatgctatgagtttgagttccttggggttctttccctgggtgatcatctcctcttcccttattgctcttccagttgagtgttttctatattgaggaagttttggttttcctggggagatgcatttttttagttttaattttaatcaaagtctctcaatgaaagcaccaaattgttagaatagaatttcgttaacaataatgaaacattttgaataaaattaaaactaactattaataatagagataaataagacagatgaatttttacatggttttgtagttaaatctacatagtccacgagtccatattatttccgagttcttgatttattttttattacaagatattcgctacaaagtaataatcttcgggattttctacacataatttctcaaggtttttcctcccaaaatttcccgtccttcacatcgtaggttccgtccctatttataggatttttaggcatgacaattatccccttttagtcttatctagataatcgtttatgaaacgcaaacaatccccacattttatatttacaacatgtcggataaatgaattaactgttggtatccacttttttttttattttttttttatctaaaagcagtttctttgccgagataacataccaagaatatgccttgaattcttcaataacgttaggaatgactaggtgtattttgtgagacgctaattgaggtatctttctcgctttttctgtttaagacaagttttaagacaacacataggattgaattttttgcgctccttagggtcaatcctctcacgttgtttatgaacattctgagatggatcgtgttttgctcatattctttagtcttttaacaaactcatgagtatgtgggttaatgagctgcaagctcttaaaaatctcattatctactctttctagtagctcatcccttcgtattctatatatgtctttttttatcttggtcaagtccaagatgaacctatgatgttgtcatcttgctaattattgtatttataattttatctcttttatttgacagctatattataatatagcgcgacacatcattaattgtagcatattctttggtgaggaacctatctcgtttctcatgtatagtttctctcaattttcgagacttatattcacatgttatgttcatatttaatgctcgaaatatagaaagaattatgtgctctttttgtggtcatagaaatgagactgtgactcactgactaatgaattgttccagagcaaaataaaaaacatgaaatcattcaccattcaaaaatatctataatgcacatagacacattcatataaaagacttttactaaatactttttataaattatatagagctgattgtaaaatattattgagatttctttggatgatctggaaccatagaaacaatgctgtttttggaaaaaaaaaataaagatatacttttccaatacaagagattaataactggattgcagggtatttccaagagtataagaaagtataaatgactacctcactgaaagaaggtaaactacaagaagttgacattacttacaaatgggctcctctttcacaaggaagctaaaacttaatgtgaatgcggcagcaacaggtggttgttggtacagtggttagaggctctcaaggtgaggttattggaaggtatgccaatagctttcctggaaattattcatcaagtatagctgaagtacttgctttaaaaaaatctctcaactggtgtatagcagcaaagatgcaagtttctcaagtggggatcgagtccataaaagtggcagataaagtggacatacattgtattaaaaaatttggtcgtaataattaatataatacattgcttaatctaaacatagtgttatttattatttaatacaatacgaccattatacggcgtacgaaacgagccctaaataatgtaattgtttgtatgagaaattctttatctttaccctagcgtttatttatctcatgtaaaaaggaaagttaatttttatacttataatctataacctctataaaagtagtaatatttttgggcttccacattttgaattaccaaaaagtcctcatttctcactcttagtttattatgttgaggttgttcatatacaatacatgtggtgattgttttttttttcttttaactaaattatttattatgttgagtgatttggtttgatttatttataaaattaaattttattaaaaaaaaatatatatatacttatacaaaacatgttttgattttttttatctcatgtatatatatgtatatatttgtagggataatgagtgaaaaataaatacttgactcttagttttcttttcttttaaggaaatttagccttaaaatttattacctacataatttactaagatttatttgttattgttggccctgattttgcctaaaatacgtggaccaaccggatgatgacacgtggatgggaaagggttagcatttaaataaaacagctaagtcttcttaaag

SEQ ID NO: 23733 - DNA, 7969 bp, Cannabis sativa
tccacggccacaacgtggaattcttaccactaaactacagccactttgttgatgtggctattcatttatacatatttaaacattttattacgttagtgtcctactcgatagttttatttcttaatttctttctctactttttattattattttttatatatatatatatatatatatagactacatagtgtgtgaaatattctttcatattgtcttttctatataataatataatgaaaacctagcaaaatgtcaatgtctactttggaatgggcggaaaggaaagaatgaaatatcccaaaatttggaaatcttcttaattattattaattaaagttacacctaacgtcatgatccctaaacttggattattaattaatttcttgcttcaattcaagataatccacaacaaagcttgtattaattattcatatattgcaattagatatatagctagggcttattatagaataataataaaaaaaattaataataatatgcatatctccattcaagaaaaattaataataatatgcaaaagtctcaacctttatataatatatatacttttcaatgtaaattttgtttttaccaacatgtgcatatcatcgatcaagatttataatttttagggcaaagattttagattcaattatagcaaataatttattttccatgtgcatgtatatcatatatctatatttgtgtatatatatatatgatacgttcttgaacaaggttgactgccacaactgaaaaagtcattattaaagaaaaataaaggaataatttttttccctcacttttataattatgttatgtacattaattatttaataaaatgaagtccaaccataatgcatccaacgtggattccaatttctgtctacaatcatatactatatatatacactatattatattatataaatataaatgcaagtagctttaacaaaagctatagaaactttcactttgcaatttaaaattcttatttgaaaaataaataataaaatggcatcttggaatcccaatgttaattcgtgtaataattgtgtcataattattttttgcactaacttatatattaatatacatatatatatatctatataatcaataataaaattagggttatcatatataatagctatatatatagatattaacatatgtatatatagagagggagctaaatatagggtataattattgtggttggaaaatttattaattaatttatctataagtatagtgactctataaaagtacatgtatatatatatagtacaaagacaacttgattttgatctatatatccaaaaagaacatatataaaattaatcaagtgctcaaaaaaagacaaaaaaacaaaggcacgggtcaatgtataataattaaaattaatatatagattatatttccttttaattaatctagccgctactatataatatatatagattaattatctaaaattaaacagatataaaggtaaagattaattaataatctgaaagaaataaataaataaaaatagaaaaagtgagattggaaatgaaaatttggaaggaaaggcagcgacaaatatgcccataattaatactaataatattcttatttcaatattattatttttcattcccgccccttacttttttcttctgacaattcttttttgtgggacagatatgtattgatatatataaaatattacatacatatctcagtgatatacagcttaattagtcctcatcataaaatcatttaaataatacaaaaatttggatacccaattataccctgcttaatgcttattatataatatataaatatactgtatagaaaaattcttcataaacctttaaaaatgaatctgcatgcatttatgtatttttgttttagttggggcagaaattataactcttaattgtttttatataattttattgtagttatttagaaaaatctcatatttttacattatatagattaaattgttccttatgctgaaaaaaataattaggaaaaaaaagttaagtttgacttaagtattttgtatattaatattttttaatatagagatattttttgatattttttttttaattaagtagatacattaagcatagaaattaaaatttctcatttattattcgacattggatatcaaaatctaatggtttaatatttttaaaattcatatttatagttaaatttgtttagtatcatcaataggtattacctattgagaagtgttctcgctatgtatatatatgtatataactaatttaaataattgatattcactaaaaaaaatcaataatttttttaatagaaagatgtacttttattaactcaaatcattcaaaagtattatatcacgtaaactactcggagtcgtagaatccaaataggtacaactaacatttaactacgaagatctagccaaatggcgagcaacacggttagcaaattgcttgataaaaattaaaaagacattattcaaactagaaaaaatatgtctgcactgatcaaaaatgcagaacctaaaaataaaagtcatatctaacgaactttggatatcttggatcttgaccaaactgttcgactccaccaccacatcatgtcatcctatttctttcaaccaactcaacaactccttaactctgatagcttcagcaagcataggatcaaccacccccacccgacttaatgtctgagccataataagatggccagaagagttctgtgccacccaaccatacccatacttattctgattgctaaagataactgcatcgacattgattttgattgtattagcaactggtgcgatccagtgcttgtgccctaagaaaacaaagaggaaccaacaattttatcttgagcacaactctattgatcgaaactacccttagccaatgaaaccacctctttaaaagtcctatccttaccattgcacacagactacaacgcccaacacaacataacaactctatgatttatctcagaatcccaacactgaaatctatcatgaggccattccccaaaagaattgtcaccgatttctatcactaaaatatctgccatccgtcagcaagcaaaagcaaatgagaacaccccacaagacaatgaaaaatagaatcttcaattcacaagtaccttaacacaacaatgagggaagaggaacatgtttcacacctaattggacatcggtagtaagacaattggaagtagccgtccaaactaaatccttgactttatgagacactctcgaatcccacaactatttccaaagatcgagttaccaactccaactaactcacgcacatttaagctcttaaagaagctgatacgcactcttgaccgaatatacacaagaactctcaccattctactgctaaatatcgtcagacattgaggcaaacaaatgaaggctcaaaataagctttatgtgatccctctttacaaaaatgtttgaattttttcatcccaagacgattctccaacataagactggagaccttttgaattgccaaactagggtgattcgaaaccaaaaatgggttttctttatctggaggccaaggacccgtaaggatatcaatactcattccagatccagcaaccatacacccctttttcgtataagagattgtgctccatggatactattgcatataaaacttgaattgcttcccaactctgcccccaaatagtactcacgaggataataacaagctttgaacacatggctaactaaagaacctaaacgtctgttttctaagaaacataatattaaaatcatgaaacttccgaaatccaagcctcccatgaacctttgggacacacatcgactggtcccaactcatccagtgaatgtcactgccatttttacctgaattcttccaccaaaaagagcacattaattttttgatctcgtcacacatctttttaggcaaaagaaaaatgctcatagcataggtccgtcttcaacaaaatctttttactagctctaaataaaaacttactttcccacccttcaatctgattcctcaaattttccttaagaaagcccaacatgactaacttgttgtggttcatagtatttgggattccaagatacgaacaatattccccagcttccaccatacctaagatggaacacacacgtgccttcatactaacatcaatattcttgctaaagaaaataaaagacttgactagatttaccatctgaccaaaagctattttaaaactacgaagcaacgacatcaccctattagcctcattctcagcgcctaacaacacaaataactgtcatctacaaagaacatatgggagataacaagtgcacgacgagcaactttacaacctttaaaccaacccctccgtacatattcattaataagagtagacaatcttttcgcgcataagataaataattaaggagacaaaggatcctcttggtagataccccgagttggagtaataggcccaaaagagaaaccatcatattgaacccaatatttaatagacgagactgatgccataatcaactccacccacaactatccaaacccatcctcaagagcatagcctccaaaaaaagtcattcaaccctatcataagctttactcatgtcaagcttcaacgccgccatttgaccttgtttcccaacactttttcttttcaaataatgtattattttaaaggatattatcagatattagtctccaaaaatgaaagtaactagctcatgaaaggtttgtattttatttaatgtatatatttagtacttgagctatatgtacttaattattagagttagtatatggttaaacatatacatactaagttatttttatgcaatacatacacgtatatttaattatattttggtaattatgtgtatttttattagttatataatttatttttaattttttgaatattattcaataaacaatatcattttgtattaaaaaaaatatttgatgatatttaaaaaaaaaatgtaatagtactttaaaaataaatgaaaatattatataaaattttaagtaaattaaattagattcaaaatattatcaagatgtatgaaataaaataatattaaaattttataaattaaagaaaatcacttatagtggtttctgcctagtagtttcacatctcttgtcacaaaaaagaggtttcaagtttgaatctcatcttctccattataaaaaaacaccactgttaaacttcttattattattttatttttttaaaaaagtttaaggttttgaaaatttaagaaaaacaaatataatgtttaaggataaagtgaacataatcccaatacaattatagtttatttatttatttattatgttaactcacatttttgttaacaacaaattaatgaaaccttgtaaataaaaattaattatttataattaatatatatgtaacactaagaatctttatgtggttttgtagtaaaaatttacatacttcacgagtcattattatttctgagtattcccttacaatgtgattagattataagaggatttctctgaatattcactcaatctcactatcacattccttcccaaaaatgatcaatccctttcctctcaggttatgtccctatttataggtgttttagggaggacaattatttctcttttgatcttatctaggtaatcgctcatgaaacgtggacaatccccacattttatatttacaacatgtagataaaataaaataattactgataattgctttttgttcttataaggaaatagtttccgttgccgagataatatatctaaaatatagctcgcattcttcaaagatatttgggaatgactggtcgtattgcgcaatacactagtcagaatattttttctggttgttgtcttttatgtcaactcctaagattagtcttttaggaatcatgtgataagtcacattttggtgtattttccttagtctttcaacatactcacgagtatgtaggtcaatgagttgaaatctcttaaagaactcgttatttacccttttcagtgacattgtttcagttcatgtacgcttccaagtgatcccggttagctctgagatgaccctaaaaagttgttatctcgcaatactgtgtactttttcgtcgtcacgtgttagtgatattgtagcataacacgaggttggtatctttttatgtttacttctctcgagaaaagatagtcgttgtaattaatcatgatagtatcttttaatattcgagaataatgtccacgtgtcttgtccatatttatggctcaaatatgggcataacaatttagtttttttttaatagaaatgtgaatttattaactcaaatcattcaaaagaacatcacgtaaactactcagaatcgtacaatctaaataggtacaaccagcaattaaccacgaagctctaatcaaatggtgagcaacacgattagcagatcgcttgacaaaaatacctaccatccgccaacaatcaaaagcaaacaaacatcccacatgacaatgagatatagactctccaactcgcaagtaccttaattagacacaacaatgagagaagaggaacacgtttcatgcctaattggacgcaggtaggaagacaaatggaagcatccctccaaactaaatccttaactttaggaggcactctcaaatcccacaactctttcaaaaagactgagtattaataattctaattaactctcctttaagctcttgaagaagctgatacgcactcttgacaccgaatatacaccagaactctcaccattctactgttgaatatcgtcagacgttgagggaaacaaaggaatgctcaaaataagctttacgtccctctctacaaaaatatctttaagaacttcttcatcccaagacgactctccaatcttcataagactggagaccttttgatttgttaaattaggatgatccaaaaccacaaatggttctctttatctagaagctaagggtccctaaggatatctatagtcattccaggtccaacaactatacgaccgaataagagactgagcttcagggatacttctccatataaaatcggattgcttcacaacccctctcccaagtaagattgacgaggataataacaagctttgaacacacgactaactaaaaaatcttgacgagaatgaatacgccagctctatttcccaaacaatgaaatattaaaatcatgaagcttctgaaactcaagtccctcatgaaccttgtggacacacatccgattccaactaatcaatgccactaccgtttttaccctaatcctttcacttaaaaaacaataataatgttatagatcaataaatataataaatgtaataatataataataaaaataaattattattatttttaaaaaataataaaagtattatatgtgtttgtcattgtaatttttttaaaacaaaaaaaattaataataatggaaatatatttttaaatttgaatagtaaagtttttttttttttttttttgaaaaacaagataccaacatgtagaggaattgttaagccaaaaaaagaaaacatgtagaggaattaaggtaggtgtggctgagggattttagggttgacgatgatgttgttgggcaagtgggtgcatgcgtgttaaggggttagggcatatatatatgcatgcgtgtgtcaatatatatttatatatataagataggtgatgaacggttctgatcataaagctgcagctttaataatgatcatgatcatcagttatgatatatgatcgatcgaccgacaattataactattgttgttttacttatattatatatttaatattatatacatgatgtatatatatatatatgctgagaaataattggaatatatataaatatgttatattattatcctcatcgatctagcgagttttgtttttctctcattata

SEQ ID NO: 23734 - DNA, 1575 bp, Cannabis sativa
aattcaaaaataaaaaaaaaaaaaaaaaaaaaaagcaagatattaattttaaaataaataaacattctacctatttaaaaaattttactactaagactgcggcccatgatttggctaaatatgcctttaggctagacaataagttatgctggtttgaagaagttccaacaccgatcattgaagtcttctcgagaataatgtcttaatgtgattctaatcacgtttttcaaaaaaaaaatactacatagtaaattaaagaaaattaatagtcaattttgtaagtataatcaattactttaatatgtaataatttgaaaattatataaaaagtttaaaaattatatatttaagttgaatatagaatagatagtataaggttaaactcattttcaaaccactaaggctagcttagtggtgagggatggatgagaaaaaaaggagaagttatggattcgaacccaagacccttaaactattaagctaatatatgattgtaaaatattattacgctacactaaaaacaaaaaaaaactcattttcgggtatataaaattgcatctcatttccgcttcattacccgttaaaatgagtaattgccgccccattcgaagtggatacccgtgactggggtcaaatttcgaccactacatgaaataaataaaccatttgactatttgttcaatcacacaataatacaataacaattattagtcattatggtcactcacgtgaagtcataatcataaatataaggtataaaaactgacccaaccacgtacgtacatgagaagctcatatatatcactatatatatatatataattaaagataataattgatgataatattttgttttgttaccatcaattcaatacaatcaaagtctttgacatattcaaaatatatatgcaggcacctacattttcttctttttttctcattgtcaattctagattgttaaatccactatatcccaatatattaaccaagttatatattgtaacaatatagtttttgtttcacaacatcacgaataatctcaccaaatttatcaatcaagtaataataatctaatttatctaaaataataataataataataataataatcacctaaacataatatataaaaatatagtttaataaaatattatataatacaatataatgtatgttaaaatattatataataaattaattaactgatttataaagcaaagtcaattatttaataattgacaaaatctcttaattacagtaattaaattcatttaatgttatttaattttttttaattaattattaaaatattataacaattaattttgtttagcaatagaaagattaactcatttatcttatgtatgacaatttgtttccacacattagtaacacattagtaatgtgaaactaactttaatacaacctcctcagaaagtgtgggtataacaaacgatctttaagagaccacagggccgtgtacacatcgagaaatttgtagattttgaaacaggtcaaagaccccaacactgaaaattggcacatattgggcgaaaggtcccaaatagaggttaa

SEQ ID NO: 23735 - DNA, 2063 bp, Cannabis sativa
aatttattaaatagggaagaaagaaaaaagaataattggaaaataacttatctcatgttatgataagttttttaatttatttttatttatgataatattattatgaatgggtggtgaagacaaagttgtataaaagagccaatgtcatgtcacataaaatatggcaaaagattcaatatgatcccattgtctggatggggagttcccacacaatcaatcatgtgcatcaaatgtgactgaattattattacttcttttcttttaatagaaatgagtccccatattattaatatatatatataataataaataaataaaattgaagtggaaatctaagaagctaatgcatgatccgatatgaagatttatggggggtgatgaactaaaatatatttctaacatatatcaaaaaaattatatttattacacccttttttgaagaatattacaattaaaatttcttgagagaagagaatatgtagaactcataatccaatatattcttctttagtgaacttcttgagagtcctcattagttttctcaaaaaaatgtgctgagtacagggtactttgaaaaaacttgtgttagtttgaaggattagtcgttattccataaaacagtcagagtgatgtatttgtgtataagaatcatcattctgtgggtgtaagagcccaataaagacttaaattggaaaacattacaaatataggcttaaatttaccaccatgagtctgttggtaggctgtataagtattgtattatattaaataataaataacattatatttaagtaaaacaatatattgtattaattattacgactaaaattctcaaaacaatgtaagttgtattatttaatacataacaaatgatccgtattaacttatattataatatttacaaaggatttagagtcaactccaatctcctacccagactcgagacccgaacacgaaccagactcgaaatccatagtcggtgtttgggttgaatttattgcaaatatagtataactttacataatctattaatacaagtcaatatcaaacatagtattatattataatataatactaatacaatacaacaaatagtttagtagcaaagtgcttatttttatgtagttttatgagttgaaaaatatgaattctactttgagtggcttctttaaaaaatatgaggaatatgtctacaagcctaatcacccttaaaactcatctcataagtgtttatacactaagtggtgagcaacttgccttaaagggtcttggtgttgaaactctccttcactaaaaaagagaaaccacaacgagtcattaaccctttcctcacctattaacattatacagcctaatattgatagctagtagctacactccaccttttaaggcttaaacttcaaatcccttaaaaaacttgcttaattagctactacaattttgaacttaatttgattgatactaacactactccaaatgtatcattgatataaaatggtagaagagaatagatggatctcattgtcattttttcaacttctttattagtttagagctagttaaacaccattatcataatcaatcaaataaagtgttattttgcttaaagtataaaatataagagaaatgctaaaagggtacttatggtgtcaagtacctttgtgaggtgtaatattactattggtgcaatttaatattgaatctcacttattttactataataaatattataaaaaatcgctaaccaattataagacaacactttatcgtagtgttacgcactatgggtaaatcataacaatgctcaaaatataaatttctaaaaaagctttttcttccaaaaacaaaattccacaactaatacctaccaaagctaaaacattttacaaacacatagaaacatgcatgaaccttgataataatcttatagaaattatatatgaataacccttttcagttggtagatagatacagatatacagatacaaatttcaatctcacaagtaatgtagagccaaaattttcttagccaaacaaatagtatagaagaagaatatctattc

SEQ ID NO: 23736 - DNA, 4447 bp, Cannabis sativa
aattagaatataatttatttggtcccaagtgtattcttggatagaggttctactgtaactggtttgtgttatttcatgttgtttatttttattcattataacacttttataaaaccggctacattttaattataactgtttgagttattttgtgttatttaatttttattcattatgttacagaagtaattatatttcaattataaccagtttgagttatttgtttttattcattatgttatagaactggttctatttttagttatatcttaaacatctacttttggtgacttttccagtgacttttccgcgcgacggtaactttttcgacaactgtgatttttctgacgatttttctggtgacactaactttttccgtgatttttctaataccgacgactttttcagttctagtgactttttcaacgaaatttattattacaagtttcattaaatttttttattatttttatttttttttatatcttttaaacatataaaagtaaactctcctatattttcccatatttatatatatatatatataaaaaaaaaaacccttcttatacaacttaccaaataagccctagaagtgttccaaaagtttagtaaaatcccttattagtatatacatatattagagtattccataagtttagtgaaatctcttatctagctattagtactacaccaagtcatacttcattatgttgaactcgttctatattaaagtaactagaattatttttttatgagtaaatatattattttcttatcttcttaatttgactatttaaattaatatttttttgacctacatttgtcaaatataattttgattttatattttaattaattgtgttataaaatttattgaacttatatttaaattttgaatgacatttaaaaataataatatctgataaatcacaccatattatagtgtagacattatttttattattattatttaaaaaatgacataataagataaatttaaattgtgtcaatttaaaaattgtgaacactctaatacataaatttaaaaacaactataaatatatttattcaaaatgatgggtatatataaatatatatataaaggcccatgattccaaaccgccacgtactttttggcagaatggtatcactggtaatagctctatattatatttcaaagagtgtacgtcttttttttttgaaagtgaacgttcattagaaagaaaaattagacctcacggtcattacataaaatatttttaagaatagcagaagtaggaagacgaccaaaccgattgtgggtaaatgcccactaagccacattatgggccataaaattacatgttctagaaataatacaaaataggcaactagcaaaagaggacatgactctaatacaaaaaagaggagtagttttttgatttcccacctaagatccaccctaataatggaattgactactgccttggaggcactctcgataatattaatttttcattcttgttccaaagccacctctaaagccaaacaaacaatcgctgcctcaccccaaagagcgtcagagtaatccaattttgctaatcacccaaatcacctcaccaagatgatttcgagcaaccactacaatgcacatgtgatctgagcctactttgacatcacagttcatttgagccagtcttgaggaggcgggcaccaagtaagagatcggttcggaggaggaggctggataaaggaagatctataatctacaaaagagtgagaaactgagtcaatacattgcttcacattatccattttatgattatgtacctttttattccaaactctccacattgtgtccacaacaacagaagcatatagaaacacctcatctgggtttacacctttgtgctgaagatttcagatgaatttaacccaatcccatactctaatcccgatgtcaaacattggaaagattccccacggggacgagcgccacatgtgataagtaaaattgcattgcagaaacaagtgctcggtcaattcttcatccgtttcacaaattggacaatgtgtgtcctcaataaggaaccgtttactaagagacgacttggttgggagcgcatcacagagaatgctccaccacaaaaccttatgacactcaagtatatattgttattctatagcttgttccaaagaactggagccacattacaatgggggttcctcttgaggccttggataagataggccgacttacaagagaatcgaccattttaccttccttcgtccaaatccaataatcttttccttgccctgtaggactaccacctttgaagatggcctcaattgtttcattatcaaacaggttatgcaatttttagagatcctagtttcccctatatgtcaatagatcagccacttttccagacaaaggaaccagcccccccgagcttttggaaaaagattctaaccgtgagtgatccaagggtcatcccaaatatttgtatctttcccatcaatgattactttgcaagcgtcctgtctcagggtatcattagctctaaccatatttttccaaaaccaggaatcagaagtcttggccttgcacttaagcatatctgttcctctcagatatttagctctaaatatttagcagcatagagattgggatcctgagagcagtttccatccccatttagccaagaaatccaaattcatttcttttgtttttcgaaagccaaggccttcacgggatttagggaggtacattttatcccaagatttcaagtgtatcccatgatttcccttattaaatccccaccaaaagtcgcaaaccataccatcaatctttgtagcgagttgactagatagcttagtagtttgcatagcataggttggcatagccggacccacaaatttaatgagggtttcacggcctgccttggacaatgtgtttgccttccatccttgtaatttggaagtcaaattctccaaagtgaaattaaaatttgcatcctagtgtcttgactgaaataaagggagacataggtatttgatgttgcattccagactaccaataccaagggctttcctgatctctgacttcatgctctcagaagtattcttgctgaagaaggtggaggttttaagcttgttgacacgttgctctgaccattcacaaaaattaccaaagacaattccacatacccatagcctccgccacattagctttcccaaccaagataagatcattcgcaaagaaaatatgagaaatattagggccattttgactaattctaatacccttgatcttgcctttttttcacagattcctcaaaaattctagataaaatctccgcagcttagatgaaaagatacgggaaaagtgggtcccattgcctcagaccacaagagggtttaatttttccaacctgacccccattcaaacaaatattgagagaagtggtagagatgcattggtcaatccaagacatgatcaacaaactgccaactaagcttgtcataggctttcataagatcaattttgattgcaaagaaaccctctctgctctttttcctattaaaagagtggatgatttcttgaataataacattgttgtcttgtatatccctttcaagaacgaaggcagcttgagtggggtaaataattttaggttggatgggcttaattctatttgcaatgatcttggaaataactttataagaaacattgcatagagatataggcctaaaatggtttgtccttttcgggttttgtgtttttgggatgagaactaagtttgtagcattgatacccaagtgcatagtgttggtgtgaaaaaaatctttaatcatttcacaaaaatcaccaccaacaattttccaatagtgcttaaaaaagagaatagacatatcgtccgggccaggcgctttattgatacccatgctaaaaagagttctacaaatttctttagtgttcgggattctgaggagctcctcttgatccatttgagaaagacaatcaggaattaggtgggcacaattcagcctgtgcccttgatgctaacttggaaaaccccttaaaaaactccaggaattccttgctaatctaattccttgagtggatctagtatccattttttgtccaagatacactcgattgcattttgtcaccttctaaaagtagcagcgaggaagaaattttttgaacatttatccccctcttcaatccacgagactcgggcccattatttccaataaagagttttcctctctagggccctatttaacaccaactagatctcgtattccgcttcccagtctttggtccccatagggagattttgcaacttttctagattagcttcaagatctttaatattcatatcaatatttccatactggagcttattccactggatgagggcaacccgggtggctcctatttttttaaacaatcaagtcg

SEQ ID NO: 23737 - DNA, 3674 bp, Cannabis sativa
atctaaaagtgggataaaaagtctcaatatatcttttatcccattttttatttttgttaactaaaaaagtgggataaaaggtcccttttcttgtagtgatatatatatatctaaaatttcactctctcgtgagtaacttgtatccaatatttcattaagaccagaataataaaacacattccttttttcttcaacaaaatctctctatctatttttttttcaagaagcatggcaatgtcataaaactaaccatcttaaaaaggactgtcttgaactaaagaaacaagatttcaagaagcatggcaatgttgacatatcttcagaaggcagtgactttgatggatatgaaagtgcaggggtaatggttgcctcaaaagactattctagtgttgattgggttatagactgaggatgctcctttcacatttgtccagacaggaatcaattcttggagtagaagagagttgatggaggattgatgctcagtcaaggtggaatcacgggctttaatggtgcaaaaagggtcagtgttattgatgaaaggtgttatgatcaatggggtctatgttcttcaaggaaattccactagcaactttgcatctatggcctcgaaaagcatgatcaactctactatgctatggcatagcagacttgatcatgtgagtctcaaagggcttgggattcttgacaaacaagggttacttggaaagaatatggtgccagatttagaattctatgaacaatgtgccctgaaaaaaccaacaaggatcaaatttggcactggaatgcacaccaaaggaacactggattatctccactcaaatgtttggggaccatctagaatcatctcaaggggaggatctagatgcttcatgtcaatcataaatgactactctagatatgtttgggtaacacatattgcagaccaagaatcaagcattcagcaagttcagagagtggaaggctctagtggagactcaaactggcagaaagattaagaaattgaggactgacaatggcctggaattttgtgatgatcagttcaagaatttttgcaagcaagttgggattatgagacacaatactctgataaagactcctcaacagaatgggcttgcaaaaaggatgaacagaagtatcatggagagggttagatgtatgctcatccattcaggtttgcccaagaatttttgggcagaagctgtccttacagcatgtcatctaataaatagatgtccttcttcagctacaaattttccaactcccatggaaagatggtctggtcatcatgaaaactaccaaaatctaaaaaccttcggctgtattgcatatgtcaatgacatgaaacgaaagttggatcctagagctatgaaatgtatgttcataggctacctagatggagttaaaggataaaagctttggagttttgaaccagggaatcaaaataggtttattatcagcagagatgtgatctttgaagaagacaaagtgtacaaagacactctcaaaactcaataaaataatgcttctatcaacagagaagagagcatgctatttgaggtagaactgttaggcaattcaacactggaacaaccattccatgaatagacaaatgatgaaccaacccctacaaataacatacaagcatcacaggaagaactagaagatgaaatggatcaaggagccactatcaactgacaagagacagggacaagaggcctcacaaagctcctcaaaggtttggctttgcagacatcattcactaagctctaaacatagaacaatttgagcatgaacctaaaagctttactgaagccatgatgtcagttgataagaaaaaatggggaagagcaatggatgaagagatagaatctctaaagaaaaacaagacctgggttttaattttaaaacctgcaggaagaagggtagttggctgcaagtgggttcttaggatcaatgatggtattcatggttttgaagaagtaagatacaaagcgaggttagtggcaaaaggattcacacaaagagaaagggtggattacacagagatcttctcaccagtggtgaaacacgtctctataagactaatccaagcactaacaacaatggatgaccttgaattggaataaatggatgtcaaaacaacctttttgcatggtgaattggaaggggagattctaatgcagcaactagaaggctatgtgtagaagggcaaagaagactatgtttgcttgttaaaaagatcactctatggcctaaaacagtcacctaggcaatagtataaaagatttgctgatttcatcaccaaatcaggcttcaagagagtgcctacgacatttgtgtgtatgtcaaaacatccaacaccaggagtacagtcttcttactcctatatgttgatgatatgctaatagcaagcaaacttatgagtgagataagaaaagtgaaagatatgtcgagttctgaatttgaaatgaaggatctcgggcatgccaagaagattttgggcattgagatactcagagataggcagggaaagagactaatgctatatcaaaaagattacatttcaaaagtgctgcaaaaatttggtttttcagaggtaaaactagttaggacacctatgactcacatgacaaaattgtctcactcacaagcccccactacagaatctgatcacaactacatggagaacataccctactctaacttggtgggaagcctgatgtacatatcatggtctgtaccagacctaatttaagccaagcagtgagtgtcataagcaggtttatgggaaacctagggatagaacattggaaggcagcaaagtgggtggtaaggtacttaaagggcacatttgatatgggacttatgtatggctcaaaatctcaagcaccagaggtcaaaggctatgtagactctgattatgaaggtgatatggacaccaaaatatcacaaactggttgggtttttcaactaggtaatttcataatcagttagaaagcaaacctcccaaacattgttgccctatctactactgaggcagaatacattgcttgcactgaagcaatgaaagaagctatgtggttgaaaggaatcatatgggaacttagtttaaaacaaaggtgcattgaggtacactgtgatagtcaaagtgctctgcacttatccaaaaaccatatgttccatgaaagaaccaaacacattgatgtgcgacttcacttcattagagatgtcatagcagaggaagaagtgaagctcaagaaagtttcaacagaggacaatgcctcagacatacttaccaagcaacttaccactgccaatttcagacattgtctgaatctactaatgatcactaccatttgtgatctgtaattttttgttttttgttgctttatttgttgttcatttttttgtatacactgaataattcgaccaaggtggaaattgttagtcatggtcaatttattcagttagaataataaggggaaagcttgttagtttattctattattttcttagtttttggacaagctatatatatatgaaatctcactccctcgtgagtaacttgtatctaatatttcattaagaccaaaataataaaatacattccttttttcttcaacaaattctctctatctatttctttatggtttgaagaactgtgttcagtt

SEQ ID NO: 23738 - DNA, 2962 bp, Cannabis sativa
  modified_base (1381)..(1382): a, c, t, g, unknown or other
atataaatgatatatatacatatatatagtactattattgattcaattaaatgctatatagtactgtgttgtgttgtactaattattacactaattttgcatcaaatattagattatatactattatgtattattaggacatgaattaaatactatatatataccaaaattaattaattagagttataataacaaatatatattggcttctaatttaatgttctattatataaatttatatatagaggataaatttaattaagcataaaagtaagggtcaattaagctaattatatatttgcaatatgtaaatatataattaattagaattttgaagctcttaaatatataattaattgttcccactatatatactgataatggaagcacataattaattatcattcttaattattattaattgctcttgtctatttaatttttaagtacaaaacattataataactactaattaattaaaaaaaaatatatattaaaacctctctttatatatagtaattaatatgatcatagatatataactataattatatgtattttgactttcattatataagatggtcatgtgttgttggtgagttattataaataatctacaagttcaaattttttgatgaataaagctttgaaaattaaaattttaatatctcaaattaacattaatcatatatgttttatattattcaaaccatgcattattataatgtgaagacaaatttcttaataatgcaagcttaatttgatttttttatctctcaatttaattagaatattagtatagtagtcattaatatatatatgtataatttatatacatgaattaaagtgcacttaaatattatagtcttaatttaattaaatgtaattgatttattaaacggtataattttcatgatttcttttagcggcataattaagtacacaatatttataaaattataattattacttttcagttttctgagtacatacattattgggacttgacaaaaacacaatagtattaattttcttttaataaattcaaaacaaaatctatattaacaaaagctaaatgaaaattatagttatactaatattaattatacttatatgtcattaaaaaataaattaacattaaatttataattttaagatatacgttatgctgtcattatctcttaaattattattatatatatataatgtagtgtaaattggttaattaattgtgtaaatatcactaactttatatatatatattggcatatacaaatttgaattaagcaggtacaaggctcttgatcaagtccaaattttatcaacaatctcataaagtttcaccatcattttatggagctgcaattaatatatatatatnnatatttatatatatatttatatgtatgtatgtgcatcaatattcaatattattccaatcactcacaattttggaatatattacactgttataaaaatatatatgcttaattatatactattgatcccttgtttatttttcctttatatatattagaacataatatatattattaattgtttatttaatttagagaatgaggtgaaaactagttcggtaagtatattataaattactatcctttaacttaattaaaatttgtttttctttctttattttgtttaattaattagcctataaatataatatttcttagttcatttttgatctttttatttttatgataaaatagttgggtttgatattgcatgcatgtagttgtttttatttttcattttatttataacatatatttgatgtatatatatattgatgataattatcatatatgatgagagatcgaggttctttactaattagatttttgggtattatttaactataattaataagtattattattaattacttttaatatatatatattttactaatatttcgcctttaattttcatttcttaaaattttacacaattttatacttaatttttttctctttcaaattaccattatatatatattcttctttttttgtttgaaattatgttttcatctcttaacactctatatattaaatattgtttatttataacttatatatataatatttaaaaattaaaatgcataacctaaaataaaattaagcatgtattaacattaatctaatataaatatatataatccattagatataatatttgatcgatccactaatatattttccaaaagtatatatataatatttgtaattaataattatgataattaataattttcaatatataattaattagtgcttggagggtatatatatatagtctttcccacttaataataattgtagctataggatataaactgttggatattctcatgtccctacattatatatattatatatgttctcatataatgtagtatatatatatatagtttattttacgtaccatatatatttttatatatatatcattggattccctaagtcttttcattatgatcaaaatcataatgtttttttttaccattttttctcgactttctcaattatttattgatgctttttatatatatcttttcagacattaattgaaaataattgagcatatatataatatttttcttatttcaataaaataaatttcaaatttattgaaggctttgatcaatttttttcagactaattaaattacatatatttagagaatacttcttaattaataatattactcttttatatttattaaaaataatatttttaataactattataaatattaattttaaaaatattaaattattaaattttgatataattacgaataataataaaaaaaaattgagttatttttgtatgaaaagaaaattttgagttaatatgtttaatagttaattacttaaataaaaagaataaatcaaaatatatttctttctacactatatcaaatatatatatatata

SEQ ID NO: 23739 - DNA, 2717 bp, Cannabis sativa
tttcattgttttagaattcattttaggatgttaatgaaacatacatggtagtaaatttagatccttgtaaaatatttccaacaaaagtcacctatattaattattctaaagctctaattattatcttatttaattggttatcgaaaacctcagtcaatattttggtgctttcattgagagttgtgggaagcgttgtttgagaaacgacaatgaagaatcaaagctacaatggtggaaactcggaaccatacatgccaaccccgtccccccaaggatcttcaggacccagagggtgaagaggcagcttcacgagtaaatgtgggctctgaggaacgaggcgggtgaaacgatgaggagtacaaagaaaatctcaaacgatacgatgcttatgatgacggtagctacactaagttactggtcctaaggaaaaaaaatcgctaatcacaaggccaaactggccgccaaaaagaacaaaatagaaggattcaagaaataatggttgccatacaaaaggccatggaaacaataagaattcatgtgcatccccaaaccgtgcctgcaggactataggttacacaagaagagtcctcgccaagtacccaaagacctaaaactagagagccaagtcccatacgatatcctttcgaggaaaaccataagaaaaatcccacttcaatccccgagagaaacaaaaaggcccaagatccgctctgatttcctgaaagggaaaggttcgcagaagggcaagctccctcgagagagtcttggctctcaggactaagaggatcgaaagagcgtgtctgtgcactaagagctcagggaaagagggaggaaaggtcgaaggcaccccctagttgatttaagacaaaaaattatcgaaaaaaacatggtgacttaagaaaccacctcgaaaagaataagcatgtgataccggtgtcaagggacgctttgaatgagggaatcttagctgtattggcaatcctcgaaaaagacatcgctagagtatccccgagacaaaagggggatgactcagactccaattgcgagaaccgggaaccttgcgctcgaaacatcctagaggcggaactccccaaaactttcaaaatacccgaaatggcgacgtacacaggagactcagacctcagtgaccatctgtctcggtttaacagagtaatgaccgtcatgagggttagtaatgatgcaaagtgtctatgctttccactgacgctgagcggatctgccgaagaatggttcaagaaactggagccaggatcagtggactgttggaacaagtttcaagtaagtttttggcggtagtgtgtggcgacaaggaagatcaaccttgaggtcattgccctaacaaacacaaaacaactacccgtggaaaccctaaagaacttcataaagagattcaaggaggaggcctcaaaaatcaagaaggtggacgacggacaacagctgaccctgctccaagccgggatctgtacaagatcccctttttggaatgagttgccacaggaaggagcggtagcctccaggactttcaaaagagagtttagaaatacattaatctggaagaagtccaaatagttgcttacggagggtattactcaacgggagtgtcgggatatacactaggagcacaacttcaagaagctccacccctaatgctccccaaacaagcagaatacagttctctgctactctaagatacaaccagaaccttgccttaaccccagcactgtcgcactttggggcgcctgtaagcaatccctcttgggtgagcgtccaactttcgtccctatccacaccagccactagtatggcacgagctcagcaaagttcctagagcaagagatcttctaaaggtagcacgcggactgaggagaaaaggcaacgaagggggtatactccccaatacacgtagtacattgagctcacagattctcaagaacgtgtgtactttgccatccgacaaaatacgcattatcggaagcctccacccttagggatagctcctaaagggaccccaacaaaagatacgactatcacaacgacatcggtcacaccacaaacgagtgtaaaaatctgaaggatgaaattaaaaacataatccgattgggccacttgtgcgagtggatcaaaaataggctaacacatttaaattcggcccaagccggaggtcccttacctcaagaaggaaccgagattacactcgagggtcaggtatctcccggaagggtgccctctcataagacgaccggactgccaccccggccaaacatgagagtcgctatgatctcagaggggcctcatattggaggaacccctaggaacgagctaaagcgctacgttggagccctaaagcatgacgaagaggtatgggaggtcattcaactccctccttagaggcctagactcattgatcagcccatcactttcacggaggaagacgcaaagccagtgtgtttccctcaccatgaacccctggtcatagagactcccatcaccaataaggttgtggccaggatattagtggataatggaagctccgttaatttgctgtttaaagatgctttcacgaccatcgggctcactgacagggacctttctcccagtggttcacaactcacagggttcaacgggacaactctcatcccgatgggaaaggtgagactcctagtcaccttgtctcctgacaccccacaaagcacctt

SEQ ID NO: 23740 - DNA, 5050 bp, Cannabis sativa
gaagtgaggcgagggggagatttgttgggtccgcccattattgttgggcttggaccaattaagggcttaaggttcaaattagttgaaacataaaagaaacaaaaaaaaaaaaaagaaagaaagaaagaaaggggctgaaggtatcgtgagcagccaagagagagaaagaaaaagagagggaaagaagagaaagaaagctagagagagaaaggggttttgccaatttttttgaagatcaagtggttgattctcatctattttagctcaaattttgggtggtgaatccttgcaaggtgctcttcaaacctacttgttccgatttggcgatcgtcctctctaaggtactcttctgtaatacccacttggtaagacccaatatttttctatttgtgtatccatcttttgagatgaagatgatgattgtattggtgatccaagattgtttaatcttgatgttgttgtgagcctctagttttactagagaagaactttgtaatctcattattgaactttggtgatagtggatgatttgagcggactacggtctcgtggttttttcctgcattgggtttctacataaaattcttggtgtcacacttttatgcttgatttgtgtattttatattgcttgtggtgctttggttgatatttgattgtttattatggtgtttgaaaagtattccattttttacatacaaagagagaaaatattgtgattaattgtaataggtttttccaacagttctttaagtttttattttgtttgtttaacacgtggcaagcatcagatccatacaacctcgctgtcggttggtcactttttgaggtcaacaatacgtaacaaaataaaaaattaatatcatttaagaataataatatattatagaacaaaaaaaaaatatattgtacaaccaaaatatatataccaacaacccacaacaactcataaaaaataaaaataaaaaatgacataacttaaaaataaaagtagcatcaacaaaattaatataaatataccatgatatataagtaatatgcttctaaatcattaaaaaaatagaaaaaaaaaatataaattgaacattaaaaatgtaagaactatgaaaattttatatgacaaaagaccatttaagtaataaatactataaatgagtcatttctctacaaattttaaaataatgacatttaggtatataatcttatatttttggttcatttgctataatttttcataagtattccctctttcttctctaatttcatgtaacttatattggaatccatattgtcacaaatgttatgttattgtattatatttatatatgtttatttgatacaagttttccatcttgagtaaatattatcatgttaaagatgaagcgtaagttaaagcatggataaatatacatgttctggttaggaaacagttaaattagttgcgacttcatcttttgtattatcaacaagtgaagcagaaatatctcacaggaactttgcctcctgattttatcttccttgccttttctttaactgaaagctcttcatttttccttttctcttccaattgtgcccttgctcctccagctatcttttctatccttgctatcttgttctggtaatgctgtatcgtttgtgctcttttctgctccaataaaatctgcaatttccacaagttaagtgccttttatgtcattccattgaaaaggaaaccaaaaattctcaatcaataaatacaactagtaatgtttaagagaacctttctcttttccatcttagccttggcttgcatctttctctcattttcccaagaaagaatggcatgttttgtcttctcatacctgaaagttacatgatcacaaacacaatcttaaagttgacatattatttgcttaagtgattacaacaacaaaagaaaagtagcattgttcacctttcttgaactcttctcatctgagctatctcccaagaatctggcttcctttccatgcctttgatacccggtgacactcctttctgtgtgtggcttgatggtgtgcccggtgaaaccctctgagacaccttgttttcgaggctaactgaccttttccttgaagcttcacctatacaaaaaccaaggaatgttatattctctgcaaaagcattgagataatactatgcaagcataggaaataccagcacttttagcttccttgtttgataatagcttggttgctttactagaacttggcatttcagctgtgatctcactattcctgcccttattttccccggtccttgaggtatcaagagattccttcttccttctctggtgttgggattcaacttgatcaattgagtgaacagcaaaggcagcagctgcaactgcagtagcataatctatgtctctttcactgttatccttcatcttgctcgaaaagtactccctctccgatggccttcgtggcaattctttatctacaaaaatgttcatcatgacatgaaaatcttgcaaaagtaaattgatcatatattgacatgaaagttgatcttcatactagataaaacatggtgttcaaatataatttaagttgtgatgatatgtatgtatatacatgaacaaaaagcaagtttcatattaagtataactaccttctttaggagacctagttagttgaaatgatggaggttctctttttatacccttagactgttcctgcttttctggtccaggacctgaaattttcactctgggacagaaaatactttaatcaaaaattgataataaaaaggttatattacaaattctaaagctgccctgataaatggtttgcgatggttatcatttctttctccagttccttttaactaccaaaaaagaaatgtttaatacaaaactactaaccgtctaagagtctaaataagtctgagttggggttcaaatgtacctcttttgcttaagtagtaaattgtccattacccaaaaacaaaaataacctttgctgaagagttttgtctaggactttcctgctctttctccagagaaaagaaaatagtgtttggttctgaggaaaagtagaagtgtggactgttgatgacttgatgttgttatcattggtttgggattgtgaacagggcagaggtagaagcaaagtaaaatgctttggacactgttacgtatagaagcaaaggatttcttttttctcttttcagcacatagcccagaaaacaagttgtttccacttttcactataaaactatgactatatttgttagcttttcaattgtgaaagacagctttagattccctccattttgctggattgttctacaagttattatttattttttttcaatggaaatcggaaacatgataaaagtggattcatcagaatcacattttactatcattgatttattccttgattcacttggaaattaatgggcattatgtctttcctggaatggatcctgttgactactttacactaaactgcttttgtgtaacccaaatccaaagcctgctgaaatgggattttggtacagtttttgatagaattgtgaaacaaaagtttgaacatattatggaaagccttattggtgagtaaatactaattaattaattaataatgtaaagttcatactttgtgctggaaagtttatacattgtgtagcatttttttgaagcgtgaagaatgttgttactttcatacccgaataataatgtaaacaactttataaaaatagttccaatattattgtaggcacatgagcggtatatatgtcatatgataggtatattgtttgtgatcatatttttgtaataaaaactttcatcaacattagaaaagttacaaaaatatttttacaaaataataaaaataaaagactaattagaatttttgtccctgaacttagacatacatcaaatcatgtccctaaaacctttttagccgttaaaatttttcctcaactattgaggttgttggatttaagaatatttgtccagtttcattcaattttattaattctatgattgtctatatattaaactttgctccccagactttaatatctaccagatcatgttcctcaaattttgacatgtactaaatttggtcccttaattttgatccatgttagactttacttgttaaaattaaaaaaaaaaaaaaatacatgatttagtacgtattaaaatttaagaacaaaaattctaattagtcattttgaaatcaaaatctccagttgagtcatgctctcaagcatttaggagcacattcacatatgaaggctctctaatcaagatttttcactaaggtaaatcccacattgcacatggagatatttattgttagaccatttcgaatgtaacatttaaatattgtactaaatccaagtcatacttacaaactggaatgtatcacttgtagaaccatttgttcaactactccaactgattcagttaccccaagatcatggaccttctgtaccggctggaggaatgttctgagcaacattcactagtagaatctattgccctaactatgtaatttctttactttatctctgagttatcactcgcattatgatgattatctgtctcagcttgagtagtagacaaagaattcccttcatattctcacctcacacgatcataaccaagcacaagcatacttccaactaattaaggaaccacactcaacaataatcatgcaataaatacaaacaatacatacaatttccttaagggaccatgccccacaattaagctcttttaattatcataaggaactaatcctaactagttatgcttcaattaattgcacaagggactattcccaatcaattattttgttctattattctaataagcaatcaatctatatttatatctctctatatatttatataattccgttgttaaaataggtaatgtggcatgatatatggatttccttttcaattctctattttctaaccttttctaattttatttttattattatttattatttcatgcaactcaaaacttaatagaaaaaataataaacaactgatataatattattaa

SEQ ID NO: 23741 - DNA, 2042 bp, Cannabis sativa
  modified_base (1924)..(1933): a, c, t, g, unknown or other
caaaaaatgaaagctagaagagattattcgaatggctgctctataagttctatttatagaacatagaaaccctagagacaaccacaaagttgaatctacggttgtacaaactttcctaaatgaaaatcctgttttgcagcatcagagacaggatcagctgcaacaaaaccagaccagaaaagaaaactttccaaaaacgtgtccaatcatgtatttagtcttgatacctgccaaaaatagtgtatttgatctgatcttatcaagacacaatctaactcattaaggaaaataagaatagtcaaagtttccataaaaagcaaactttccataagagaatttctttttcttacaagaagtttctaaacaaagaaaatgagagctgaatttttttttttcctaagaagaaaagagcaataaaatcatttaaaggtgagaaaatcaattttataaaagccaacaaatcacaccataaataaaaaaaaaaattggcatctaaattgcaaaaaaaaaaaaaaatgattttacatatatcagtgatggggtgtaaggtacttcaatccttcttgtattgtagtcattttttttttctttaaaaaaaaaatcaagagttttatatatattgtatattttttaataatatatataattatgtacatagtgattagtttgaatttataaaggttattagggttatttttttggtacaatttagtctaatttttttagaaattactttaatatatagtgtatagtagtatttataagtgcaaattgataaaaaaaaatatcacgataataataaataaatcaaatatttcaaaaaaataactaacaatagtatatataacttacaaagttaataataacattataacaaataatggaaatattataacttaaacacaaaaagtataattattaattagggtaccctattaattattatgtgtctttttaaatttatacaactgttaaacataaattaaaaagaaaaaatattgacgaaattgttgatattgtattgtttttttctttataaaaatgatataacttttcaataaagatgttattatagttaaattagcttatgtagtgaaaaaaattgtttattgtatgagtcaaaaattaaataatatttattttaaatttttgtaaaaaaaaaaaaaaaagagtgtttcaaatttcgctcaaaatttttcaacaacttaagacggccctgtatatatactatgtagtaaattttaccaaaatagataggcccatattgtagggatgattttatgtttcttttggatgatgtaaaattctttgtcactataaaaattttaacttttagtcacaataaaatttgtgactaaaagtgaaaaaaattatggctaattataaattaatattcttatattatgattaaaaggtccgtaactaaaggtattagtcacaaaaatcacaagatgttgtggctaaaactaaattagtgataaattatatttaaataatatattttagttccaaataattttttgttacgactaaaaatcatatttaatcacaaagattgttactaaatgtaggtgtttattgtagtgagtgtattatttctttgtgatgaggagtcaaattaattaggctaattatgatttttaccccctgaactttgacatgtaccgaatcatgctccttgaacttttaaggttgttgaaaatacccatgaactattaagattgttggatttaaggacttttgtctaatttcattcaattttactatttcagtaattgcttatgtactaaaccatgctccccagattttgatatctagcaaatcatgcccctcgaactttgacatgtactaaattatggctcctgaactttcatccatgttagatttttttactaaaatgaaaaaaaaaaatccttaaatctannnnnnnnnntagttcagggagaatttttaacaaaattcagaggacatgatttggtacatgttaaaattcaaggggcaaaaatcataattatctcattaattatttagggtttttgagt

SEQ ID NO: 23742 - DNA, 2890 bp, Cannabis sativa
atttctttctgcagccaaatagatatttcttacaataattttactgagacatccgaaccatctagttgtcgcgatactttgtaagagcttctcttttttcttcctttctttctaattttcattgcatcataatcatgtcaaattgaatacacttgtgtttttgatcatcagcaatcattttcggagcccatctggacagaaaaacaactcgtaagctttaacaaaactatcgcgatgaaatgaaagaaaaaacattagttttcatgatgatcttttgctttactaatgtttgttttcaatatgattgttacagaattctgaacaagtgtttggctccatgttcaaaaggtaaatgttgtaatttaacaacatcaatgaaagatcaaaactagaatgaatgagaacaaataagaatttatccttgtttggatctcaatttgagtcctactccagctctcccccgaggagttatctccaatgtaacaagttgattacaatctccaatgtcattagtttacaattacacctcttgaaacaataccgaaacaaactctcagcactcgatcgagctcacaaagccatgaatggcattacaatgtttctctgtttcactcttacaatcactactctctaactcttttgctctaactttaaggtggcgtttggttgagaggaataaaaatatagaaataggactgagaatgggaataagaatataagaatagaatggattggaatgacattaatttttctctccatcttgtaatggaatggtctaaaattctattcaaaatgaaattgtcattccaatactttaaactgcaatcaaacaaaggaacagaataaaaattgtttccttcaatagaaactggtcttcagtagttaagttcttgaatcttgattttctttgctttattgtttggtgtgtagatcattattcattgcatataaattgtggtggaaaacaaactaccattagaggcatcaagtatgaaggagatgaggatttagtaggagctgcgaaattcgtccaatactcgccaacatggggattaagcaacactggtgatttctgggatgttaataacaaagcatcagactacattgtaaacaatgtctctgtattaagaatgaacaattccgagctctacacaacagcacgaatctcgcctctttcgctaacttattatgctcggtgcttagcaaatggaaattacacagttaaacttcattttgctgagatagtagtaacaaacaacagatcatattacagctttggaaggcgaatatttgatgtttatgttcaggtagagtcttgatttttcgcctacttcatcatactaatgcatgaaatttatgtttgattgagttatgttgttattataggaaaaattggagttgaaagatttcaacattgaaaaggaagctaatggtgttaataaggagtttatcaaagtagttaaggctgttgtgagttataaaacactcgagattcgattccaatggaccgggaaagggacgaggaatattccaaagcgaggaatgtatggttctttaatatcagctatctcaattgaatctggtaagtaacttaattgttcatgttattaggaaaaaactaacatgtttatggtgacaagtgagatttgttttattttgttttgtagatttcaaacctccaaaagagaaaaaagacatgaagttcatcattattggagtggttttatctttttgccttgttttcataactataggcattgtttggtggaaatgctatttgagaagaaaggaatcaagggatgaaggtaatgaaaatactttcatcagatttctcattagaaacttttgaacatcaattttaccaaatccaattagttagattttcatgattaggatctaaaagtatggggttgacataatcaccaagaatataagtatctaaggttgtgtttggttagaggtaatgaaatggaaaggaatcagttttcattccattccttttccacggtggaatgactattatattttattctattccattcttattcatattctcattctcattcttgtgttttcattagtttgtcccaaccaaacgtaccctaagtcttaaactttcattgaatgtttgttcttattatttgtacagttctaagaggactagatctccaaactggtttctttacctttaagcaaattaaatctgcaactaacaactttgatgctgcaaacaaaattggagaaggtggattcggatcagtctacaaggtatccaaaactctttttactttatctacgatttcactcaaatgaatgcattcttcatatttctattgcagggtgtgctattagatggaactattattgcggttaagcaactttcttcaaaatcgaagcaaggaaatcgagaatttgttaacgaaataggcatgatttctgcattacaacacccgaatcttgtcaaattgcatggatgttgtatcgaaggaaagcaattgttgttggtttatgaatacatggagaacaatagccttgcaaatttgttatttggtaagtttattgttgaaacttgttacctttctttggataaggacttttgctactttgatgaattcattgttttgtgtttaatgcttaaaaaggtaccgaagaagatagagagaaactagactggaatacaaggcaaagaatatgcataggcattgcaagaggtcttgctttccttcatgaggaatcaacaataaaaattattcatagagacatcaaagctacaaatgtactactagatagggagcttacaccgaaaatatcagatttcggtctagccaaactaaatgaagaggaaaacactcacatcaacaccagagttgctggaactatgtgagttata

SEQ ID NO: 23743 - DNA, 2671 bp, Cannabis sativa
  modified_base (1827)..(1835): a, c, t, g, unknown or other
tgtgttgttggttatatatattttaattatgtaggatgctgaaacaagcaactggtgggtggaatacggaaataggataaagatagggtattggcctggggagctattcaaagagctgcgttcgaacgcggacagcgtggagtggggaggagaggtgtacagcgatagagtggggcacacaccacacagttccaccgcaatgggaaatggtaggtttcctgagggaatgtatggaaactcaggctacattaagagaatccgaatccatgacaactctctctacttgaaattccctgaatgggttgagacttacactgatgagtacaactgctatgatgttgactatgttggagattatattgctgaccctgagttttactatggtggcccaggaagaaatcctatatgtccttaacaaaacaatgtctaataaacccaattatatctacctgtcctcatcatcttctttctaattttgtctaaacatgtacaattaataaaacaatctcatcatctccttagttcacttctctgcatatttagaacatctttttcaaagctgcatattaatttagaacatcttcattcgttttttttatattctttgaaagcatctcattggtttttaattggagtttttttatttttacattttaaattagtcttcttgtaattttacgaaattttacacagaaactcttgtaccaactaacgaagcaaccaaaatctgtatagaaaccacccaccgagaaactaccagaacccaaatcttaaatttaaaaaaaaaaaaaaaaatagtatctaaagtgatttttttttttttgaaatttttttccacattattttcttttaatattaatagttaattttattttattttcacttgtttttttttttaatcacgtatggtttttttattttttttatataaattttatgtaatttattattttataggcatttcttttatgaatatgataagtaagaaaaaaaaataaaaaaaaaatacaaattaaagatatattttaaataaaatagagtgtacttaattttatgaggtgcaaataaaaaattaaaatcctcttaaatttggccaactcaactcagcaacaatccacaaagcatgttatttattgtgatgacaattgtggtctactatatatggcacgtttagaattatgtcgtttgaaactaaaacttgtggatgattgaacagattatttttagaattcaatgtaattgtaaacatagaattcttagtgttataccttgtaaaactagcacctaagatagagattggtttataagtttataaaattataaatatgtacattgtatagatatcccgatgtaatgactacaatagattgtaaatgttcagttggaagaatacaaaagtacttattcataaaaaaaaaaaaaaaaaaacttaattttatattaaatgttgttattttattagactccattaacaatacacattaacaatacacgtttcatttttttttttcagtcaactaaattaatttttaaagtctggtaggtctcgcatttattacgttattattttaccaatatacaaaaataacaaaaaaattacaaaaatacagttgtataaaatttttacgatatatatttatgattttatttacagaaaatatgacctttttgtgttatactattgttaattttttgttgattttttattatccatatgttattttttgttattgttttgatattattttcttcttacttttacgtagttttcttgttattttcgtgtttttttttaaaaaaagatctataaaatgtaaaaaaaaaaannnnnnnnnctttaaacgtaaaattataaaattttacaaaaaatagtgtgttatataattatccctatctttttttttttctaacaagaaaattctattttaaagatattaaaaaattactagagaaacatttatatttgtcactaacaatttcacacacatttcacatcaaaagtaatttcacacaaataattatatttctcactctcatctttacagagtatgttttgtaaattattactagcacaaaatattaaaataaaaagttctaagatcatctccaatagtaaaattcatatttagtgttaaatctacactaaaaaatatattctttattattatattattttattatataataagaatattttaatattaaatatttatcaaatctaataaattatattagtaaatattaaaatatattatttaatattaaaaaatatatatactgcggtctacagtgtccaccattattagtggaacactgtagagctccatgaaaatatgttggcttttgcagtgtggttggagcatttagaggaaaaataacagtatataggttttttgccgtttcattggagatggcctaacaccatatgaaattatcctaaaaaagaaagagtagagcacaaaaaatatatccaaaagtaaaccacaaaattaaaatatattttctttcataatattgtcataaaatcattagaaaaaaaaaatcacccgtaaataatgtttgacatagtacttttttttatttttttaattattttttaaaatctccaaacacaccataatgatttgtaggtaacaaatgaacctacaaaaaagaaaaaaaaaaatcttgt

SEQ ID NO: 23744 - DNA, 2726 bp, Cannabis sativa
agttgatagttgatagcacaaacttttctgcttttttcttatattgaatatttgtaacctatattataactttgttactttatatttgcatttccaggctcagagattttgatggagagccctcaagtggggcttcaggtcgtcctagggccatggtggcctggaccatccgatttggtgatgttgttgggtctttactacctcccccttgaggaagaccccacctccacgttggcctttgagcaagggcacttagagaaccagccgtggggcaggcacaaccaccagaaagagagttgtagaggatgctcatagatgtattgacatgattctacccattgttggtggtgatctccaagaaattgacgatgacgagccagagaggctgtcatcctgtggtctctaggacttgaccttagtaagttatacatctgattttgctcaaattgttgttctgtcaaaagttgtccgaccaggtataaagctttgcaaggttgactggcctctgttgtagtattgagaagctggctggccagggaagcatcacaaagaggttggtcagctaggtcctctctctggcactaactcgattttgctttgatttcaggccctgttgaagttcaacctttctcatggcaagaccaaagggtccttgggtgctcttcgggagaagcttaaggttcaggaggccaagcttctcgtgaagggggaggcccttaccaaggtaaatgcttttgttgaatagaggcagggttaattactggtttggagcgcatgcttcatattagaaaccaagaaaacaacacacttgctaatgaggcctccaagttggaggtggaactcaggaagagagacaaagcactaaaattggctcttgatggctagaaagccattaggaacgagtatgttggcttgtcttcggaggtcttgtatgaggttaagctacgcaaccccagtgttgacctctcctacatgggagcttctttccttgaaagaacactagccgaggggagagaattgtatgagagcaggatccaaacagaatagtgttggaatatcactactacaaaaagtataattcccgtcggtttttaagtgtcatttaaaaaatttacgtcggttcaaaaaaccgacgtatataccgtggttgcaaatagttttttattagcgtcgtttttaaaacgacgcaaaaaataattatctacatttacaaaccgacgcaaaatatgtacttttctattttattttctgcgtcggtttagaaatgacgcaaaattgtttatgacattttaaaactgtcacaaaaaacttattacgtcggttcaaaaatgccatatccattacgaaaatactttttttttaccaaatacttgggtggttctcctgacaagcttcgatcaattttactactactcttgttgttttcactattgaattctcttcttctgtcatttttactacttttactgttgtttccacttgaatcacttgcatcactatcactctacatgagtaaaaatcaataagttttcccaatctcaaagaaacaatggccaatggaacacagtaagtaattaactccaattccaccacacaacaaagtcagaatttcaattatacattagtttcaaatagaaaagagaaaatagaaggaaagaaaaaaagacagctttaacattataatgcctggtcaggctcttcttaactctatagaagtaaatgtgtcttcgtatgtctgaaatgcaacgctgaactatcgaaccccgcagtttcaacgctgtctggcagcacaagttcagaagtacacaagctaaacattgagctgggaaagtataatagcccggattttatgcttttactactcatgattagctcacaatagaggtctcaattaacccttgccctgaaagtaatgataaaaatatataaatacattcagcaaattcaacattttgatagcacaaacactcacagaggacaaataatggttaaagttattgaggaatatataacccacaaacagtttgaaacaaatacttattgaggaatttcatcacacagttcatgtgcacacaaattttgtaaatcttcatgcttttataggaacacattatagaatcaaaagaaccagaaataactcactaattatatataaaaaaaaatgggccaacaccagaacttcattgtttccatttcttttcaaaacaaaaaataaaccagagtatgtaaattgtgtgagatctgagcaatggtgaagcttgaaaacttaatttattagccttagagagatatatacttgacaattgatagaagggaaaaaaaaagtcattactatattcaactgcactaaagctactaatgcactttccctaagattgttgtttaactccaaatccaaaatacttagcagcatctacagtaaatcttcactaagatatatactaaaaactagttataaatctatgataatatgaacaaaatatgcaggcagagatttacaaaatcaaatcaaacttggactaccataaatttagatattgatgatgacattcattttgttgtgatccaataagaggacagtgatgagttgattggttcatattatttaagacaaaacaaagaaaccaataaaaaaaaggttgatacaatacaactgttttcaagattaagtgtttacctttgaaaatcttgtaacaatttttcagaacaaagactactttgactaa

SEQ ID NO: 23745 - DNA, 3755 bp, Cannabis sativa
tcttttcctcctcatcgctacccactgcatcacctacatcttctacccttgtatatatgtgtgtgtctgaaatttgcttgagagtttttaattttttttcctacctaacaactcgatttaatttttagtttcactaaacagaggacccaaaaattacaggatcgttgtttgttaatttgaacgattcaattcgatttgtaataagattttcttttattgatttctcgttcagaaggtgcaaattccgggcaaacggcaccacaagcttgtacccttttaagtgttggacaggtttatcttcttaacttcgtctctatctccaaacatgttcgacagttttttctgttggtacttcaacttcacttggttaacaaagctcttattttcagttgaatacctcatttttagcattatttatctttttaactactgactgctttgttcgaactatgaattgggttttgttttgttagaatttggaataagatgaatgaagtttcatttaagactaattgccaatgggaggagtagtttattcatcttatatgtgacaatttctttccacaagtgcgaataacaacaaaacaggccgaaaggtcccaaatagaggttagaggggagacggaaatatctttttggaccgatcacaagtggctatgatatatgttagaatttgggataggataaatgagattctatctcaaaattaattgacaatggaaaaattagctcatttatcttgtatatgacaatttctttccacacataaatagtgtgggactaactctaatatgttttgtactttattgaattgaaagcttttcttgattcctacaagatttttggttgacacattttgctccacaactaagtatgcttattacagccctgtgttttacttcattttttatgcaacaacaattggtatgtgccaatatgggtgcttatgttgtcatacgatagtgtgaggcttttagtctttgttatgataagtgggatggggagagagatgagggggtggctgcttttgtcatcttgttttagctggcatttttgcttagtgttcatataaccaatacttgctccctggttaaggtttcgaagtttttatgtttactcaccgaacgtttctttcttttatagaccttctcgggtactcagaatgtttctggtttgcaaaaagatgaagcatggagggtaaatgtttgtatacaaggatgtgaccttgaacatggttatctatgcggtaccatggaagctcttaatgttcccatggccgatacaccagtaagaattttattctattcgcatttcaaacattggaactatataagtagtctcagtcttttatttattttctgctttggacacttatttataattacacacatgtatgtttgattgatttagtgcatttcatagaagaaagctgctgctttgttatttgagaattgcattttgtgaaaaacatttgacattggtaaaagacatctgttgtacatagcttaataactcactgcatgtcgcattctatttggtcccatattgcaatttcacaaaatgagatggatttagatatggaaattttatgtaaataatttccaattagtttacttctcgttatatattgacgatattgattctcccttatttcaaaacttccttactctttattggctgcttgaaatataacatatttagtccatgatagcatgtgctgttgcatttctgtatttgatatatgtattctgcatttcattatgttgaataacacatgctttgatgtgatgaattcacagtgtatatcattatctgtaactataaggtcagcatatctctagcaatttcacttcttttaaaattcctggctaatctggtactctgctcttttaactcatatcaggttgtaaccttttgggaaggagaaattgttgataccaagaattatcctttcttcactggcaaatgggaagcaacgtatatttcttttttattcatttttactttttttccttgtaaactttcattcaatattatatactgcgcctccctttaacaagatgattatttagaagtagaaccataaacctattttcgaatgcctatctatttgtactcttaacagaccagaggatgatataaggcactggaccaagttttcttcttttaatcctttacttgtaaggagtttccgtcttctttcctcttcttactattatatattttattaaaacaaaaaaagtatttaaaaaaaagtattttataagagaaaaaagaaaagcaataggaaatgtccaatgtaatctaacaattcataattgctgtgttgtttcttattttcttacagagccaagtggaggttgatggaggcaaatctttggacttgagtaactatccatacatatttatggtaatttcatttcccattatttctgctacttggtgtactcacgtaacacatatgtgaaatataatctttcctaaaattcttttggtggtgcagagatggaaagaacagtactttgtcaatgttgggacagactgtgggttaactatagctggcttttactatgtttgcttttcttgtagtgatggctccattaatggattctactatgatcctaatagcaggttcctttttcttttcttttctttttctacgatggctaaactaattttacctgatataaatttactctctctctaaattaagggaactaagctatttcagtaatcaatgattgatgaaatttgtgatagctatgctaatgaaatgacctgttattttctaatctttcaaccttttaaaataactgattgatggatatgtacttgaatgaacctacagcccattccagaagttggagctgaaatctactaatgagggaagatcaggtttcagtttctcttcatacgagttacgatagagattaagaagatttaaggttttggtgttcggagaaacttgagagattgcacgagtttctcgctttcttggtgtataagttttattttaacttagggaaactagtttggctgcttttagctactactttgtagctttttctgttcatgtatatgttaaaatttaattttaaggaataatcaaccttgcttttttaaatttcttttaactgaacttgtccagataccaactctatctgagtgatgaaatatatatgaaaagaaaacaacaaaaatttgtgatcttggctttttcttttctcccttaccctatgtttgatagaaaacaaatgagggaggaaataaaagcgtgaggagaaaagtggatggaatatatttttttggtaaaagaataaagattgaagaaaaaaatgatggaaaatccgtggctcacaaaattctctctcccctaaaaaatgattgttcattattattattatcttttattttttacattaggtagttaaactaaatttcttatttactcggcactaaaaaaacaaattacttttattcaaaaaaaaaaaaaaacaaattacttcattcggaaaaaaaaaacaaaaacaaattacttattaataacttttttttttagttgtaagtaagaatattattgtacatgtaaacttctaacaacttacaaaccaattagataactaataagttgctctcaatccctccaatcaagtgcatcttgtttatgtaggtatgagactacacagttgaagagagtttaaatggattgattagtactatcaatatcaacaatgtgcatcttgtttttcggtagc

SEQ ID NO: 23746 - DNA, 2380 bp, Cannabis sativa
attattattatgggacctaatcatcttattagaatgatgagctagtgtttgttatggccgcaaattttgaataaggaaaagacaattaacctctttttttcaaaagactaaataaataaaaaataacacaaagtactattgttagcaaaattttaatgttcttacggtcaaataagtttttttacattttatatatttttttattattttacggcttttttatttttcttagtttcaagtttacattgtcttattaagaaaacataaaaataacaaaaaaaaaacatagacttaatagagaaacaataataaaacaatataaagataacatacaaataatttaaaaataagaaaataactacaaaataatatgaaaatatcaataatctgtaatttataaagaaaaaataattaaactgtaaaaatatttaaaactccatacaacaatatttttgcaatttttttgaagtgtactggatagacttggcccatatgagaatggaccaatccattattacgacttatgagtctactaaggatgccatcttaggcccaaggttaatgtgtctttaatttggaaactgtttggactactagtgttcaaaggcccattatacaattttataggattttttttcataaaattaatattagtttttaataaaaagtttcaacaaacgttaatctacttcttttggtgtgaattatattttccaccattcaaacaacatatgcataattgtagttggtgaattccttgtatgccatccatattcaaaacaacataatcatcttaatgaacaattaaagtagagcagaaatcttatacttctttttaacttcccagttcccactttcttttcaacattatttcacataaaaactaaacttcaagtttttacttaatttatttacttcaaatgtagagaaactatctctgattgcaaaaaaaaaatatatatatatttaatactaagtcgatgatcacataaacctactagtattcaaatattatgattagaaataatactaacgcgataataaaacttaactcgatttaactataaaagaaacttcaaaaataatatagaatcataccttaaatccaaaattttcagttaaatatgatggtgtgtcttggtcaaagaagtgataatggtatggagggtggcttgattcttggagatgatgcttaaacaagatataagattgagaatatagtagctttggtctagagagcacaagggggtgagagcataggcagacctaggggtattgaagaatgggtaaaattcaccttgagatttgaaaatatattaatatacaattgttactttcatatatacatactacatacttagtaaataagacaactggttaagatgctttaaatttacatgggagaccatgttttgaatttctttgtcttttttttttctacgtatatctacattttatttattaaaaaaataaataaatgaagtataaggttcaaactaggatcaaacttattatcactagaataggaggatgttgctaaactatcattccacttaaatttagctagttatttattattttgaattatattaaatatataactaagtccaccataaaattcaatcctaagtccaccactgagtgagagggtgatagagtaatcttgagagcttggatgagtgaactaggtgaagaaaatgatgaataaaaaatggtatttatatagactttagataattgcacccgtccatcataagactatcttcagtaatagatgtaaaaattgtgctatatttggcataaaatataactttttaatacatttgcataatttttaacattgtgcttcaatacataattgaaaaccttgatgcaaaatttaatattttcattaaaaatatacatactattaactttaacattaattttactatgtaaaataataaaaataaatttaaaaggtttataatgcaataattaaatattaaaaataatataaaagtaaataaaaaaatagtacatttattgtaatacaaaatttacatgtgccatattgtgattcaaatttaagttaactttcaatatgtgataaatttagatgtgtacttttggcataccattgaagcaaacatttttacatgaagggctagattttagcaatagatcaccagtttacatctttattgaacatgctctaactacctgttaatgattgattctcgtcaacgaaataaaggtcataaaaccaaaattaagatattaaatcaaagagcaatataagttaaaaagcttgaaggttgaagcttagaataacaatggagaaaaaaaaaatctttaaatttcttatgattacaatgatttaccaacctcctctttagtg

SEQ ID NO: 23747 - DNA, 5786 bp, Cannabis sativa
  modified_base (1875)..(1893): a, c, t, g, unknown or other
atttagggcacaaagcccaatacctacaacataaagaattactacaaaattaaaaatctaattatttaactacttgctagttatataatttatgagtacctagttactaactagttaagttactaatttattactaactagttactaatgaataactaattagtaataatacatgaatataaataaaaattagtaactaactaataaaaaaattaaaaatacatgaataggaactaaaaaaataaataaaagagttaatagttaacatatacaatattcaacatatttatcatacaaaacaatataccttaaaaacaaaacacccaacaactaatctttatctctcttaccccaaatcatgcagtttgtttatacccatttatatgttcttatatgtatacatatatatatacatacccaaactacctgattatatatatagttgagtgttattatcatttcaatctaattttttaaaaataattataactaaactattaaaatatagatttttaccttatcactgaaattcgaccactaacaccgaccaacatgtacaaccataagaacacaatctgggtaatctaggaaaaccctaaaaaaatttacaaaataaaaaataaagtaatttacattaataaaattattagagattagatttataccttaatggacgttgagattcaacgatttctccaccaaaagaggcagccggagctacaaccaccacctctaagctcaatttatcatataaaaccaaacaaaagacgatcaaactccatagatatatttttgggtatgaaaaatgcaagatttaaaaaacaaatcggtaaaaacaaatgaaaaatgaaaaaaaaaaaatagggaatggaaggtagtggttaggcaaaggtttcgtgaaggagttgcagttatattgtttggggagaagacgaagtggggaagatgaaggctgatcataaaccctacgacattggttattttgtaataactgatagcatacgggacatgcttcagccaatgtgtgtccctatggcgtcggttattacaaaataactaacgctataagtattttttttattaaaatttgtcactttatgacgtcagttattacaaaataactcacaccatatgtcattttcattccagcttcactctatgacgtcggttatcttccttctttcattaattagctaaaagaaatacctctaaaggtttgttttatagtagtgtgataatatacttgcgcataaccaaacattgtagtgttgctatcttaggtttaagattgcgttcatcactttttaggcaatctcaagtctattctcatgaaatgaaacttatatacctttaaccaaaagaaatgaaagaaacatgtataccaatcagccctgaacatagtgtttgttatgtgggtttgagttggagggagtggagttgaatggactagacttgtagggaatataaaactcaagtattggaagggagtaacattctcaccaatttaatttaaaaagtaaaacccacttgaaaatacaaacactttagtcactaagatttaatttaccaaacatggatcttattcatttaagaagaatttctttttcctaaagaagacttctccaaacactaaatcccttagaagtgcatgtacataggaagcttgtagcactttagcacaaatacaatttgggattttcaacaacctccaacactaattagcgagcatgacttattgtatttattgaaaatatttgagaagaaaaaaagaaaaaacagaacaaagagtactaacatatcaatacctaatgtcaaatctctaatattctaataaataataaatttaggtagcgtttggtaatatttttatttttnnnnnnnnnnnnnnnnnnnataaaagtaaaattttgtttttgaaaaacaaaaatgtgacttataactacttttgttttttaattttaaaaataaaaaacaaaagtgtgtcttgtaaatttcatttttattttaatttcttgattttatttaagtcgggttcgaggccgggtcgaggttgggaccgggggcgggtctgaggtcgagatcggggcgggtccaagtctggggtcacgtccaagttcggtttccaaggtctaagttgggatcggagtcaaaaatattaattaaaaaaattgtttaaaaaaattttgaaagtaatttttttattttcaaaatttagatttttaaataaaaaattaaaagtaaaaataattttatatatatgattttagaaaatattattatttttcaattttttttaaaaaaaaaattaattaaagaaacgctaccaaacgtgctcttaattgatggcgtaatttggtttaatggctccactatccgtctttctttcgaatcaaattaattataagagcgccttgttaattcgtttatctcgtataaatactcccgtggaaacactcccattttttcgttgtcaaaatattagtttcttgaacactactataagattaagatatactaaatgctttcaaagaaataagatataataaataaataaattatataatatacaatacgcattactcttcttttctttaataatattaataaagtaatatgttacttcagagcaacttgataataaatttatataatatattaatataatcttatatgtgtgtgcagataacctttggggcaaagtgctctatgccaaataaatgatgaaatttatttctcgatgaggtgaaaattttaataatttcggaaaaaatatttagaaaatctcttacaactcttacatcttcaggcccaaatgtttcaggtggaatcaatcacaatagctaaaaatcctacacatccactacacatcaaatctttagccttttaaaactgaaatgattagaatctgagaaccctaaaaagactcgacataaacaaatagttctttgccctccgcttgaaaagttattatcttccatttgcaatatacttggacaacaaattcattccaagtataatattaaacttagttaattcaaactccactaggtcaaaactcaactccctattctcaattataattgtcatagatctaacccaccttttgaagataaccaattctctgctaggtagtagggttccaaaccttatctcaataatatcacagggcctacccaatttattaattactctcgatgccacatatgaatgtgtagccctaatatcaaacaatacagtataataagagtcatttataggaatctaactagttaccacagaaggactggctgtagcatctacttatataatggtaaacacccgagcaggtacgagtttcacctcttgtttctgttcttcctttttcatttgagggcaatcttttttaaaatgtccgacgatgccacactgaaaacatgccttcccaattacattctttgggatgatgtttcttacaatgagggcactcaaaataagaataaccctgacatgcacctctaccttagttcccacggaacctcttactctatcctgcaccacctgatgttgtaaaaatcttcccctccctcctaatcaatcaacattgtggaatcaccaccatccctaccataaccaaaagtatgaagggtggtggtcccaccaacacttggagtccctcgggactcttgaagaaattttgctgcaccttcaactcaaagagcctttttaaccatctcaatataggttgttgtatcatttgttgtaatcacgagatcatgcataatcttggcattcaaacctatcaaatatttttccttcttactgaagtctgtgggcactatatccaaagccaacttggtaagtcaattaaacttcgttgtatacgctgtcactgacatggtctctcccttaaccagttcagtaaactctttcctcttagcattgcgaacaacctcattgtaatatttggcattaaagaaatcccaagacactttccaggtcattgcagtgacatcctgggtgagggacaccatttccaaccacacaagtgtgtcctcctaaaactgaaatgtggcactagtcaccctatcattcttagtgacacccgtaaagttcaattttctcttaattactgtaagccactgctcggccttcataacatttgtacctcccagaaaagctactggtgcttgtttgcaaaatctctcatgtaaaggctccatacggttgctagcaataggttgttctattgcactgctgggaccgaagcggctgacactttttgtggaggcaattcagaaggaccctactatcttaacctctgaatctcctcatcttgttgattgatttgggatcacatttctgcaaaccttttctcccaatcctgaggagcctatggtaggttttccagaccgcctctataaaaccttccacgacctctgccgtgtcgacaaggattcgaaggattttgacctccccgactgcctttggtctcgaccatattaccttgactctttgggttttgatgggcatccatattataggacttaacctgtgaacccataagttgggtaggttaaacaacgatcacatatattctaaatattgcatttttatggattttaggcaatgcatttatacaactagcatattactaacatgctccctatcatgcttttctaatcaaataaattaccaatcaagtaaaggcttactgaacagtgaatcgagcttctcttagacgaagattgtatatatcttggcagtctttggtaaataacctaatggttctgataccaaaaattgtaacgccctactgcttaggcacactacaatgactttctaattactgttcttacctttgctaatcaaagggtttctcaaaaaacgtgttaaatttaaactttttatttaaattttaaacctttataactatgtacgtatatccaaaaaaaaaaatggatcctgcttttaaaacttatattcataatcaagatacactttatataaaatatgtcgcacatcgactacaacatgaagcccatgtcgtcccgagactaaattctttaggtcaaactacttgacatgtacaactatccccgagctgtggactcatgattgctcagccttagcctgtgcattacctccacatgaaaacaatatatgtgggtcaacagactcagtaagaaaaccatataacacataatatattactgacctgtactaaggcacccatacaactatccataagacttaacagatgataaaaaatattcttaataaaagtaagatctctataccacatgcactaagtactgctactgtactagtgttcgtagggctgaaccgtaccgtgagtacccctgattattgtaccacatgcactacgtactcatcccgtagtagtgttggtaacactggacgatcatacccattaaaatatcatatgttataccaatgcactgagtaccgctactatactagtgttagtagcatatgaattacataaataacatgtatataatacacatacacatatacatatacatgttctatgctaatcttaaattgtttctaaattcaagtgtgtcggtcgacttgaatggaaaatcacgcactgaatgaaggccctatgtcacaatcacataaattggctaacaacttactaaacctttctggggatctaaactcaaaactagaagttttcctatggataaatagtaaggaaatgccctaaatatcgaggaaacaagagaaaaacgacattacgggaaaactatctaaaaaatagtaagctattttctataaaa

SEQ ID NO: 23748 - DNA, 2159 bp, Cannabis sativa
  modified_base (60)..(68): a, c, t, g, unknown or other
ttattattattattttaaaaaaccaataatgaaataaaaataaattttttttttcttttnnnnnnnnntttttttttttatcgttcaacagaatcataatcaaagccaatagacttttccctaccataaccattgtgcatatgttcactattgatactcacttttcttaacccgtcatgaatgttgatgttgtatctgcaaataacacactattagttgagtttatcaactaacatggttatggtgaacataaaaagaattgaattagcgaacctcttgtctggtctaattccaacaaaacgaaagcagcctttatgccatagtaatccgttcttaaggctcttttctttaattatctacatacacaggtgccatattaataagaatagaagatgtaattgaactgatggcaacaaattagctctaatcataccttttctgggttttacaccatcaagtaggcgaggaaagtgtgtaccacaatcggatggctcataatcagcacatctacaacgaaaaaaaataacaactataagaactaattcaacaggacatgacagaaagaaaggaaaaaaaaataaacttacaaaacaaagtcttcattgctagtttgaactacatccataactgtgtacttgtgtctaagccttaaaatgccaccaatttcttcactgagaagaacagagaaaattttgagaagaggattgatcacattgccaaaaatatttgaacctgcaccaaagtactaattaaggttatagtgtatttttaccttaaactagtgccttcagtgttcgaattgccatgtgtagaaaccgaaagaatgtgtgatcctaacttgtgagtggatccaacgagtagctgatcacatttatgcatgttcctctcactttcttcaacctgaatcaagtagcataacttgagaaataatacttataaataaaacaatcatccgagtttaatttcaaatgtactttcataccccaagatccttcactaacttcttagtttcagaaagaagacgactttcatctataaacggaagcttacaaactccctaatgaacagaacatgagatgtacagaagtttttcatagctgttaattactaaaaacaaaatgtaatctaataaaaatgcttctctaaattgatagaaaagaattagcagacctgccatgtgtaacgacatccatccatatcgatctcaaaatctaaacatagaacaatatttttaagtcaaaaatactatgacaaaatcaaattggaaacttatcaaatgaaacattagaccataccagttgtgtaaaaatcaataataggactatcatccttcattagtgtctgatatgcaaccggaagtacatgaacactacaaagaagaaaacattttgttaaccattttgcaacatatttgtcacatcaaaaagaacaattaatagcaatccacagttttacctccttggaggcagaacactcaataattgatcaaaaggtttgaatggaatgcctttcacaaaatttggtttgaactgagataagcccttgaagtcagaaacaaatggtccatagtgaaagggatagaacctgcagatatgttagcaattagagtctagattacaatatagtatatttgtcctttagagaaaatgtcttaccaagtccatgatggagtttcagagaaatagtacaaaagaacccaaattaatccttcagtgtagtgtcttacctaaaatatattcaaattaaactgattaataatacatgtattatcatatgttatattaagtaacatatgatacttactacatttatccttgtaatttcaatctcatctgcattatatgcacaaaacttttctctataatatctttctttataaccaggacaaacaagtttcacctgtaacagaaacaagtaaaccagttttattaaatcattctccaaagaatgtacaaaacaagaaattgaattttcagatatggaggaagcatgtactttgtcaatcagagaatcaacgttgttaaacaagttggatttcctacgaaggttatctttcactgtttgcttgaattcctttgtgttcttaattaacatctgcatatcaatgaagaacatgtataaatatgatacatagcaaatactctctttaataagaaatg

SEQ ID NO: 23749 - DNA, 3662 bp, Cannabis sativa
  modified_base (3029)..(3030): a, c, t, g, unknown or other
ccacgtgatgataatgatgatgagttattggggatcaaaaattagtttggttgcttttataatacatgcaaaggttgattcttttctttctgtgaaaacaagatcagggttttatttgggggcttgatttttttagaattcgtaataaactaaacatgaatctaaattgagactagttgatcttgtttcttgattgtactatatttgtgcttgatgtttctttttttggtaatatatcatgtttttcagccaccagtaaatcctcttcaaaagaattggaacgaatcgacaatttgttttattcatacgctaatgggtcctccaatatgattgagtaagttgcactcaattagtatacagtttctttttctttctgatcttatattttgtgtgttccaatataattttgttttgttctcaaatggaatgtttgggtaatatgtcttggagctttttgagaaatctccatcattcatttcattttggaaaaacaaaattaccttaaaattactttgtatagaatctcctatgctcaattcattgtcctcttcagttaatatctttgagtgaataaaatcaatgacctgtcaatctgcttaaaattcttttatgtctatggaaatattatctaacaatgagctgaaatctacttgatgtaatttgacgtatgaactgccattttgtgcagcccagaaggaattgaagcactttgttctgacttggaagtggagcatactgatgtgaggatattgatgcttgcctggtaacaatattttggagtcatttgataaatctcaattctatatgtttactctttggcttatgtgttaaatcttatttggcttgcatttaccaggaaaatgaaggctgaaaaacagggatactttatcctggtaacattatctcttcattgttatatattttattattagaggtttccatgctttgtattaattcatttcaccttttatgaccaaagaaaaacaaaaatgcaagtgtacatcaattgtagttgtttacattacagttttaaaaagcttaacaatcttttttgtttccttgaaaagtaagtggtatagaaagatctcttcaaaagattatatagtaactggtgtatatcattgtacctgcacactggcactgtatttgtactttgtagcttttagtttcttgtattcgtgggtttttctttacttaatatgctgaatgaattgctcatcttatacctattaggaagagtggcgtagaggcctcaaatcattaagggctgacactgtaaataaattgaaaaaggcacttccagagctagagaaagaggtatattcttagaattttttcctttgagaatactcttgtgatttggtaactcattacactatgtcatggaaagttcactagaattctgattcatctactgtcttattaaataaaaaggtcaagaggccattgagctttgtggatttctattcttatgcattccgttattgtttaacaggtaatgattttactatggcaagtacttcaatcatgcacgcatatatctgattattttaacctagtgttatttttttatttttcagaggagaaacagaagagcatagatatagagagcatttgtgaattgttaaatattgttctaggatctgaatacccttcccaggttgaattgttcattgagtatttgaaggtgagtttgtatcatgtttacttgagtttacaactgtgatggatgtatataaccttttcaatattagctccagaaaaaatcctatttcacccactttactttggagaggatgttttgttcaatatattaattaaagctgttgattacaggataataagtatagaaatgattatttacaatttcttttcttctccatttatgcagattcagaacgattacaaagtcataaacctggatcagtggatgggcttttaccggttttgcaatgaggtatatccaggggagagggcttatgcttctttagttttttaaaaagttgattcataaaattcttacctagccataggttaggtgctatactgcatttgaataagattttggatcaacctatattgatcgcctctataatgttgttgatagcaaatccacccctttaattctagcatgtagcaaatccacccattttttcgagaacaactaataaagctttaagttgcaattgtttacagcttgattaatctcgctgtaaatcaccaagttcaatttttagttccatgtcaggccaaccttccttacacttataaatgatgcacatttagcttagtgtagtttcgatactataaatgaccaagttctagcgattgaagggcgagttttaaagcaagagattgacaaataaactaattttattttagtaggttgatattttctatttcttgtatcatattttcctatgcactcagctttttgcagactcaactatgcacttgatgtaatgatcctccaactttttatgccccttaatgccatgtgtccaacctaattcattactgttgatccacagattagttttccaggccttgataattatgatcctgaactcgcgtggccattgatcttggacaattttgtcgagtggttgcgggagaagcgattctgaagtttaaattttttcggtcgacttggttttgtgctataaaccacaaatactgccatagtatgttctccggaatgcatatgtttcataagtgaaagtgctgcaattttttctcgctatatataagttcttattaatgtcactaagattgataattttcttgcagggctaccaaaaactcacacatcaaattggatccagaaccagaaaccgtttttgtttctcctcatcttttttcaagcataatgtcaaatgctcaaaattgcccacattggaaattgcatttctgttagtaatgtgaaatgagtgcttgagagaaaagtcttgaaacataatctccatttatcttgtaatttgaaatttgatacagtggatactaatcatactactactactactactacnnctactactactactactactgctactactatctaattgattgtttgttgcaagttatttcaagctgattctattattacactcggaacgttgttgtgtattactatatattccaacaatcagacatcatgaatctcttaatatgttccttttcttaatattttagagtccgttagaaattagttttgtaatttcaatctctagatatcagaacaagaccatagagaagaacaatccttacatgtgaagctgattagttgcaattaagtaagtgaaatttgagtttctatgtttaatggtgcaccataattagaaaatcccacataattttccatctaaaaatgacatttttcctattgattccattgttcttgatagagaaccgtccatacacctggatgaagagcaacatcagccgcatgtgtgtccacgccgtggtgatgtgaagtggcagccgccttctcttgggacttttaaaatgaatattgatgccgggttttgtcatcggtgtggtctgttgggtttcggggcggtaataggtaattatggcacaacataaatcttggcaaaaatctcttagggcggagttaattgctatcttggaagctctcaaatggtgtgctaaacaacata

SEQ ID NO: 23750 - DNA, 3880 bp, Cannabis sativa
acccttttcttgttgtgtcaaggattgtgctagcaagagattttgttggttgggaatcttgagaacagactgtacaaattatattctactcagctgagtcttctctccccttcacatattgttgatgaagcatctcagcctgcacctcaatgccatagtcatcatcttttgagttccaattctgatttttctgtggcacagtaggcttggctacccagctgctaaaattgtaaaaatggctttgtcaaaatttaatatagcattgttaaataaaaaattttatgatgtgtgtcactcttgctgtcttagaaaatctctcaaatttcctttttctcactccaatactacttacataaaaccattacagctacttcatccaagatatagggatcttcacccattaattcatccaatggatatagatattacattagctttgtagatgcatattcaagatatacctagctttatcttcttagaacttgagatgaggctttgcctactttcataaaattcaaggctcaagttgagctacaattgggttttaagatcaaaacacttcagttagattgggggggtgagtttatagcctttactaatctccttgagagtttaggcatagtgcataaacttgcttgtccacacacacatgaatagaatggtgttgttaagaggaagcataggcatgttgttgaaattggtttaaccatgcttgcacaagctcatcttcctctcaaatattgggatgactcttttagaatagcagcttatctcattaatagaatgccaacccctatatgctgaggaacacatctcctcttgaggtgttgttcacaactttcctcgactacacaaatctcagagtgtttgggtgcctttgttatccaaatctttggtcatacaacaaaataaactgcagtacaagtctgtacattgcatttttctaggttatagcatagcccataaagggttcaaatatttgtctaaagatcatatgctctatatatttagagatattgtctttgataaaaacacattcccatatgctaacagacaagtgactcaattcagtcacattgaatctcattccaattttgtctcagttgttcgtcctctagggtcattcctcaatgtcaacaatccaccaacacctcccactgtcattccccttgatcctcctactgttttcacccaagtaacacagactactgctcatgatgttgctcctttgagacagacttctactactattgtcatactagcaaccaatgacactttatctattcctgtgtctgtagcaaatccatccatatcagtctctcccaacatcagagattggaatcttatggacatatcagttcaacactccacaatacctattactaacactgtcaacacaaatgtgcctactattactaaccatttacctacagatgcaacagtgtcatctacttccaaaaaacacatgacaacaagactaaaggcttggataaggaaaccaaaggctttgttagctatcaatgaacccaagtctgttaaagcagccttacaagaacctcactggtttgaagcaatgtccatagaaatgtttgttttaaagaaaaataagacctgggtgcttgttcctttactagaaaatcaaaccagtataggttgcaagtggcttatgagaattaaacaaaatgtagatggttcattcaacaaatgcaaagacacattagtggccaaaggctttcaccaacaggttgggtttgatttttctgaagctttcagccctgtggttaagccaataaccatcatgattgtgctcaccatagctgtcactgaaaggctagacaataagacagttagatggcaataatactttccttaatatagacctaaaagaagacatctatatgcaacaaccaccaaggtttattgatcaagatcatccaaactatgtatgcaagctcaacaaggatttatatggtctcaaacaggcacttagggcctggtttgagaaactgtccacagccttggtacaacatggatttcagttttcaaaggccaaccaatctctcttcataagggtaacgtctcacttatgcatctacattcctgtctatgaagatgatatacttattatgggcaatgatgacacccttgtttatccaactcatctctgaactgagttttactttctcactctaagatcttggacttcttgattactttttgggcattcaagtcatcagaactccagctggtgtattacttactcaaataaagtaccttcaagatcttcttaccaaggttgatatgcaaaatgtaaacacacaaaatattcccatgaacacactactacaatttgagcttttagtgacacgcataaaatgtgcgcgtcactaatgagttaggagtaatttttagtgacatgaagaggtagactctaaatattcagtgttagtcacctataatgtgtgtcactaaaaataagaggtgtcactaaaagataaaacctaaaattttcaaattttgattaatttaaaaattactaccatatagtgacacaacaggcgtgactggattaatgtgtcccgacacacctggcgcgtcactatatcataacccaaaatttttattttttatttttattttttaatttttaaaatacagtttacagttttaattttaatatactttatacttttaataaaaaaaataataaaataataaaaagcttgctaatttttatgtatttattaatcaatgttgaaaaaataataataaacaataaagttagcttgcaagtgtccctagaacgaaaccctatttctttagggaaatttgattttctatgtattatattatttacacctaaattaaaatattatacctaagtatactaaaattgcacaaataggtatagttttccctaaaccccaaaatactcctcccacttttctcaaccctctctctctctacttcctttctctctcaaatccaccctaaacccatagtaattccaccgtccacttcccttttcccctacccacaatgtcctcctccgccgcaccgcaccgcaccgcatggtgatcgtctacacccacgacccctacccactgcccctacccatgatgtcctactctgccgcactgcatccactgccgattgacgaggaacaccacaaaaacggaccgaacaccactgaataccactgaatgccaccgaacaccaccaaacaccacgactaagaaaattaaacccatctcgtccaaacaaccaccacacaatgttagcagaggtaagatctcatgtctttggattttttgaattttttaattattaatttgggtttaaaatgcattttattgatatatttaggatttgtgatttagtgtgtgatttaaggtgtgatttaagattgattcatcggggacattgaaggtccaatgtcgggcctaatgtggggtcgatagtcggccttccttttttctaccagtacccgtgggggaaattttttttcaacttgttgaaagatacttggagtaaggacttcgtagaaaagaagatgtatatggataagaagattgaaaagggaacaactcagaaggagtcgtagtactctgtctatggatgtgttgtagcattgcagtattgggcatatgagtccatcctagagcttgctgagaaatttgcgatcagaaaatgagcacagctttcctagaatggtgaactgagagagtaaggaggtgccacttggcaaagaggaagtcatcagattatttgcaagaaacataagttttttaattcattttatttgttcacgtttatttatttatttcattttaatccaagtctaataattttttttttcttatttgcagttgacagtgta

SEQ ID NO: 23751 - DNA, 2621 bp, Cannabis sativa
taacaagtttactgactaatttgcattgtactcaggctacgagtgcaactgggagtaaacatgcccgcacaagcacaacacaagcttcctgccaatgcacaacaagactctgctgaagttgaactcttcgaggtttatgatgttgttctttacatgggcataattgacatattgcaggagtacaatgtaaaaaagaaacttgagcacgcatacaagtcgatgaaattcgatcctttgtcaatttctgtttgtgagccacacatgtatgctaagcggttctctgaattcttggagaaagtttttccagttgttccttgaagctttcttgtttactgcagttttcattcctattctttatttgaactataccgaaagcttcatatcggcaggcaattattacttcaagcaattctttcattaccatttattgtatagctgtacaatcatgtaataagtacattcagtttaattttatgtttttttttttttttttgtatattcaatgctatgtacaagttcatgatcaactcgtttttcagttgatgcataatcttgtctaaaacatgggtaaaagctttttctcacattggcaactactactcagatcttcaaattgaagagttggtaagagcaacaaaatcttgagaaaatcaaatgctaagcaataaaatcttgaaaatcaaatgaacttgtgcaaattggatgttgattaacatgtaaaaataaccgatttaatttaatatacatatttatgtaaatttttaaaaagttatatatacaatcaatattttaatgtaaaaaaatagtgatttaaaaatctaatgaatataatagatcaagtgtatattttattcttattttaaggaaaatataatctaaatcaaaattaaatatttctttatgtatacattttttttttcttttccttttagtttgttatttaatttaatttgtcgttggagatataaaacaacaaaagtttatttttattttgttgttagttatgagaataaaaatcaataaatattaactaattcaatattaaaaagtaaccaatccaatctgtacttttgcggattggattgtatttgagttattatgcagattggattggattcaaaaaataaaattcgcatttagtgcagattggatgcactatgagcaaaatagtgcagattgaattggataaacactcttacatataatctcgttcgttctttcttttgcttcattttaccaaattgaatgagaataatccatctctttcctctcctactgttacccatgtttacgacagggaacacgtgaaatctagatagcaaacatagtgcaaatattcaaagcccaacagtggacccaaataatgtcactagaacgaatccataagtcattagttctttcgagtaaatagcagtcaactcgtccaggtgagtcctcatccaacatggtcaacattaagaagacatataaatgcacagtcgaaacaagcctacaacgtgtattcggaagtcaagtgtagttacccgttttctaccaaatcgcacaagatcaggaattatcttcctagaatcttggacaaagatcatatatagctaaataagaaagtagggttgtaccaccctactaaattaggtgtgttaccgtgattttataatttctgtgcacgcctttgtttatcaaatggtttaatgaaaaacgtgaataattaaaattttcttaaataattgaaactttaaaaataaacataatttatataagttcgggatcccgttaaaatttacataagtttacaaaatacttgcattacaaaaattatcttttatattattactaaaacggtgagcctaaactgtctcgaagaccctgaacgctccaggtctaaccgtcttgatatgttcaatatttaccctagctttagactcatcccagttcgattctaactcttacatgtacatacatgtaataactgtgagtcgacaaactcaataagaaaagcataatcatatcataacataaaccagattataactaggcgcccatacacctaatcataaccctattccatgtcccacgcgtactgagtctagaacgttcgtacgacagtactatcgaccataatatcagcttatacttggtactctagttgtaccgatgtgatagtgtcaatcagtacttatgccaaacatacattcatcgatatcaaatataactctatatatattgataccgctattttaatgtaatctaataggcattcataaatatgcatgctaaacatgtaatcacatatgcatatcattatactaatcttagcttgattccgaatgcaagcatgccggtaactctgagaggaaactgctgctcgatgatttggccctaagtcataattttagtaaaacttctaagtgatccgctaaatcacttttgggaacttaaacttgaaactaaagatttccctatactaaaccctacgccgaaaaaaaccactaaaaatgagatctcgagaaaagtacccaagaaatggtaggttgtttcagagcaaacgacaagccattttttttgggttttttgcctggaaaaacggtaggccgttttaccaaaaacgatctgccatttttata

SEQ ID NO: 23752 - DNA, 3367 bp, Cannabis sativa
ggaaatgcgctctaaccataggcctagcctgtctatacctcggctaacttacagttaaatctatgagtttgagagaacaataattgtccaattatgtatgtaaacttaattataacaataattcaacttagtttacatatcaaccactagcataattgtccattacaacaaccttaccacaatgtatattattcttgttaatgtctgaaagcttcaagcagcaacaagaacacaatcacatatggtttgttgtacacttgactgttcttagactgatatcgattcgtctagggagacttgctctattacagaaaaatcctcaccatgagactactcttttacaactctcgtaaacactcaatcatcagagttaaagtcctctctatttttcattaaaaacctctcagctatggcctatatataggtttcgagtattggcacgacagtttaagctgttatgttagttggttcagctaatgtggctttagttaaaacagttagagaactgtttgagtgttgagtttaaacaacaaacctcaaccagaaagttagataaacaaacaatcaagaaatcaagataaaaaaccagaaaaatatgaaaatgcagataagaaaaaaaagaacacaagaacttttgaggaggttcgaacttcctctacaaaagtagagagcctaatcccccttgaacttcttccgaggaattcttcttcactaatcaatggcaaaatgtgttacaactcggacaattacaagcaatttaaaaaaaactcagcaccctccttgaatcaagtcattaaatcgactgtgatcaaatcttctaaaccagcagagccccttaagaaatctcgttgaagatcatcatcttccctttgattcctctatctctctccctagtatatctaagactctctcacacccttgattacaagtattacaccccttttcattgcttaattaatataatgcttaaacagctatatatatagtagtttacaatgcttaattaaacttaattatgacaataattttaattagtttacatatgaaacactggtataattgtgcattacaacaaccacaatgtatattattcttgttgatgcctggaaacatcaaataaaaacacaaaattaaacacaattacgtccttagattgatgttgattcatctaggaaaatttgctctattacagaaaaattaggtctggtgaatggtgataatgtgttttgtttggttatgtagttcttgtaatgtaagctaagtagtgttctttgttttgtggttcaaaattgatagttatttatgtaattatatcttcttattttaacatttctagtttctgatgatgatgtatctttccctttttgatcagtataacaaatatttggttaatttatttagatgcatagccttcccaaataatacatgagtgtcccacatgatacaagagaaagagttaatcactttataaagctaataagaagagagagatgtgttatgttagtttgagagaacaataattctgcaattatgtatcaagtcagcctcttgtatgtgacgacaaacaatgttactttgagtcttaaaacgagaaaaaactctaccttcgataaatgaccactcttcaaatcttcctaaaaaaattccttggaaatgagaatcttcaaacaacgttgtttatgtaacttcatataaaaaaatttccttggaatgaatagtttatttttatataatttacttctttcacttactttagtaatttgttttataagaagttaaaaggaaaatggaattcttagttacgaaatgggaatcatatttgttccatttgctacaggtttgatttcgatttgttttagagctatatacattttcctttagtttttgttataacaattctactgaggagattaacaatatttatttatagacacaaacaagtcaaatcaaagcaattgtattgacaaaatgttcaaaagaaagtaacaataaatgagaaaatggagaccaagatttatattaaggagagacaattacattaacattaacaatggtgtcatatcagcctcttgtacaaagtttctgagttccatatatatatatacacacaataaaattcaaaaccccaaatctcgcaactgtactgtaatcactctagctagtgtattattcagaatcacacaccacactcaaaataaaagtaagcaaattaagagagcttaagtcatcatatatgtttatttggtggtaattgagtagttgcattcttcaactcaatccaattagtcagcaataagcacacaaatcattcagaaacatcaattccactactcaatctcatctatggttggacttggatcctgcaaaaacacagtaattactaattaatagcttgtgttgtgtatacatatttacataattacatgtaattttactcctaaccaaaagcatgcacacacaaataatagaaaattaagcttctttgaatgcgtcaagaaaacataacagcaatcaaaactaaaacagtttgatcacaaactgtaatgatgacaaatagaatcaaagacaaaaatagaatagaattacaagagaactttaacagcaatgagacctttcttgatgaatgaaatcagtacatgagagaattgaatcaatggagaattattgatctgaaattacacatgaactcacactgggggatcaagatcagacacacttgaaccccttttacaactctcctgccactctgaattttatctctttctctcttagttttctgatctcttaacatgacttgaaatgaagcgaaatgtacaaggtctatttatagtatggggacagttaggaatactaactaacccgattgtagaagctgttaaaacagttattgacacatcagaatggacaaccttaaatggctgaactaacaccagaaatgtagagcaaaacatcacaaaatataaaaaacgaacctttgggccggggccagactgtgaaacaagtacagtacatgagatgcttcttccataaatctgctataaacacacaaagtgttgtacacacaacacaacctaaaacgaacacaaatcgaagactgtttgattcaatgttgaataaagcttttaaacaattaggacagaaaagaagagaaaatagtaacaccttatattttcttcttatcaacaatgatatttgggatgtgagcaataattggccagtcctcccctgtctccctctggagtcgaaggttaggacagccttcaatcgtcaactcctcaagggaggtgaggtgctgaaaggcggcctcatctaagcacttcaagttgaaacaaagactaagtacaatcttctttaaactgatcaaagg

SEQ ID NO: 23753 - DNA, 2619 bp, Cannabis sativa
  modified_base (776)..(791): a, c, t, g, unknown or other
  modified_base (1383)..(1387): a, c, t, g, unknown or other
ttttttttttctaatgttaatcaatttggatagttaagtttgagacacttccaccccacaataacatgctaattaattattttcacatttttctaggctgatagaaacttaaagagaaatgctattggtctagagccatatggattgaaagtttctactaatccatatgtcatttgttgcttttgccatgattttatacaacaattagttttagccaaatatataaggcaatgctaccttttagtttttaggttaagaaaataaaaagaaaaagaaagtacttttctaatagtgtctgaaaaatgtgttaaatttgatgcccattaaaatatgtaatatgtatcaaatttaaaacaataataatgtatattatttagtgtaaaatttacactgaatatgatattttaaaatattatttgaaaaatataacagttttaaatttaccaattttttatagaattagattgattttttttttttaggctaatttgaaattttaccttctgaactttgacatgtaccaaatcatgtccctgaacttttaaggtcgttaaaaatgtcccataaactattgagattgttagatttaaggagttttatctaattttagtaaaaaaaagtctaacatagatgaaagttcaggagacttgatttagtatatatcaaagttcgagaggcatgattttgtagatatcaaagtttggggagtatgttttagtatataaacaatcactgaatagtaaaattgaatgaaattaaacaaaagtccttaaatnnnnnnnnnnnnnnnnttcagggagaatttttaacggtcagaaaagttcatggggcatgatttggtacatgttaaagtttggagggtaaaaatcataattagccttttttattgtgttttttatgttatatttttgttatattttctttcaaataccatatttgattttttttttttattaaataaatctgaaacacaagaaactagtattttttatatagaatctattttgggtagtgggttgttggtcgagttttggagcttctgagaagtttgtaattagttttagttttggtattgtgttagatttgttcaatattccatacagtaaactaaaatacaaaacatgtgaaatttatataaattttggtattcataactgatttctttattaagaaactagttttgattacatgaaaataattggtttcttaattcattgccttaacaaaattatttttaactggttttttcgttagaaaaattaattttgattatataaaagtaaaatttatgtatgaatagtttttaaatttttgacggcattccttcttatttatgatgatttatctcatattattaaagttattttttttatttttttttannnnntttatttttatttttttttaagatcatatttaagcttgcatgtcatatatatatcacaattttttttttttttttttctataaatttgtaaataacccttatttaattatataattgacactaaatccaaattctcattgctttgcttgaatgttaagttccaatatctttgagtaactcaagaaccaacaatttcaaggaaggtttactaagatacaatttcggctatatggtttcaaagagaagacaaaggagatcatttgctaagaattgaaagagagtaagaatgaaaaaagtgatgagaatacgtaaaaatacaatacatgtatgttttgatatgtactacaaaaacacacattttcgtttttgtaggtttgagctacaaaaatggtcattgtttgtttccgtagatgctagggaaacaagcttgggctatgaaaagaaggtaatacttgttttcttaagtattatgaattgttcgtttttatagatttatatttttttactgaagaatgttcttttgattttttttttctttaaactctcattttttaaaaggtaaaatttttattaataaataaatcggacataaaagtacataaaatatcattcattaagcataatcaataaggatggactaattaatctgtttacaaatatgtgttaacattcatctaaaccaaactcatattatttggccgattgtaactatatatacataaataaaaaataaagaatttctaattaataaaaaaccaaataaaaatattaattgtattattgtacatatacgaagctacaattaaattaatcaaaggtgagcaccgataatttgtacacaacaaaatagaagtagattgtaaagtctttaagacactagaatggaaggaattctgataattaagttagtgaaatttgtaacaagtagattgaaaataaaataaaaaaaaacttagctataatcgtcttcagaaggctagagattaaagcgaagattgaatgttgagagaataagagttagagtaaataaaacacatagagtggaggatgtagaagataccaattgtcagatgatccttccttgagaaggatcgatcctttaaatagcattcgctcttcgtagagtaaaactgttatttcttgcaagactaggtcgtggattgacgtggcatttaatttgttgcactttaggttgcagtgctagttgcaataagggtttctatatagaattc

SEQ ID NO: 23754 - DNA, 2283 bp, Cannabis sativa
tttccctttggtttcttgaggtttatcatccactttcaaccataaaccatacgctgcagtgcttctgccttctccatcagcaattttctcagggtgtttagcacaagccctgaagtcatgtcctacaaacccacagctgaaacacataaatggtaatcgatcataacggaatggcaaccaaacccgacccccatagctcggaaaaaggaaccccggacaaagaggtttatcgattgagatccaaactttgaaccagaaaaatccgttcaaggtaattttctgtgcatcttctttttgaatttcgattacctctcccgccattgctgttagccataacatattattccgggtgattaattttgtgggaagattcaaaactctccctgtcaaggggaagcgtttcaattcctcctcccattttgatggcatctttgtgaatcgttgaaggattaggactccattgtttaacatccatggtgatttattcacaattcgtttcaaatcttcttcattcttgaaggagaaaatcatgaacgatgcctcagtagttactttctttatcttgactccccaatccacttcggccaatctccagactctacccaatattgtccgaataagagttcgattcatggttttgttcgagcaaaatctgcccaggagacaagattttcccacttctgcttcacttccttcattgacttcccacacagcttcatcgtctactcgcaggtttcccgtccgatcaagaagatcgtctatagtcagatctggctgttgaggcattcctccagggaaaggctcttctccaagagagagcaaaggttcttcttcagtctaagtcttctttctctccggtgattttttttttcccactttgagtttccaaggtaaaaaatttggtgtctcatttctttatttgtgtattttatttaattgtggtgttttagttgatattttgatattacttattttagtgtttgataaatatcgactatatagcattttcgaacaacagagtttatatgtatctttaactgccctcatggatggtagttagccttatattacaagcgacctaacacaaaagttgaccacaacaaaagcgttgacttattgagtaatatatattgcttttatgctttactgatcttccattcctttccacgttatatacatataacatttaacaagtaattaatttacattattaattattatgtattaacaactagtttattattattaataattaggttccatccattaacatttcacaaaactacactcttctttcttcttcttcttcttattctttccaatggagcaaagattacttgagatcaacgttatatccgccagagatctcaacgatgtaaacatcatgaccaagatggacgtctacgtcgtcgtttcactctccggcgactctcaacaaaccaaaaccaacgtacaccgtggctccggcacaaaccccacctggaacttccccgtcaaattcaccatcaacgactcccaacacagaaatctagttttcaccctcttctgcgacagagccctcggcgataaagaaatcggccaagtgaacgtcccggtcaaagagcttctcgactctgctgccacgtcatcatccacacagttcgtgagttaccaggttagaaaaccctccggcaaacccaaaggcgaactccatttctcctataagctcagcccaccacaacaactcacagagaaacccgttaagttttatcctacggtggaggtgggccccacggccatggtggccactccaccctggccagttgttgggggttatattccggtgcaaccgggtgtagggtacggacaaggtgggtcctatcactactaccctccgccacctggctcaccaccacctcctcatcatcataatatatatcctcctacaccgcacggttatgggtcgtacccgcctccgccgccacctggatatggatacccgaatggaccgggttatgggtacccgccacatcagcaaggtgtgggattttgattggagatggggctggatttgatttttaatgtaatttaatttattattaatattaatattaatgttttttttttctttattaagagcttggaaaaagttaattaagtaattaatatgaaagataaatattctgacttttttgttttcttattaatttggatgtattaatcaataataaatatgtaagcaactgtgacatgacatcatatgaaatttggtttggacaattgaaaatgaagagtccaaaatat

SEQ ID NO: 23755 - DNA, 2584 bp, Cannabis sativa
aaaaaaaaaaaaaaaactagtgatcatttaaaatatatcacgtgttagacaccttgataccttgtaataatattctttgcttatgtttatgagaaaatgttgaactaatactaatacacaacaaccctttccctttaattttaattttaattttaattaaaaaaaaaaaaacaataataaataaaaaatgtgagaaaaaacaaaatgattaagttgtaatggaaaacgcacttgtagattttgaaggaaaaaaagtcgaggagaattttacattattataagtaggaaaatgtgtatacaatttacatgaattgttgtgatgaatgaggccaaaagaataagagcaatagagaaataacaatggaattgagatgctattattattaataataaatcttagtcatttgtcaatcttatcatatcatataatagagcaaaaattaaaatatcatttcataggttttggttattgttagatatattgaattagattagatgataatgttgataatctctatcttagtcaagtcaaccaaatgtacaaagttgttgggtgcaaacttgatgaaagaaaggccccacttgagttaatttcattgaaaattgtagggaagattcttcattgacaccatatcataccatccttatattgatttttcaagaagggtaatataggaataagaaaaaatgtgaccaaattacacttttttcataatatcatcaagttccatatttactctcatactattttagtcgattatcttcttattttcactcatttattttcacttgtctgtttaaccaattacaaaccaaacaactctagaataacaacctatctcctcacatgacacactctcatcaatttgatcatgcaccgcctttaacagagggcgagtgaacttcatataatgttgaccgaaactgcagcaagcttcaaccacccggggcagggcaacaaaaatttatacacttgtcgtttcacttggttttgttattagttaccagcctcatttccccaaacattgtcccaagcaacgggtgcagaagaagccttaggtccctcgatgaagttctggttctggttttggtgtccgggtggtccaggtagtggaagtgggcgtccatcgggacctagttggtgaaccttccttgactttgttttgatccctagaatcctaaatacaaatctggcaagctctccatacaacacgccagaccgctcaaaaagctgcaatgaaattcgagtaaagtaatcacagaatgaaaatagcaacaaccgaaaaaatcttagtctaatagatagagaagagtttagcatcaacctgaagaaaagcagtcatgaacaaatgaaaagcttgtgtattctggtcaatgagaattgatatgcgaccgaaaaagtttactacaccatgcatctgtatgtagtaacaagaaaggccaagtataagtagcaaaacaataaagacaagttttttattgctaagagatgcttaaatgagatgattatgtaatgtgcattaagccatttaatacttaccacccttagtactgacatccaaaatcccggaggagatggaggagcaccatatggatcatttggatcttgagctccataaggaccacccatgcccattccatagccacccatttgtcctcccataccgataccaccattgtacatcccgcccccatataatcccgaagatccataaagtccccctccataccctcctcctctatacatgctattgccatacattcccccagctccaccatatgtgccaccatacattcctccagctccaccatacgagttaccgtacattcctcccgctccaccatacgagctcccatacattcctccaactccattcattgtagaaccataacctgtaaaatgtcgaaaaaagaatccatatcaaacagagcaaaaaggaaaaaaaaacacctaatcttgctatgaaagcccaaattatacctccgtatgtattgctagtcccgtagttttgctcccaaggtcttgtgggaacaggcctagaaagtgtgtttctgttaagagtgttagtcctatcagaagtcgaaacaatttctccaggtcttgcagttcccgaagcctcgactacatcgcttgtgcttcccggtgatggaggcttgaatggtgcagggccagacgatgaacctgcccgttcccaaggttttgggggaggattactagctgcaaaaagcataacacacctcaaatttcctttctctgaatttcaaattctctaaataaaagaaaaaatgttttaagttgtcataataacaaacttcaagcaaagcaacatattgttatttatcagtcaatgaaaataatcaactcgaataatagcatcttagtactcctttcataagtgaaaattctctaaatgaaggaacaaacaatccaaacaaaattcaaccaacaacttacaagttataactcaaataatggaaacaataaactcaattctttttacatgattatgatttagtgtctaatgcaagatacaccaaaccatcttctataaataaagttgaagatgaagaatgttctaaataa

SEQ ID NO: 23756 - DNA, 2838 bp, Cannabis sativa
acagaagattcttcttacaaaacccaaatccaatctctctcttttctctgcacctctctctacctctcaatcttgtctctctcaaactctcagtctactctgatttgagtacaaaatctcgtctctcaagtcgtctccaaaatgttgagtcaaagtggtatttataggcttaggatcaagatcctaaagtcggtggcatcaagaaataaggtcgttaagttagttagaaataactaactttaaccaactccttatttagcgaagtctccatgttagcataagcactagggcctccaagaacataaatgagcttccgggctcgaggatcacggaccttagctgaagatgcttccagataagatataagtctactgaagtcgactattcaaaactatcaatccaggagggataactagtcaactagaattcctttctagggaagaactagctatcctgaagactggacccggagtggacatgatactcattcgagaacttccttccggactcgactatcattccacaagacaccttccacttctaggatcgataattgagtgaatagcttcccagaagtgacgattgcagagaccttttcatttggaagaactataccacaataagtctatgtaattttgtaaaaaaaattaaaaaattgagagaactaagaaaaaaaataatagaaatatttagagtgattatagacctccgcgtcaccacctcatatcttaactttatataaatatatattatgagcattgtttttggacaccagtagtgtctagcaccttctataggtgacacctcactattgattagcgatattttttaaaaattattttcttaagttaattatatcaataataatgtaataccgaagatagtgctaagcaccaataatattttttaacaattctctatttttaaatgctacctacccttatggtggtgactatatctatatgattcattaattatatattgtatttttggtttcgaaagggtcttggaatcagtaatattgaaaactagcttttattgtttataaatgtaaaaaaaaatgttagttagtcatagagttgtgaagatctacagcctgtatagctagatggaactagttgcataatgcagtaaatggatgctcctctatacatgggaatatagtttgaaatcatcagcatgcatatgcttcttagttacaattttacaaatttcaagaaatacagtctaactgattccttttctattctttcttttttatataaatatatatgtctttggatttatccctacttttgacgatttttgtcaaggttaacaatagtatgccaatttgcaatcccccttggccacttgttttggtgaattttttaattttcaatctttttggcacacagaaacgggccattcgtatcgtatatacgcaaaggttcaagtctatcatctaattaatattcctgtgcatttttaaaataatattattaattaataataaatattccaagtggaccaggtcagtggtacgatatagattgattattattccaatgacaataattattactttagaacaacaaaaaaacacaagcccaaaatacattattatatagtttatgatttaccctatatactactcttccatttacaagcaaaatttgtttgagcttcctttttagtttatgataaaaaaaataataataaaaaaaactttcttgctctttatcaacattattaatttcattgctaatctacgtcaaataaacgatgcatatcaaatctacatgcacacacatatatatatatataataaaaaaaaaaaataagagcattaaaaaaatgaaaaggaaaatagagttatagtacgactttactatatcacttgtgaattggaatttctacgcattaatttagctctctttttttaagtatcttaggattaattttattatatagatatgcatgttgacataatgtattacattaacaatatcttacatgttaattagaataatatgtattaattaagatcatgtatttataaagcatgtgaatttatatgttgaccgaaagcttttatatacatttaaataaatatctatatttgtcattgtgatgaatgacacgttcgaaaaatgttaaaagcggttcattaattatacacttcttttttgtggacctatgtataaattcccatctatgatggacaaatatgcacatatatgtaatgaaaggaaatataaagataattgctagttttacgtgcaatcaaatctcttttccacttatatatatatatagattattatatatgtacgttaactagatatccactatatatgtattaaaaactagccaaacttacataaagcaaaatatacttaatatataaaggattttcttctccaaaagttaattacaatattaatattccatatacttacataattagagcaataatagagtgtcaactaaatggtgtaaaactatatttacttattcaataatgtgctaaaacaataaaactagtgcaaaatttgatgtaattattttatttaattttttattttatttataatattatcatttagtattaattaatatttttaattaatatattttttaattataatattatcattattttttgaaaaatatatttaatttattaattattattgttaataattactttttattacaatttacatcttaatttattatatattatacaattacaaaaaatgtctcaaatgcatggtttaaaaatatgctaaatttgacaaggaaaaaaaataagtaaatgttatacttaaaacgcacttttttatcatcagtttg

SEQ ID NO: 23757 - DNA, 1975 bp, Cannabis sativa
tccttaggctcattttgttaggttgaaaggtttgatctttgtacttgtcagaagatctctccactcgtgacatctttgtttttataaatttaaaataaattattgtataatctttaaatatatatatatatatttatatatataatatatatgagacttataatagctaaatgcacaccttcatgtagaattgggtagtatactctcactttcaattcgtaattctttacaattttgccaaaaccattctctgcccaattctcacccaggagttctgcactatcctttctgaatcttgtcaattccaattagcctaacaccttccccaactaatagcattgcatgaacaaaatcttcatcttcatctccttccagttcataatttggtctgtagatgttattagcatctaatttacgtatacctttgtcgtagtgagcagtgatgaccatcggcccttgtttgagtatttcgcttattttgtcattgtcatctcttatgagtccccaattttccactgtgtacaaattttgaaactgaatttataggtaagtttttgttttaaaaattattaataataataattaaataaaagattgaacattatcacctaggtatcttagctttgtcgaaatgaggataacctttgaaggggtaacattctgcaagtgtaatctcgctgtcccttatgaaatccattgcccaggaatcttgaaaacttccgttaaccttatggttgatgtaagaaacatcaattagatgttgcggggagagcgtcacacttgtcccgcgcagtgctttacgtgatgcaactgcatctgcagatgaaatggtctagcaacactctgtataaaattaaaacaaaacataatatttgtcgagctgtctaagagtgaattttaacttgatatatttgcataataacctatatatataggtatctcccaaagcttgtggacacacacaaggtaggaaagtggtgtcaagagagtggatgaggttagaagcagctgtggatgcaaggaaagagagtggatctgacaatgtgattgtggccaggagtgactctcatcaaactgattctatgcaagaatcattatggtgagcaaaagcattgacttgtgtaaagttgctcttcatgttcctaaactgatatatatatatatatttatacacaaatatgtcttgaggccaaattaatgagttttttcttttttgttaggtgatcaagtaatagattatgtcatttattttgcttgaaggacggaaaagacgcccatactaagttcagctgaacttgagattattggatattatccactttccttgcttggggtgtctatccgaggtacttatttaaattctattgaaagtgaaaaactaataatttttaaccagaaagaaattataatgtatagaatttttctacttcgcatatactatatcagtatatattaagactttgtgtactttttctataacaaaatatctatatatatatttgagtgacaatctatcttttccctgttttgacaatatcagtatacactaaaacctgtctaggagtgttgattattctagttacagatgatgatagtctatactatatggacacaattgtagcacaagctttggagaggggttatgcctaataaaaaatctgtgatgcaaattgcaaagagtttacaataaaatcgtgtgtattgagtagtctatattttgttttatgtaatttatgcttattgtgaatatgatgcaagtttagtaagaataaaattaattttctaaaagtactacatagtttttttgtttggacatgcatttaatttattagtttgttttgaaagatatctaactataaattaaggcatagattgagccaaaattacaaaaaaagtatgattattatgattatataccacacctttattacagcaaaaactaaataccaaaaaaataaaaaaataaaataaaaca

SEQ ID NO: 23758 - DNA, 1659 bp, Cannabis sativa
  modified_base (1306)..(1306): a, c, t, g, unknown or other
taattgatccaatccgcacttttgaatttgagctactgtgcggattggattggatccaaaatatgaaatctgcacttagtgcggatcggatgcactatgaataaaatagtacggatcagattggatgtacacccctaatgttttcctcaatcacttattttaacttcttaatcaactttcacactcaaaaaaattgtgaataagttatagctagaatgaaaatggcatgaggtgacaatttcctctctgatgatgaaaaagaaatccaatcggtagtcaatttgtttgcaacattctgatcaaatatccgacttgctaggaatggaaggcaatgaagattggacatgtgtatttgacgatataatggatgatagtcttcctttgcaacatgagaagattgagagcagaaaatttgagaaagatcttccaaatctgtctaacttctctaacctaatttcaggaaggaaggaagatgtaaatctacgagaacatgcctcacagcacgggagaagttaaagctaaatgtaaagaccgcttaactttaatttaagaattagtagataaataaggtttacttatgaaacttgcatattagttatgaattatcattttacggagatttatttgaattcagaatacattttatatgtcatatatgaaatttcatatttttgcatgttttgtgcccgccaatattgaaacgcgggcgtttggctattagaatcacatcttagtatttttttaatatagtggggcaatatagttagacattgaaaatgtcgggaatagttgagattttagaattgaccaaattacccctaagtgattttatgactttttggctaaattaggggcaaaatagtcttttcgagttttgtactttagtgattttaatttaattattaatcttatttttattttattaggctggtgttattttaaataaaaccattttatttatttattttacaaaatcaaaaattagaaaaaaagaaaaaagaaaactctctctctccaagctatctctctttcgaaccccgtagaacccaagtagggtttggagttttgctgctcaacctaggaaattctcagcaagttcttagtgatctcaagtcaaggtaaggttcctagcatctctttctttgattttaaaagctttaagttgagaattatggatgatttcggtattagggttctgtagttgctgttggtgtttgaaattgttttctgcagttaaattaagattattcatgttgttttgaggtagatttaagagttgtagtgttgtttgagcaagctttgagtnttagaactcaagcttggctctttaaaggtgaattttgattttgagcatgttatgttgttctgttgcttgggttatgtttattggggtatattaagcaggtctagaaggtttggtaaggtttggattcaaatcggttgaggtttcgaattgtttgggttacctggtgtaaaaccgattgaccggttttataggccctgtaaaaccgattaaccggatcagcagctgggttcccgaactttttgtgttgtcgatttgtgttagttcagggctctagttggttaatttcttgaaagtttagggtattgccatgttaacttcagtaggaaaacttttggttttaaacctaagtcccc

SEQ ID NO: 23759 - DNA, 3935 bp, Cannabis sativa
ttcctcgccaatgaatttattattgaagctttctacccgccctaggtatcctattctatcttggtgtccaaaccaaaatccaagtgtcaagtgatcatagatttcactgacctaaataagacttgtccaaaggactctttccgacttcaaaggatcgaccagctagtcgacgctatagcaggtcatgagatcctaagcttcatggacacttattcaggatacaatcaaatcaaaatacatccaccaaactaagaacatacgagcttcttgaatggtgtaggcatgtacaactataaaatcatacccttttgactaaaaaatgcaggggctacttttcaaagacttgtaatattaaatgacctaatcgatcgaaacatcgaagtctttatggattacatgcttgtgaagtccaaaaaggttgggggtacatagaggatataagtgaatgctttcagatcctctgagggtacaactcaaatctcaatcccctcaagtgtccttttggagtatgctcaggcaagttccttggcttcatagtgaatccctgggaataaaagcaaacccagagaagatcaaagaccatttggacagaagtcgcccagagtgataaaagaattgtcaagctttcttggtcgcatagcagcactaagtagattcatgtcaaagtctatagacaagtgtgtccctttcttcaacatacacagaggaataaaaaatttgaatggatagaggagtgtgaaggtgcctcccaagagctaaagaaacaactagctcaacctcctatcctatgaaaggctctagacaatgaagaatcgggcatataactggaagtcacacagttttctataagtgcaactctcatcagagaagaaaatggcatcttggatctagtatattatgtcaacaaaagacttattgacgctgaaattcaatacccactcattgaaaagctaacatacttctagctcctagctatcagaaagctaagaccatacttccaagcttatcaaataagagtgtacactgaccaacccttctgccagtttctttaggatcctgaagcatatggatggttattaaaatgggaaatagagcttagccaatataaaatcacctaccaaccatgagtggtgaaagaaggccatgctttggctgacttcgttgctgaatgtataggcaaatctcttgaaatatctcaagatttaggagaaaagaaagagcaagagcaagagaagaagtgagagaaataaaattcaaccttgaagctgcatgttgatgaaagctgtacggactgcctgtctggtgcaggcattaccctcattacacttgggggacaacaactgcatggggcaataaagttcattttcaaagcctccaataataatgcttagctgcttgactaaagctttcacatgaattgcgagcatactacctgtacatatatagtgactctcaactggtcttcaaccatgtccttggtgagtacactgcccaaggagaaagaatgattgcctacttgagaaagattaaaggcttgttatgtcaactcaaatggtacaccatttggcaagtccccagagaagataacacaatagcctatgcacatgccagactagccaacaacaccttgacaggcatgaccaatttggtgcccatttagttcttgaaagacccaaacattactaattctgaagaaatagacatgcttgatgacaatcctacatggatgacaccatagcagcatacctacaattaggagtcctaccagtggacaagaaggaggcaagaaaaatgagaaggaaaggtcccttgtacctcatcttggatggggttatgtacagacgtggctatgtgccaccaagtaagagcatgaacggctattaattaaagtgtatgaaggtttcgatggaaatcacactgaaaggcaaaaattttccaaaaagatactcaaacaagggtaattttggcctaccatgattgaggatttagtggactatgtcaagaatgtgacacgtgccgaagattctcaaagatcctgtccaccaaacgagctcacacaatgcattgtctttgaccttttctatatggttgattgacttgatcggacaacttcctaaaggaaaatgaggagtataatatgttgtagttgcagtggactatttgactaagtggacagaagctgaaccattggcaaatataacttcaaagaaagtcctcaacttttttgtcaagaacatcatatgtcgctttggactctatcaaatgattgcatcaaacaatgggaaacaatgcgacagcgacatgttcactgacttctatattagacaaaacatcattaaaacactatccccagttgcacaccctcaagcaaataggcaggtacatgttgtaaataagaccctaaaggacacaatgaaaaagtgtctaaaagaggcaaaaggcagttggcccgacctcctcccagatgtactttagtcacacaggactaccaagaagacaaccaccagatggacaccctttgcattagcctatggccatgaagcaatgttgcccgttgaatttgaaccaccatctcacatgaagataacctacgaaaaagtaataaaccacaccttgttggcaaatcctttgatgaaatagaagaaagaagagactaggcaaacttaaaggtacatgactaccagcatatagttttttggtacttcaataagctagtcaaggagaggaaattctttgtatgagacttacttctatgaagaagattcttgaatgctaaagattctgcaacaggagtgtttggatctaattgggaaggacagtaccaagtgacgggaattacatgtaaaagtgctcacaaacttggctggtacaaagagaagaaggaatttgttctcctaccaagatattggaatggataacatctctgaaagtactaccaatatcccacttatataaaacactactctttcatagtgattcctgtaactattcaccgtgcaagaatttagaaaatagctatatgaccaccactctttagtggtggcctttccatggtatgccttgaagggtagccaaaacatggtttttaaaaaaaaaattatatttttaagcttttattacacaaaaaaaaaaatgtacgtttcacagcaacaaagcatatgcatgaccaattaatgaataaaagatttttcttcagttcaacttgtgtcaaataacttgctaatgaattagctttttaatgttaactcatatttttagttcaacatgcatgtaaaacggtcctcccaaaaaaatgcagaggcaaaggatgtaacgtcctaatgctaaggcacgctacagtgcattttcaattacagtgcaatctttgctaatcaaagaattttcttggaaaaaaacgtgtcaaattaaaacttttatatgaaatcttaaactttatattatatcaaaatattaacaagtgtcagctttatcctttcctttacctacacatggaagcagaactgtgagtcaacagacacagtaagaaaagcgtataacatatcatataatttccgacttgtatttaggctcccatacacctatttacaaggctcgacatatgagtaagaactttttatactagggtatagccactatacgacatacattacatacctcactgtacgagtgttggtagggtttatttcataccctgagtacaactgagtgatgtaccacacacactcagtaccttccactacttgtgctggtatcactgtactgtactcctaaccaatattcactataccgatgcactctgtaccatactgtacaagggttggtagtgcaaataacacttcaagcatgcatatacacataacatatacatacactcagatattgatatcacacattatatttagttcttaccttctttctagattcaagtgtgctgg

SEQ ID NO: 23760 - DNA, 3925 bp, Cannabis sativa
gctccacctcaagttgtaaaatgcatgggttagtgtcttttgctgagactgtttcaatttgattatttgtcactttcatgcccatctcagcttccctaaacacaacatccctgcttatgatacacttcttaaaaccaggttcaagacaccacaatttttaccccttgataacatcaggataatctaggaacaacacttaatggctctaggttggagcttatcttgtctgatgtgagcataggttgtgcatccaaatactttgagatgttcatacttaggaaattgaccagtccacatttcttgaggggttttaaagtttatggctgttgaggggcatctgttaatgagatagcaggctgttttgagtgcttctccctaaaactttctctccaaactagcactatttagcatgcatcttactctttcaagaagagttttattcatcctttcagctaatctattttgctgtggatttttaacaactctgttgtgccttctaattccctcctttatgcagtaacttttgaactcatttgaataaaattcaagaccattattttttctcaacactttgatgcagcatcctgtttgttattctatcatgattctccaattgacaaaggtttgaaaggctatattcttatttcagcaaaaatacccagacttttcttgagtaatcatctatgatgcttaagaaatagttagcacctccaagtgtttgaatcttggagggacccataagattagagtggatataacccaacttctctgtaattgtatgcataccctttagaaatttcactttgcaactttttcccagcacacaggattcacaaaattctaatttatccttgagaccacatttgaatactccttgtttatcaagttttgttagacctcttttacttacatgacctagcctaagatgccacatcttaatgctactttcaaattaaagacttgtctattactagtgcagcagattcaatgacagtgtgaccatcaagatagtatatgccatttctacgctttcccttaataataacaagtgatcctcgagtaactttaagggctccatcatctatcttgtcagtatagccatttttatcaaaaacaccaattgaaagcaagtttctttttagttcaggtacataccttacttgttgtaagattctgatttcaccatcatgcattttcatctggacagaaccaattccttcaattttacatgacttgttgttacctaacaggaaacttccaccttgctcttctgccattacactaaaaaatttcttatttggtgtcatgtgaaaagagcaaccagaatccaagatccattcttcaccagaattcatacttgaggcgataagaatatctacttattcatatccatcagcagctagatcagcttctccctaatacttatctttcttgtcttgttctcttttcaacttggctttgagagcaagacaatcatctctaaaatgcccttctttcttgcagtaatatcattgtttccctgttgagtttcttgaaccagacccggctttatgtccccaatttccatgatgattcttgcttcccttgtaatctcttttcatacttctgcctcttgtaaacaggccttcaccacttgattcaatcttgtcatctcccttcctttgaatctcctttgatcttaatgctgccttgacttttgccatggtaagtgagtcttttccatacaaaatagtatcaacaaaatgttcataggcctttggcagagagctcaatagaatgatagcttgatcctcatcatcgattttgatctcaatgttgcatagatccaagataatcttgttgtagtcatcaagatgtcttctcaattctttggactcatccattctcaaagtgtaaagtttcttcttgagctataatttgttggtcagtgacttcttcatgtaaatctcagagagtttattccataaccccaatgctttctcctcgctcgaaacttccctcaatacttcatctcccaagcttagcaagattgcattgtgtgctttggtttcgattccattcttctttttcttgtcatcaatggctgctatgtatccaatgcatctgaaactccttgatgaactaacaaaaccttcattttaattctccacaggccaaaatcattagcaccattaaacttgtcaatctcgaacttagagctggacattcttgatcttcttgctgagtttcttgaagaatagtttcgattcttgaattgctgagagaaacctcggctctgatacaaatttgtggagtctcaaactccaaacaagaaccaacacaacaccaaaaacataacacaatgatcaagaacaataaccgaacataaaaccagcagcaataacaactaatgaaagcataaaataaacaccaataacttacatggttgggctacacaatcaagataatcatgagcttaattcacgggagaaagcaaccttaaattgtctaaggagatgaactttattatgtctgaacaaaggttacaaaaccaaaactcttcactcaatggaatcttgctccttacatatagttatttagcgtgtaaaaaactcaaacatgaacatcgcataattattaaacatgtcataattttttttggttgtcttaaatattgtgtcatgacccatattagtagccctaaattaaaataacatatataattacaaaaaaaaataagagtaattaatcctacttctaaaataacatatatttgtttttccaaacaaattatcataattttcagtacgtctaaaatttgacatcatttttaacagcaccataagttttatttttttagtttctcatttttgaaaaggagatgtatttcaccaaattgctctagctataatagagacgacagttttaataagatacgtctcccacctcaagagtaacgaaaaccacaagaaattatcactactatggtacacacgtttttttaattaaccatattctttcaaaaatttgtgactaatgacataaccccacccaattataatgaaaaatattttctatcaccttatcatcatccgttagtgtaaatatgtaaatatattaatatttatgtttggatatgtatatgtatattaataagaaataaatatgtctagcaaaggacagacattccagtccactcattgaagtggtgatgtgatgaaatataaatagaatgaaaaatatccttattaatatggaaaaaatgcattgagaagaagcacttagttttgtcttcttcttaagaatagaggactaagattgctatattaacctcactactattacattacatatttacattatattaattattttctatattatttaaatattatatctttacttatactctatttttttcttacatgaaattgcaacttcattaaattagcattttgaatacaaaatagtttgaagatcagaaggaatagaagtccctagaatgctacggccagataaagactaatcgtgcctagcaacaaagtgggcaacttgatttgctgatcgtctaacaaaacgtaaactaacattggaaaaagagaataataattttctacaatcattaacaactagacgaaataccgaagtcattggatgagaatgaattgcttgaactgctaacatactatcgctctctatcataacgcctttccagttgtttgttctaatccaactaagtgcttctttgatgcccattgcttctattatttcagctggaaaatagcctccatgatacatggcttgaatgtggagtggagaagcatgatgatcacgggcttaaaaccaaagcataggaattttcctgctcaaatacagcggcatcaacattaatcttgatggtttatatctttggtttaacccaaagctcattttgatcacctatatt

SEQ ID NO: 23761 - DNA, 1185 bp, Cannabis sativa
ctcatccttgtattgatctaccaactccctaatctcagccagaatctgatttaatacggtccaaaacacactctaattaaattaacaaacttacgtgtatgattaattatacttaatttattaaaacagttaatcatcaaatattgcaggtactaaataaatagaacaattgataagtttcattagccaacaacaaaattagaaaaaactagttcagatgcaaaaaaaaaatattaattaatttttcttatcatagaaatacgtacgtacaagcacgagaatctgatagaattaaagtatagatacttgcccaaaaaaaagtacgtatgtatcctaaatattttaatgcgataagttttttttttaaaaaaaaaacattacatcattggataaaaatttgaaaaaaattacaaaaatacctcaacataaaatttgttttacttttactctttaaatttttttatttataaaaatactttagtaaaaataataaactatttttcttcgttgttttataatttatttataattagattttagttgtcatgaggtttttttttttgttatttatgttgttttatagtttatttatagttgatttatagatgttgttcatttatcgttattttttaggttttttttttttttttgttgaacaaagtatatttttataattttaaaagtttacaaatctaattttgtaattaaaattttaggctataaaattataaataaaacataaaagaaaggtatatttaaaaattttcttttttatataagttattccaaattatatgattatttaagtactaaatttataacaaaattatatgagagatcagactagttataaggtatatgactgataatatacctgatctctgcaactgttgggattgtaggttgaaccaggttcacaagaagtgtaatacaagtaaatatctttaagcaccataggattattctcatttccaagtatctgtgaagcagaaacaaaaatatgttcgaaatccgcctcaatctttgggaataatcctctaaacgacaccaaaatatcccttctccccaacacctcctttccttcatcagtcgccaccgccacaaacccgaaccactttgattttcccgccacccagttgggagagaccagcgtgtcacccttgaatgcagtggaggagtagaagt

SEQ ID NO: 23762 - DNA, 2057 bp, Cannabis sativa
  modified_base (1549)..(1549): a, c, t, g, unknown or other
caaaaataaataaaataaaaatgtaaactttgaacccaaaacaacaaaaccaaccattagataccgaaaccaaaaccagttaacaaacagtatttctaacaccctttaaatattaacttatcaaatgaaagttctcaataattagaaaaaataaaaaatttacataacagaacctaagtctaaatttactagtaactaacaagaaagaaaagagtctaaacttattaagagagagctaaaatccacacattataattcaatacaaaagaatctcatcttcatgttcatcactcgttcatatccttatcaagctttggcttgaaatgtaaaaattaaaaccataataacaaagctacaactttttttccttccctttctgcttcaattaaaagaaattttaatgctaaaactatcataacataaaaatagaatgtctttaattttagaagaatacatcaagacaaacaaaaattcaaagcagtataaaaagactttgaaatatgctcataatgatcaaaagaactgtaactaaagtaaaaaagaattgtaaatgataaactattcttggaaatcaaagaaatgaaaaagcgtactaaaattaaaaatgaaaacaaattacatagaaagcaaaatcaaaatacatttcaatgaaaaaaattctaatcaatatagagagacgattggcacaaacgataatcgaacaaaaaaacaactacgagattcaaatcaataacggttcgcatcaacaattacagttaaacccaccaccacctttcccatcgaatcccctctcaaacttcactgcttgtgattaatcacaccatcgaatggcgtcgttgtgaccctccaatcaatcttgtcaaacgctatcgtttcaccatagatgatgctcatcgtcttaacctttctctggttctcgttcaaaggttagagggattgtattagcgatacaatacctcttctaccaaaaaaaaaaaaaaatagaaatatgggctttctgtttttcttttgcaaatatatgaaaatggcattcccataaaaaagttcaaaaagcaaaaaatgccataaaatgtggcctaataaaaaacaaccatatttttcaatttttttttttgaaatcccatatttgatgtaatttgctcaaaaagaaaaataaattagaaatatatatatctattctactagacttattgtgtaacgccctgaccctcagggacgccatgtatgtgcttttacaaacttatttcttcctaatctattagtttaggaaaagtgtggtttaaattaaaacacttaatagtttcaaattagaatacaaacttccaaaagtaccactataatgtgggggatcccctatttataaattttgttataacaaattacaaaaccactaatacacaagtaaggttatattttcaaacatagaaaaaagggtcgatcctgcttcccgaaagccaagacaccacgactgatatgtacattgctgggagacctctgattcccgaacatagctttaactttcttacctgcaccacgaagcacccgtgantcacaatgactcagcaagaaaagatattaaatcaaaagcattgtaaacgcagatattcacatctcaatataacttatatatatttgtgactcacgcatatccatcatgcatatctatatagttttaacatttatataatcacatgcatattacgcaatataggaaaaccacaacatcttagtcaacatcttcatcattaccctaaatgaatatttaatcaacacataaccatatattctcagtgcttcgcaaagcactccaatttttacgttcctatgaacaattactcttactttccatgagtcactgaggctctgcaaggaaagtgactaatttcataagcaatataacattcattcagtcacattataacaaagcttattcaattacaactcatcacattataacatgtttgatctatttcacatcatcataaccacacaatcccggtacttcataaagtacctttaccactcgttaaccacgagctacatatgtcactatcgtt

SEQ ID NO: 23763 - DNA, 3184 bp, Cannabis sativa
tctgttgaaacttagagcttccaaaatagattgtattggtgatgaatttacttgattattgttaggctaatatgcttgaaggagggggcaaaacaccgatacttaatcttcttgaactcggagatattggatatagaattgtggcctatccactttccttacttggggtatccatgcaagcaatgcaggttaagcatcgacatctcttatattcaaagattgcatacttggtgagctagaaaaataaagagaacaatattatctatacgtggtccaatttttggatagtgatcttgacatcttgtaaccaataatttaatgaagcattaataattaaaaaactcgggtaattctggatgaaatgtaaatctgacatctgtagaggaatattttacatattgtacttcaatgggaacatttgaagaaggcaagctaatttagtttgccttgactacctacatttcttaacaaaaattacatgccccccaatccatttcacctgattacgaaataccacattgcctcattttttgttattaacaataactgttttttgtatttaactattaatacaagtggattgatgtgacacttattaattggagggactgggatcatgaaatatgaaagcagaatatttttattccagtactttgtggggggaaagaaatttaacgatttatggatccatatgctcaaattttaaatattgcagattaaacatttgtggcttgacatttatttgcttccctaccgagaaaataataagcctactggctacttcttctagtatatgatttcagttgatttcaattatgactctaactgcaggatgcacttactgctattagaggtggtcgtattccttctcctggaagtatgccatcatttgaagagatgaaggaaatcttaggtttcaacatctattacgaagaagaaaagcggtatgctaccaggcctaggcccagcacgagccagctatattcacggagaggtaagaaatacttcttagtcaagtacttttgtttacaattgttagtcaaagttgatttgccctcggtcagtagcagttttctacattgaaacataattactgattggaagttaaacttttcctctctatttagttgaatcttgattagtactactgagcaaaggtatgaagaagcatcagtattaacttgctgacaacacacaaatctcctagtgggagtgattcttgtctttcttgaatgatctccacattatgctaagtcaagagtttaactccgtgatgatttctattctacttcagacattaaaatgtaccttttttatattccatttttcttgtgtgtatatttattttgctatattgctgatacaagttgaagtgatcttagtttttttttttcattttattttctaccttttcttttcagtttttaacataatttcttttttggtaatattaggaagttgtaacctttattactatgtaagagtatattttttagaaagaaaaagcctgttatagatttataaaattaccattacagagtcttaaattattattttaaagtaatgttaatttttcagctagcagtaatgacattcaacagagggctcaagataatgcagagcaaagagatcgaagtcgggaagatcctgcagttgaagtaataactcctgaagtgtacaatagctatcgtaccgatggttcaagagatcctttttctgggatctggtctcggtcattgagaataaagttaacgggaaaagatggatttgagaaacttgatgttaggattcctgtaagtcatctaccctctacgggcttcaaaaacttaatcttgtcacatgttttagtcactttatcacatcattgttttgaaataaaatcttgttttttgcttagtaaaatatatatcttcttggtttctgtatctctttcttgaataaaaagaatagtgtgctgtcatacaaacatgcagatatatactcttttattctaacatacacaataataatccgaatagattcacaatgtacgaattgtcttctgatttgtttttgatgttatttaattaatatgaattttaatttgttaattatgtaaccaaaactgtttttgaagatgtcaaagacaatgaagagtgttaatggggaaaaaatagatattgggtgactatctgtttatttgatgcaaagaattaaagggttttgttttctgatttagcgatagcgaggattggagattctagtttgtgtattgttctttctagtgtggatacattcacacttgtattatgttctcatttatacaagtttcgtttcttaaagttttgttaccatcttcaaaaacttcttaatcagtatatggtaccaagatctcacacttggtgactatatagaagtcaagtatgagtatgtattgactggtcctcctttagtgttgtggtaccaccggttaccatttaatgttggtcagccattaggttacgttgaaagcttctatagtagaacacgtttgagagggcttggtggtattaagaatggtttgggtggacctcttcttctttccgagagattgaagaacgaaacacacttgaagcaattgaaaagctccgccgggcagttcaactgaatcaagaactgaaacagccatcatgggtgattccgtaggggatcttggtcctttatttatagttcttgcattaaccggtggttatatagtgaatgcagcttcatgacttgccaatgtgggcttttttttttgtcctgactgtttgaccgggagacctcctagtggccccaagttttttgagtctctgggtattttaaccttggaacaaatgcctactggcactttctcctcactactggaccaccaccccatggggttaggacttgccagtgtggattgaatacaatgctctgtttgaccaaagtttgtgttaatcttcctcttcgttttaaggacgtaactaaatcttccattgctttctagctttcatggttgatggatggcagtgctgcttttatttttcatgtttgactacttgggtttcaaacgtgattgttagtttcactgttggaactccaagatcctatcttggacctttctctccctgcattataaaacaaaaaaggctgttgaagagaatcaaacattgaattgcagtccttacgaaaaaaaaaaaaa

SEQ ID NO: 23764 - DNA, 1744 bp, Cannabis sativa
  modified_base (1692)..(1696): a, c, t, g, unknown or other
gcctagttggacattaaaaaaaactacgagggtagtatctaattcggataaactaaaaataaagatgttcttgattttctctcaacacatgtgcaagaactctaagagtgaataatgttttgattaactttttttaggtttcgtaattaaattatacatatataaggatttaagatatatacatgtattttaatttaaactaataaaacaataataaaggtttaattaaataacatatttattaattaaattttaaaataataacatttgaatatttaaataaatatttgcaagtaattttattgtagaaatttattttgtatttaaatatttagcttaaactaaatatctaataactaattgatcgaataaatctctgaattaatttgagggactatcttaaccatataaaatatttgtaataacttttaaaatttaaataaatatttatctttcgatgtaatttattaatccaaaaacaaattcaatggagcccatcgtatcataagcgtctatcactgtgtaataacacagtgctaggcactactattgtcttaaccaaacaatggtgattttaattttctcgtacaataaaagtcacaacatcatatatgaatgaagaatttttttaatatttatatataaattattcaatttaaaatattaataacattcatgcatatatatataaaaatgtttaactaatatttataattaaaaatgtctttatagtagccaagatcagacaatagaaaaagaagaatcagatagccaagggtccgtaagaatatcaatatattacgccccaaacccacacgcactctaacaccaaacttgactatagtttgaatttcagaaatgctcttccaaatgaaactagtattatggcctagttggacattaaaaaaaaccacgagagtagtatctagtcttatagattcggctataacaagagaggtgtcattaaccaagagttaccaaccttacttacccaataaagagagatcatcaacaaagactgcgaaagccaagaccgccaacacttttatgcttacaacaaacgattccaaatcattcagcttaccccataaaaattgttagagcaataattccactaatactttgacatcagatgttccaactgactagctacacgtttccaaaggtaaaagaaagatagcacgactaggcaatgcttgtgccacaatcttaagcataacctccttaccggccttggctttggataaaaaacgaccctctcagctttgaattttcttttgcattttctcttaaggaatcttaaaatagcatatatttactcttacccatactatattatcaggagcaatatatacatacctatattacctgatgacttcgcaagcatggttttaattagaccacccaatatatatatacaccttacataaacgtttttatatttttatagaatgaatttgtggtcgtcatcgatatcacatggagatacatatattgttacatgtgttacacactatatacctagtaacatatatatacacactatatatatatatgttataatagacacaatgttattattaattaaaagttggaatctactgtacgtagatcaccctaaaaaatatatatatgtatagaatatgtaacgtccccgcttcaagccttcattgggtccttacacccacggannnnntggctcttatacacgagtacgtcgctctgactgcttcctggattgata

SEQ ID NO: 23765 - DNA, 4670 bp, Cannabis sativa
  modified_base (4442)..(4447): a, c, t, g, unknown or other
  modified_base (4629)..(4644): a, c, t, g, unknown or other
atgcaacataaaatgttatttctgctctttattaataagcaaatctgattatatgaaatgagttttatttagggcataaaaccaaatagcagcaccttttgagacatagatgcacatgaaggaaacaagaaggttaaaatgagtgtgatctatgtaaatgcaaatgaaatttgaatacaagttaaagaaccctgcacgtgggcaggagcattttctcgaacaagtaaagtaggagcatcatcgtccaaagaatcctcttgttcctactccaccaaaatggcttttccctttccagccactagggcggacagtcgagcaaccctttcaaggtcattcctgatcttaatggaccggtcaacaggtacttggctacatggaggagccttccttttcttcttcttcttgcttggagccgtctgttcgggatcagcctctcttgctctgtcctcagcctttggtacaaaattagccgaatagagaggcgtgtgaaagggatgaagagaagagagggagagcccttgggcgcaactagtaaagagagcgagaaagagagactagggttttgacttagaacaatttaaaggcttcgtgacataggtttctaggctagcgttaaggtctttatttaggaggcctaaaccctagattacaattttacatcatagatatttacatagtttgttagataattacaaaaacactacagtgcccttgaatttagatattatttagccattctgctgggcttttacgacccgattcgcagcccatgtcctgtgtccatgttttgggttatacatagagtcctgtcaggccaatcctacccacccatagacctacagagaagtctggccgtccatggttctgccaggtcaatcttggtcggccatggtcctcccaggacctggtaggacaaggcctacaggatctagcaggacaaggcctgcaggacgtggcaggtcagtgtagctccaacaagaggaggccaaccttttgcaagttgaggatagctttgtacaccatttctttgtagagaccaggttcccttcgttcaacagaagcctccttcgtatgaaagtcacttcttggcctgccagcttgtgcacagatcctggccgccctgtaggctcaccctagccggcctataggcttctcttgggcagccaaggatgtttgtacaactccttgagggctcgcttcactccatttggttgttgcttgatggttttgctataacttgcatggaggccctgttccgctactcacagggctgtactctacctgtactttgtctttagcttacgtggacatgccatgggaaaacaccctttattagtgaaaattcataaataagacatagtctaatttagaaatctaattatttaattaaaactaattaactaagtctacaagctaatattatcagctagtgtgcgaaccatatgcctatataatcaagcttagaataagtagttctagaatttaccaagtaaattccctatcttattaattcttcttgactccactatagattcagagttacactcttaattatatagaacgctctaaatattccaactatagatatgttattaattatccattattataatccaaataatccaaaatcctttgtagatgatttacatcgagtaaggacaaatttactgtctgccgttcaatttattatatccttagaacatttagcttcctataaatgatttttgaataagctaatataattatagaaataagaactcttccatttatctatattaagccaagctcaaaggaaattatcatttcactttaatgtcaatatagaagccatatattacgtatctatgattagtgctctcacttaattgtactaccatgtttccaagatgtaagtattggttccatccaattggtcagctttaaggaacaactcaaagaacacaaataacacagttaagctagaacttaaccatctcaggattaagatctattgatctaagatcaactaagtgatattgacttataaagatataaatataagtttaggatatcttatccaagttcaatattattctagtccgatgtatactccagacatctgatactagcatactttaccaatgtcctaaagagtaaactttatcgttgattatcacgttagtgtaaatctagtgcactgataaatcatgtgacttaaacttcgaagtatataatcacaattactttcaactgtgatgacatcactgtaattgtgaataactatatgttgtgaaattatcagaaattgtatatcaaactgtaatcatgaaattaatatgttaacttatacgacatctaatcttcgattgatgacaaataaaattatattcaaatgagttttatttagggcataaaatttcaacaatagttttagtaaaaattattagaattttaatcaaaataacttttattaaaagtcaccagttgtaccatttttagcttttaattgtagttaaccataaatttttcaattagatatttttgacggtttaccaaacaattctttttagaaaataacttttagtttttgtaaaagttatgtcaaatgatccttttaataaaaaaaaaatattttgataaattttaaaagtaatttatttttatttttaaaatttaattcttaaaataaaaaatgaaaatagttttacccaacatatttcttgttacgtcaaagaaaacatgttttttttttcttaattaaaaatacaaaaacttttttttttttttttgttttttctttgaaaattatacaaaacctatttaaatgatataaactttcgatggtttttcccattaattctttatagtttcctagccacgcgcatccattatttttaacgttttttctttttatttcatgatggcttgtgaaggtacatattaccaataaaaaaaatcttctaccttaggcattaatgtgcttttaataaatttataaaatattaagccattgaaatattgacaagtattcaaagcataatgatttttcaataagcattccaaaagggaaaaatgtccaaataatgttaaaattgactgaattcatcgcacatcaacacattaattagttctattaacccgtggagaaaatatatttttcgtagaatttagtagaggatcccaccatatcaaaaagggttccaccaaacaagattttcttgacacctaactaattatcaaacaaatatatttttaaagactttgttggaaaaatccaaacgacccacattatcataacttcagctatatcttcatgttaaaaaaaaaaaaaatcaattaagtatgagaattttatgcttgtggtttgaaatatatgtgaggacttattggtactaaagtatttgagttgcgtacatgtgaaataatcagtttagtatttatttaaatctttattctctttgatcgttttattataaaatacaagtatacgttttgaaaataaaacaatacaagtatatattatagaataatataaaagatataaaaagaaaaaaaatgatgaagagagaaaaagaaacccaatcagaatttctcacttatttattttaatggggtgaacccctatctatacaaaaaaaatatgactaaaattatccaaaactaaatcaatgtaataaaggaaaatacaaataagcattaattgtgataatcaatttggtaatttagacatccataaataatatttcataacacacccccttggatgtgcataaaaagtgtctcattaaaaatcttgctgaaaaacttggtcaaaagaaaaatagtgcagtgtaaactaaccccccctcatttaggcattcgtcgagatcttctaatcgacgaattctaatcttgtgaactatcttctcaaatgttaatgttggtaatgactttgtgaataagttttgaagattgacacttgattgaatttgttgaacactactctacattctcttgaaatgtttaaaaaaatttggagaaatgtattttaattctatctccttcaatgtactctcaatttagttgagcaatacaagcagtattattttcatatagaactgcttgtgttgatacttctttattgagtgtaatccatatgtttactgaatatgttatgtcaagaatctcactcacacgcattctctacttgttttataaagtacacgtatgttaacatgatttaaagttgtctcgttaaaaaccttgtcaagaaaacccagtgggacaaaacctgaactacaaaaaaaaaatgcaatatatatttcatattcataattatttgcaagttgcctcattaaaaatcttgttagggaaatccagtgggacaaaacttgaactaagaaaaaaaagagtgcaacatgaatatgtctccccctcatgcacatatgatctacaattattttagtgataatatatctcataannnnnntgttatcacttttaaaatatcaccgtacattacctatgatgatatattttgtatagctgttcccgagtatttatggacttctaaattatgaacgaggggttcgtggaacatcaatatttatccagcttatttaatcattcataaatgcgtagatacaatattgtgttggaaattattttacnnnnnnnnnnnnnnnntaacaagtatgtttgattaacaacct

SEQ ID NO: 23766 - DNA, 6233 bp, Cannabis sativa
  modified_base (1536)..(1537): a, c, t, g, unknown or other
  modified_base (2738)..(2739): a, c, t, g, unknown or other
  modified_base (3486)..(3486): a, c, t, g, unknown or other
ttaatttcattgttttagaaattcaaatttaggatgttaaataacatacatcgtagcaaatctatatcctggtaatatataatccaacagctcaacctacggaacatgataatgatggtcctatgatcccacaagatacgtaccaattgtcgagttggagaatcatcgtctcagatgccacctagaagaggcaaactgacaaaatgctgagttagaatgggaggcagccacgaccagggaaacacaagagaacaatgcgcaaaatcaacctgatcctggagtgagaagaccacgaggcagacctcgtggctcacaaactaggaggtaggagacggctcaagagaatcctcaaaacgcttaggaagaataacttggggaaactaagggtccccctaagaatgaacaaccaaatgatcaacgagagccttctcacagaaatgagaacagaaggcgaccaaataccagggaacaggaaatccctcgtgggaataagggaaatcttgggactcaaactgggacacatgggtcacaaacgtccttctcaaaccaacagggaaggggcacgtacaaaccccagtaggaggcatgcaacgacccatacccaagggaggaggacgggacgtgaagaggcgggtgttaccttgggatgcacgagaactcatagtcaatcaatgcgaggaggagaaagtactcatgtcaataatgatcgagaaattacatgcataagtaaaaataaaagttactcaaggacgaggtccatgagtaggacgaggtccactagcaactataaccaacaacgaccggatcttcacagtcacttgaaccagaaaaaacttaatcttctccaataactcaatcaaaagcaagaggatcctatctaatggcgaatagatgagttagaggataaattcaggaggtatcaagttggggaacaaggaaagcagtctggatatgactcggatgaggaacttgagccattccatccaaacatcatgaatactccattccctcagggattcaaaaaccctcacgtctcgtcatatgatgggaacatagattcggtcactcatttgaataatttcaataccatcatgcgagccagcaatgttactcatcattcgatcacctcttacgaacagttgtctaaggacttcaaaaaacagttccaggccataagggacaggcgacccgaagcgtcctcgctcaccaacataaagaaacagtcgggtgagacgcttaagacctacttacgtcattttagtatagctgctgcgaggttgaggaacctggaggatagtacccagcttactactcttcacgcagggatcactactgatctctccactattggaggcaaactaagggatgacctatagggtcgcccagtaaaaaatattactgagttcaatgaaagagctcaagtatttttttgaaaagaggaagctagaaaagtgataaagttgttaaagattggcttgggagacaaacctagcactgtctcaacaagtcttgtctcgaccaaggctgataatccannagcctctagttcaaagaggaaggataactctaaggagtcagccaaggacaagaaaaagcaatagaagcacgacaagtacgcgccaacttacaacgagcttaatgaaactcgaaaaaacatttatctcacacatgagcatagggttgcatttcgtaaacctaagcccattaggcacgcgagacataagagagacgcaaccaaattttgtaagtaccacaaagacattgtgcatatgatagacgagtgtcgtcagctaaaggatgagatagagagtctcaccgcgcgaggccacttcaagtaatatgtgaaaagacatggcaatggacataactagcccaatccgcccaataacccagaaaaccagggattacaaccttctcacctcttgaaggagaggatatcgtggttatctcgggagggccacatattactggagagagcaacaatgcccaaaggaggtatgtgaaggaagtgagtgaagaacacgcaggcagtctcctttgctccagaaccttccaagaaagtgaagactgaagaacctcggatcatattcttgaaggaagatgaaaacgagtaagatatcctcacattgacccactggtaattaccatccagcttgccaataagaggacaaaaagggtgctagtggacaacggaagttcagtgaacatcctctatagggatatcctgaagaaaatgggacttgaaaaagccaagttaataccttgcatggtaaatttttgttgatttacaagcgacattgtttccagttaaggaataatcgaactcccattaactgggcgaagcacctttatccaccaggataatgctagaatttttggttgtcgacttgccatcagcttacaacatactgttgggtcgaccagcattaattggactaggggcagttagttcaattaagcacatatccctaaagtttcagacactaaagggtgtgggagtagtgcgaggtgatcaaatgttggctcgcaaatgctatcgtatagagctgcagcacaaaaaggctggtcaccaactaattgcagtcttgattgaagaaggcaagaaaaaggatgaacatcttgatcctcagactcaagatgaaagaaatatattgaaatcaattaaggagctggaagaggttgttctagatccaggaaatcccataaagtgtgtatacattgggaagaacctggaggannaattgaaatagcagctaattaactttttgagggcgaaccacgatcaattcgcctggagccatagagatatgatagggatcgaccctaggattatctaccaccacctaaatatcgatctaaattacctagctaagagacagaagaggcgaccgctggattcagagagacaaggggcactcaaataggtagtggataagttgttggctaacaactttatacgcaaggtattttatccctcatggatatccaatcatgttctcgtcccaaagccgaatggaacttggagaacttgtattgacttttttgatttaaataaggcgtgtccaaaggattgctttccctgccaatgattgaccagttggtggatacaactgctggacacgagcttctgtcgttcatggatgcatactctggatataactagataaaaatgcatgtcctagattaggaacatacaagctttgtaaccaacatgggactttattgctacaaagtcataccatttggattgaaaaatgctggggcaacatatcagcgacttgtgaatgaaatgttctcaaaaaaaattggacaaaacattgaggtatatgtcgacgatatgttggtgaagtcggtaatgagtggaaatcatactacagacctcgttgagtgctttgaaatactaagaaagtataatatgaagcttaacccaaaaaaatgttcctttggagtttccctgggaaaatttctgggattcatagtcaacgngaggggcattgaagcaaaccctgagaaaaatcaaggctttcatatatgcgatcaccaaccaaaccaaaggaagttcaagccttaacagggagaatggcagcacttaacagattcattcctaagtcaattgataagtgtctaccatttttcaatgtattgtgaggcaacaagaaattgaatggatagaagaatgaagaagcctttaagagcataaaaaggcatttgtctacacctccgattttagcaaaaccagtaactcgagagacactactcctccacttggctgtctcggaaagtgcaattagtgcagcaatagtgcgagaagagggaaagcaccagcaacctgtttactatgtgagtaagcggttactgggggcaaaatcgaggtatcccgctcttgaaaaacttgccttacgcctaatccacgcatctcgcaagctacagccttacttccaagcacatccaattaaggtgttaactgatcaacccctcagacaagttttatcaaaactagatgcttctggaagattgataaaatggtcaatcaaaacggggcagtttgacataacttatcacccacgaatatccatcaagggccaggccttagcagatttcttgatagaaggaataactttagaggaaaaatcttcttgttcaacgagacgcgtatacttggagattatttgtggatggtgcatccaacgagcagggctcgggtgcaggggtgatattaattttgccagaaggcctaaagtttcattatgctttgatatttcaattcgacgcgtaaaataatgaggctgaatatgaagccttgatcactggtttgaggatagctgaagcattgaaagtcaaaaatctcatatgtcatagtgactcacaactgatagtaaattaggttcttggggaataccaggctaagggctttaaaatggccaagtatctagagaaagtttggaagaacttagaaaagttcgtttatttcaaaatcgagcaaatcccaagagaacaaaactctaacaccgatgaaaattgtatagaagaggccattcaatgcctctccttcagtgtgttcttcctgcagaagcaaacgagatcatcaaggaagttcatgaaggcttttgcggggatcatgcaggtttgcagagtttattgaaaaagattattagacaagggtattattggctaactataaacaaggacacccatgaatttttaaaaaagtgtgataagtgtcagagattctcgcatatacctcgcgtaccactaacagaactgagaatgatgacctcgccttacccatttgttatatgggcgattgacttgattggagcacttcgcatagggtgaggaggagccaagtacgcagtggtggctgtcgatttctttaccaaatggacagaggttgaacctctagtttctataacctgcaagaaagtcgtcaactttgatatcaaaaacattgtctacaggtttggaattccaatgaagatagtatcggacaacgagagttagtttaatggtgagttattcactgagttctgtgaaaggaacaagataattaaaagcttctcgtcagtatccaggccccacgcgaatggataaatagaagctgttaacaagaccttgaaggatactatcaagaagaaattagacgctgccaagggtagatgggtcaatgaactacctcaagtactttgagctcataggaggactgaaaagattgcaatgggacatactccattctcgctagcatttggctcggaggcaatgttgcctatagaagtaaatatctcgactcacagacgagagttttataatcaataagaaaaccaagaacttttaaaaatgtcctttgatctactttatgaaaaatgtactgagtcgcagattactaacgcagcataccaacaccgagtaacaagatacttcaacaaaagggtgaaaaagagacttttcaacgttggagacttggtgttaaggcgagtatttgaaaaatacaagggacgcatttgcaggattattcactcaaactggcagggtcctttgtgatcgaagcaatagtaggaagctgggtttacaaattggctaggctgaatggctcactgatgaagaactactggaatgtggaacatttgcgaccctactaccagtaaattgatgttgtaactcacatttctaatgtaatattttgaacttcagttattaataaagttaatcatgtttcaagtaattacaaagtgttattctttaaaattacttaaggagcatatgtgtatgattaaccagaatttatcaggaaatacatgatacaaacccaccactttaaaaaaaaattcaaaacttttaaagttctttttgattaaacctttctgacgagaaaggaaaataaaaaattgtgaatgacttttgattaaacctttttgacgagaaaagaaaatctaaagttgtaaatgagatataactcataagctacatgcgaagaagaatactaacagctcgcattgtataggaaagtattaaataagacaccaagatgtcttgaaaaaatacttaaacctaacatatgaatagaaggcccaactactcatataagcaatcaaaaatatattcaaatttgcttaaaacagactataattgtttgtgcaaagcagaattgataactgctcgcaaatcaaaagcatagcagataataactactcgcgcacatagtagatcactaactacttaaataatatcaaaggaaa

SEQ ID NO: 23767 - DNA, 4290 bp, Cannabis sativa
atgttagcataatatgtgctttaattggaaaataatctcctctaatctggaattctttagtagggtctcggaggtactagtttgtcccttcattgacaggcgtacaggttcttagatcctcgttatatccggtctatcaaagaataaatagaatctagtagctaattaaattttcggatatctatataaataatttcagcatattattaaaataatatttctaatattatggtgtactgataaaacttgtaaagttaagtttggatgttgaatccttaataatcacacatttaatatttaaaaaaaaaaaaatactgaaaagtaagaattggaaattgattcctcgtactataaaatggcactcttaatcactatgcaaaatactatttttaaaatatcttgttattatttaatattttaaccatatattcttaatttttttcacagtttcaagtccctaatcagtgtttatgaccctgtatataaattgacgtaaatgagtaaaaatattttctttttcttcgttttaagtggccaaatgataaaagataatattggtataattaaaaattaaattatacataatttaatttaataattatcataaaatatcactaaatatataaaaaatactaattttaaatggtactagttactacttattgtggtgtgtaataacaatgctcttccaaatagtattaatctctaaatttatggcttggatattatgagttttaaaaagatattttcttaattgatatatatatatagagagagagagagaggggaaatatgaatgttatgcttcctatcaaaattacaatgttaatgggcctccagcttagtacatgtaagaaccttagagtatattttgtattgttttcaaaaaattattttcagaaatgaaaataaaatatagtttaattttttatatataatatttaaaatataaattatttttatttgataggtataattttaaaaaaaatataaattagaagaatttttttttaaaatatttagtataattaaagatacaaattttatatataataaaaattattaaaatatggtttctttagaattttttgaactataaataaaattttctaaaaagtaaacatatgtctattgggtgattttttttaataaataaatataatttgaatcattaaaaatcattggttatatataaaatttagtgattagtagagttgatctacatcattaaaaatagttcagtattctctaagtacatatttcatggtgacaccaaaccgtgatccaggccttatttagaccttgaatttttgaaggaaaacttttatgagagaaaacatatagtggggaaaaaatataaaggaatatattttcgacaaatttgataacagatttatttattattttttaatatctatatacttttttcacataccgtaaattttttaaattcatcaaattatacagcatatatactttgtttggatcttaaattttgaggaaatgaaaaaaaaaaatcccaaggttccattttcttattatatatgcaatgtgttatatcagtattttttattttggtaaaaaaataaaacttaaaaaaaatatgttaaatttgaaaaaatagaaaatattaaaacaagtttcataaaagttttcttttgtaaaattaaaaagccaaatagggctttaaattttaatacttgaaaaacaaaaatgtttaaattttttagtccattaaaatatagttgatgaactactcacattgttgtaaattggccgatctatcaaattgttcacatgcgacaaataaaataatgatatagttgtttagccaattactacgtcagtaccacatgtataatttaacattaaaataattaaaaaaacaatgtatatcagtatttttaaaagatcattaaaataaaagtcaatcaatgaaatttttttaaaaatatatgtaaatgtaaattaaatttttttttttttttttttatgaaattaataacagacgttgagttgacacagctttgaggtggctttaacatgacaattaatatttaaacaaccaaattattattctgtttgccatgtgtaataaaatttgacacaactattagttcacactactataaatggattctggacaacttttagggaactaaaattaggggcatttattttaatttaaagacaaaaatctaaataatctattaagtcccaaacatacaagagaaatatagaatcttttagaattaatttataattcaaattaatatttaagagaaatgctaaaaggtataatgatgattagcaattttcttggtgatactgttgttggtttaaaaaataaagctaccgtcacttataaaaaatactgggtttgttatagtgctagcaatgcggaatatctaatatgaattatgataagtatatttattagatgtgggtccgccagctgccaaatcccaccaaaaataaaaaccaaaaacagttacaatttaatgttacctttgttgacctaatatgcctcaaagatatctccagctgattctctagctgctcgagctcctttgtattcaacggtccgagatcttccccaagaaggtttctgcagcattcagtataatcgttacaaacacataaataaataaataaataaataaatatttatatacttgagtatatatgtaattgtgtacctctgagatttctgtagaacctctactcttgcttttagcttcaaatattcctgatagctgttctacttggacccaaaatgatcacagttaacaatgcttaaatgagctttcttacctcaaacatacataatttcctttaaatatatttacatttaaacctctaatataagaaaaatatataggacatatatgtgctggccaaggggcaccagttgagtttacctcatgagagtcaattaaaggttgagtagcgtccagtcctccataactatacttcttgtacttttctaccgttttcaccatgctacttttaagaaatattcataagtacaattaaacctcaaatcccaaagaaaattaatttataatcacagaattattaaatataaataaaataatttaagtagcacacctaaagttaaaaaaattaaggagtgtattgatcgataaagcatatcatcattcatcttatatattcataaacagtcacggtacactgcatattgtattataatggcaagacctctatatttacaatttcatttaccagctacctaaaaaatttctattgcacaaatacataacatattttcacaatttaatttcagcatagaaatttagctacattacagtatataatttttacttcctatcaccaatggaataattaattaattctcatctgataaataattaatctcacaaaattatcatttgataaataaaaacatatatatgaggtacattagaactgcatcccacaatcatttaagtatcgcaagaaaaagaaattgcggcttcgagcctttatgtttgaaagcattgatcatgtaatcattaattagtagatcgatctcaaaaactcttaattatatatatatatatatttatatataaattcttagaaaagagaaagactatgatatttgtatactataatagtatatttatataatcgctcctttttagctaggctttttgtatgcctatttttccatgcatatacgtactcttggtgagtatattttcaaataattttatatatgaattagcctatgcaccaaatagcttggaggcttcgaattcatatacagttgtatagtatctagacatatttatttattgatctataaataacagtataacattaatggaatatgttaaaataagattttataaatatgttttttaaaaaagaaaaattatatatattatgtatatattcagaaattgattgtaccacactcggtacaaattaaagtggataaaaaacctatttcacttcctaaataatgtgctatattaattttttaattgaaattatatttaagcatgaaaaaatatttaaaatatgtaaattattactaaatagatgatcgatcataatttctacaatgaaatagttaaaaaactcacatccaacaaagaaacatgctttccctcgaatatgtttggaaaaggttcaatttacttttcgcaataaataagaaatatgttttggttaaacagtatgtgatatcacactactcttatttacatatcagaggttctggccggtttaaatcattctctcacaacatcaaaggcaaaa

SEQ ID NO: 23768 - DNA, 4150 bp, Cannabis sativa
gaacccaaccttttcctttttaattctgatacagtcagctcctctctcatcaaagcatgtgtgtcaccctctccaacatgggtcatattaatatcaatattatactcattattctcctcaaattcaagaccaagtttctgcacaattattggttcctcaatcccatgaatttctcctctcccacgattgacgccatgaccacccgaataatgaacctggacatcgttctctgcaagtccgactgctgcaccgccgtccctcatggctgacgacgactgctcctccccgtgtttctccttacgtcccgatcgtagccattgtcctccgatcagtttgttctgacgttgagtcatggctcgcatgaagacaccatacggcttgacaatcttctccttcgatgtctcaaatagctttggacaaagtttatcagcatggccaattaacccccagatgaagcaaaatgtaggggcatgctcatatttaaagttaacccaaaaccaatccgaactattaaattgacgaatcttcattcggcgcttgagaggttgatcaagattaattaacacgaactttaaagtattctctccacacaccgaagaaattattctcatcggactccacaaactttccgatataatcgccaagcttctgtaacgtcctttccgttcgaaatccatgttgaagatcatggatttgaacccataggtcaagtcggttgagaatgatagttctcagattatcacccaccttgagtctttcaaatattaattgcttcctttcaaatgtccatggactcccaccaatgactcttttgatatccaaatcatgatagaattgaaacagaaatctgttttgttccaactccttcacataaagacccttacctggtttccaaagaaatgccataatgtgttgcatggcttgtacgtcaataaacccaggattcaagaaccggccgataagacaccaacacacatcgtactcctcttcttcctccacgtccaaagacagcccaccaaattcttcgatatccagagtaacctcctcgtcgatctcctttggaaaattccttgaacttgcagaagccatcacagcagtaaaaaaccacagaaaaaatcgaaacaccaaacatagacaactcaagatagcaaaagacaaaatgacaaaatcaacaccatgtcaaaggacaagacttcaaaatcacatttaggactctctttagtcgtcaaaatgatacttttaatgtaacattcattcattcataaaaaaaatttctgttacacactaacattcaagagaaaaaaaagaaaatggaaaaagctatactactggagctgccctaaccctaagggtctctccttgattcttactacccgtactaaaaagaatacatacttttttttttgcaacttgcacttccttactttcttactgactcaatttttccattcacgactggcccttctgagattgccattgccattggttccttggccttggtggcgaggtgcaacgagacgttgttgcactccctagcttctttctgttcccctttcaatgcaccgaccccctggggttgggaacttcatggccaaattgtaaactgaggttttagccttcaatcggttgagagagggtcgccctagcagtgcgttgaattcagtagacaatccaccaccaaaaatgttgccatcaccatggcttgtctgagactctctccaacagtgagggccaactctatcattcccagcggtcagaatgagtctctgataaacccataaattagtattgcacatggttttaagtctttaagattcaatcccatcttcttgagggttgcaaagtagaggatgtcaacggaacttccattgtccaccaatgctcgatgcacccgtgttatgacaatctggatcacaatgaccaacgggtcattatgggggaaatgttgatgagaacactaaggccaaagaaacaagtcaagttccaattggcccggtgatgagggtgcaagccaaagattcaaagaagaactcaacaacgtagtcaacatagttttaaaacaagaggagaccctagtcaacactgaaggagaacaaagatttgtgcttctcatcaaagtagactcaatttagacccaaattgagctgatcatgtttttcaaggcatttggtagctttccttttttaattttgtttcctttattctatctttgttttatttggaaaattgtctttcttttagtttccttttttcttggttgtaagttggctatataaagccttgtaaacactttggaaaatcagattatttctgaataaaattttgagaggattttttcttgacttctttagagaactattcaaacttatcaaggagtattcgttgtggcgttcaaccagacttatcaaacggatttctaccaccgtttgtggcgtcttctttcataccaaggttcatgcttaactaagcattaggtcgcggttccacatccaaattttgagaattcttagagtctgccatacttggtgtcgggtttcatcacaactgttggtgtggttcgtatcatttggtatcagagcttaggatcatcaagtttggcctatctatcttttgttttttctcttttttttttctattccactcatgttctataatcttctttaacttgtgttctatattcttgtcaattcctgtttcatctcttctgtttttctttgtgaaatacgaaactgttagaaccacattctgatattttcttgtgtcaaacatcgtgtatttgctgtcatcagtttcccttattttttttattttcttcttaaaaaaaatccgaattttttttaaaaaaataattttaatttgttattactgaattctagtttccttatttttgtcacaaatctgtttccttatttttgtttctcattgatttcccaaattttttcacaaagctcgtctctttgtttctcattttatttgtctcattagtgagctagaattttgaaattcttgaaaaacaaagaaaaaaaattaaaaataaaagaaaaggaaaccaagagcaaaaaaaaaaaaacctctcttcaaatttttttgtattttcttactctccatagtctaaaggcttgtttcccaataccctatacaagtgttttaaaaatcataaatttttttagttttcattggtgttcgtttggtttattggttgaaatcgctgcttgaatcctctcttgtactgtttgcttagtttttaaagaacttaaagaagaatacgagtggaaaaaggtggaggtgtgaacttatttgagggtgaaagccatcgaatttgagtgaaaacacgagtgaaattgagtgacaaattattttgagtgaaacacgtgagggagtgtggtgaagtctttttatttatctgttctaacattatttttgcaaaattcaatcatgtcaaaagttccagaagaaaataccggtaatgaaactacaccatctacaattccaaatctacaacttcaagctttgatgggggagatgaggaggatgattagataagagtgtgtacaaatacatgcaaggttagatagggtagaagagggaacccaacaaaggccccgcaggaacatgattcaccaaagggatgataatgaagtagatggggaagggataatttttgatgaagagtttgatgggatgccagcgggtaaccataggagatatggttaggatagagaagctagtaaccaggtagataacaatttgggaaatataaagatgaaaattcatgcttttcaaggaaagagtgatcctgaagcacacctagactgggagaagaagatggaactggtgtttgaatttactgactatgctattgtttagtcagattagttgtgcatcaacatgaggcagaatggagaaaagagatagactcttgggaggctatgaagagggtgcttgaggcagcattttgtaccatctcattattatcgagacttgtacctcaagttgtaaggtcttcgtaaaggatacaagagtgctgatgcgtattacaaggagatcgagatgcctatgattagagccaatgtggaagaggatcaggaggcaataatggcaaggtttttgaatgggttgaattaggagattgctaatacagctgaactac

SEQ ID NO: 23769 - DNA, 2257 bp, Cannabis sativa
ccattctcatctaaaccaatcatctcttctacaattgcattatgccaactaggatcagatatggcttcgcaaacgttcttaggaatcgagatagaatcaagagaagcaatataatagcaagaagaaggtgacaagtgattataagaaacaaaagaagaatcaggataagtgcattaatgtttatctttacgtagggctatgggaagatcattccttgggttcgaatctgatgacgagaaagcaagtggatgacatgaaacaagaggtgaacccctgaagtacattttaataggaggtggacgcatgtcagaagttgtagctgagacaggttgagtaataagagactcgccgtgagttgtgtttgagataggtggagaaatataagacttgtcaaaacatgtgtcagggtcaaaatatgctgacgaatcattgtcctccccctaatgagtaggagtagatgaagataaaaaatagtgtgtgttttccatgaaggaaacatcagtggagacaatatatttgttaagattggaacaataacacatacctttcctaaagatgcgaataagcaagaaagacacactataacaacttgagatctaatttggtgacatgtaaacgaacatctcgagaaaaacaaatactaccaattatcctaggggcaacaagaaacgatgagttaaacaagaaaggaattttatatgggatcttaccataagaacagaagatgacatgcgattgataagaaaacatgatgtagaaacggaatcggtccaaaaatgtaggaacatgcatttgaaataaaaaagttcattttaagaagatatctatttttacattctgttgcactatttaggatttagtatcaacgtaagaagtttcatgaaatataccgctaaagaccatataagaatgaaactgagcaaatgtatatttcttgaaaaaatcactttgcaaagtacaaaataaaaaaaaattaaattgatttttaatcttagcacaaaatacacaaaatatagaaaacaacccagaacatttttttttattaaatataatcaaattacatgataataataatctacaaaagtaacaaagtacttgaatcgaggttctaacaaaataggaggactccaaacatcagcatgaactaattcaaatggaacactagcacatttattgactcgaggactcgaactaacaatatttgacaaattgatacgactcacaatctaataaaaaaatctcactatattgaggacaaaatttctttaacaaaagaagggatggataactcaatcgaaaatgagccttaaaacgatttcgctaaaaaaaacaatagaagttggtggcatggatcgagagcataaaggccgcaagattcatgtcctttaccaataatctttttcatcataagatcctgaaataaacaatgatcggaaaagaatgatatgtaacaatttagattacaagtgggttgactaatacaaagcaaattaaaggataaatttggtaagtttaagacttgtgagaaaggaatgaaaggttagtaatttttccaaatccaagaacacaagaagatggtgacccattagctaaggtgacagtagaagtggaactatgagactgaaaagtagaatgaagataggaatttcctgtcatgtgatatgtggcgtcaaaatcaatgactctttttgacgatgaaatagaaggcatgcattagatatacctgaatcgataatagcaatgacagaagtagatgacgacttaagtgattcctagtaacgtgagaacttggcaaattcattagcaaaaatggaccgatttgtcaggtatgttactagtgcttgcaacattcgtgaactaactttattggtttttatattgtaatttcctacactcaaactttatggtttggtgtcttatgataattacacataatatctctagtatccggtgtttaagtttcaaatccttgagaattgcctcctctatgtccacttagctagggtagaattttttttacgactttcaaaagcactattaagtgaagtagagtgagtagtttctgtacgaaaaacaagaccaaagacgtcttgtgaataaaagatatcagaccctgatagaacttgtgactttgcagaattaaatttaaatgagaagaagctcgtgttggaaagcaagagagagaaccacgatcgccagccacacacccaccatgactgaaccatgatcagaccatgaagagagagagagagagaga

SEQ ID NO: 23770 - DNA, 2249 bp, Cannabis sativa
tagttccctacacgggaggatcgctttgggacgtgatgctgaacaacattccctccgacgaccctttcagaatcctcgaacacacgccctttcctgttccgactaaagcctcagagcccttggccttggcacgtgcggactggaaggagacagcgtccgagcacgtgatcgcggtggacgttccggggatgaagaaggaggaggtgaagatcgaggtggaggagaacagagtgctgagagtgagcggagagatgaaggctgaggaggaacgagagggcgacaagtggcaccgttccgagaggatcagtggaaagttctggagacgcttccggttgccggagaatgcaaatttggatgcgatcaaggctaagcttgagaatggtgttttgaaaattacagtgcccaaactggccgaggagaagaagaaacagcccaaggttattgatatttctgaacacaaggctgaattgtgagagcaatattggagtcttacaagactaataaagttggtgtggcttctcttctgaataatatgactgacttggctttacatattaatatgtacttgccaatttcacttttatataaatatatatgtatgagtattaaactaggcttattatatatgttatgtgtaataatatttttgtactagttttaataaataagcgtgtgttttttcatggtaatgtgatgtgggtttattacttggtagaattaatttataatattacaaaaacaagttttccatcgatattttgccaacatgaatactgaaagatttaatttaacgttggtatatgaatgaggactcttaattaatttttaaatatttaattctaaaattttcaccaatatattgttaaattctgctcggtcttctttttttccctatacatttacattcttagtaaagatcatatgctgaagcacagcaattggaaataacatattgtattgagatagtcaagttgtgtgtctagcacacagttggatcctacgttatatgagctaacgagcccaacatatatagatttttttttttttaacagcccaacatatataaattgattttcacgaaatcttttaagtagtactagtattataataaagaggtattcataaaatacttaattcaatttaatccacatgatacacactaccaaaaaaaatattctatcagcacgataaaagtagtgcctagtgagagaaaacaaaagagaggagaatttgagagaatcttagtttatcactgtgggaaaattacgattaacatacaaaattaaaataactaaactttaaacaattaataatgacaagatgaaaaaatcacgaacagtaatcgaaaaaaaaatagtgatgaacaaaataggaaaaaccgaaaaacgattaaggcagaaaacacagagatcaacaccaagatatatactggttcaagtagaatagatcaatatgatctatggctctactctgttctggaacaccactaaatcttctttattgattgagtaagaacatgtacagtacagttgagaaggattctctgttgagttctctcaaagtgtttcaactctcatactcttacccaagaatcttcttcatctactgaaaattcttcttataaaatccaaaccaaatctctctcttttctctgtacctctcaatctttactctctcaaactctcaatctcaatctaaaccatcttctgaaatgacaagccaatgtggtatatataggtttaggatcaagatcctaaattcggtagctgcaagaattgaagttgttaagttagttagggcagtaactaacttaaccaattttttcttttgagtgagatctccacgtcagtgtaagtcttagtgcatccagaaatgtatatgagcttccgtgatcacggaccaaaggtcactcatagaagacccttctcgaggattggcttccaggattggcttccgcgagtgaacaaatttctaaaaatgacttttggagaccttttcatttggaagaaataccacaaccacacttgaaatcttagtgtgataagtgagcaaaaagctttatatataccctattgaatcaatacaaaacaaagtaaatttattataacagagaacattgtagttagcacaagtggacaactaacactaactaactacaaacttagccgtaactaacttcttaaccaaaatcaagttgttggttatcatctcccctcaaacgaaaaggggtatttgttgggttttatgcc

SEQ ID NO: 23771 - DNA, 1811 bp, Cannabis sativa
tatataaactatttaaaatttttactatggtgtccctatgatatgtatcttacctattaaaaaaaggtcctcattagtgaggcattaaaatatgttggggctcacattatcaagtgaactaaatgacaagtacacattttaattggtggagtgtattgacctaggtctgtatagcatttaacaattacactttttttatttttcctttttggaaataatgtttggagagggtcattcataacaaaaaaaaaaaaaaatgtttgaaggtattagttatccaaacttccaacatgccgaaatactggattggataaattagtttgtctaattcagtccaatcctgcataccaaacgagcccataagtattacatgctttatgaatggggtctttattaaataccccatagttattcatatatatatatatacaaatgttaatataattttttttaatattcatttaacttttgttgtgttaatttttaacaaaatattcttacaaaaattattaactttaacagaataaattagttttgaacaattgtattcttgagaaattttaattacaatctcttagtcaaccttcacatgccgaaatattttttttctcaaaaaatgttaattacaatctcctattacaacttgtatccattcacttttttattaaaaaactcaacacaattgcattcattagctttgaacaggctctttagagatttaattatcatttaaagcacaatctaaaaaatacacacacataatcagtaagagtcaatcctccaatttcaaaaatagtgaaacaattggtaaaaatatttgtggttgcttctctttatttatttattaaaataagttataaaatgctatagatatgttcccaatttggtgtttgggttgtatttttagaattgtataattatatttacacatacatattttaattgtaattaagtcagacgtatttctatctgtttttatcctttctatgaatcgacacatccacagaaaaaccaactgtatatataaacataaacaacacaattattagaatctacaattgaaatactgagaagtatctcatcaattctcataagttatttttcaaatttctctctttaattatcttgcaattttaaggtataagttactcattatccttttatttgtagatatatactaatacaaatatatttatatgtaagtaattttttatgatataattttgctctttttatatgtaatccagttcaataatttatataaagagactcaactattatcaacaaagagactcaactattacttcttttcttttctcagcaaacttcatcaaattttaagcaaggaaattataatgttataagtaatttatttattttatgtttgtaaatatttaaattatttcttttgtaaataatttattttccttgtaatttaattttacttgtaaataaaagaaaaattattattggaatatgttgtaaaaatatgaaaagtgggagaaatattttttagatttaaaatgtaattctactataagcatgacattctcagcaccgtaccactgagtcgtcaacaactaaagtaagacatggactacacaagaaagttcctaccgctagaaacttggaggcaaatgtttacccaaattctaacgacgatgacgtgtcaagaatagcaacacgtggcacgcaaatttcgagataaaattaatgaagaatatgttaagtcatgactgttgggatgaccgttaatcataaagggtggtcatgaccgttagaatggtagtcagatggtcacccttacccct

SEQ ID NO: 23772 - DNA, 8735 bp, Cannabis sativa
ccacaccaccccacacactcacacacccccaataccctctatggccacttgagctagcctcaagtggttaagtaagatggtcaattgttttgaaaatatccttaataacattgaatgccaatatagtattcagcttgacagtattgaggttcataccggctgcagatcatagatgagcctttttttaatcatatttaagtttctactgagacaaatgtttatatgctttggtatgtgtggtttttttcaagtgtagggtgcatcacaagtgactatttgcatcaccagtgattattttatatacctttttctatagtgcgtacctttgctatttttgtaaattattttctgtttcttatgttggttaccaggtattatagtcttgcacatgctgtgaatgaaagagtcataaggcaaccctctatgctgcgcaaaggaacattaagagactatcagcttgtaggttgctacaattaataaatgggattttgctatgtgttcaatatttcttgtagcaagttttatttatttattttgattttgttttgtagtgagccagtgttttcttttaaacttgtctgtgcaggttgggttgcaatggatgctttcattatataacaacaagttaaacggaatcttagcagatgaaatgggtctcgggaagactgtacaggttttgagcctttcttcttcttgagtatttacatattattattataagttgtgacaagaaactgcttgcgtcatattggttttggcgcttcagttcacattttcatttttcaactatatgatttgacatttccctttgaaggtaatggcattaattgcttacttaatggagttcaaagggaattatgggccacatctcataattgttcctaatgctgttttggtaaactggaaggttagttacattttactttaatttaatgtctcagtcttttttttttcattcttgaagatgtagaaggtgagctcattctctgttggttttgatattttcttaccattactagcatgcttaacagtgtgtatttgcagagtgagctgcatacctggttgccatctgtgtcttgcatatattatgttggtagcaaagatcagagatcaaaattattttcccaggtaagaaatatttgatttggatatattcttgttctttttctgattatttgctaactaggtttctttacgttgattaggaggtctgtgccatgaaattcaatgtccttgtgacaacttatgagttcatcatgtatgatcgctcaaagctttctaaaatagattggaagtacattataattgatgaagcacagaggatgaaagatagggaatcagttctagctcgcgatcttgataggtatcgttgtcagaggcgtcttcttcttactgggacaccattacaggtacattaaaatatgcaaatactgaaatgtttagtattttgagttgtgatttaataataaacttatgtctatcaatcttgttttgctgtcactttttttttccaaaaataataattatagttaactgggcaccagataagtagcttgtcaaaattttgccttccgtgtttatttaaattgtgaattgattcaatgttctctccttaattatcgcgaaaacgtactaatagctgtttgatacaagttagataataagcctattgctgtcactgttttgtttatggatgcaacaatgcttaagtttgtagttgcattttttaattatattagctccatatttaaacagaaactcattcattcatcgaaaatttccacgtgttgatgatttaattatgctatttgttagccaagggtctttaaaaattccaagattgtgttctttttatggacgtagtgaatgagataaaagaaacctatataatgaggaagtattagttgtgaatatggctttgcttgagatcggaattggttatttagtgatagtaatagtaatagaagtgacatacgttctctatttcaacatttaattatgatagtatcatccatgtttacaattatagtcaacttttgttcttttgttatgttatattatttttttgaaggatttatgatcactttttagtctgcttttgagtttcgggttttttgattttttgcagaacgatttgaaggaattgtggtcacttttgaatctacttctccctgaagtgtttgataataggaaggcatttcatgattggttctcaaagccatttcaaagagaagctcctacacagaatgcagaagatgactggttagagactgaaaagaaagtcataatcatccatcggctccaccaaattttagaaccattcatgctccggcggcgtgttgaggatgtcgagggttcccttcccccgaaggttggcttttgttgtggtccttagttacgtgctttatgtggtttcatggttctttctcatttgcaattctgtatttcaggtttcaattatattaaaatgtagaatgtcggctattcagagtgctatttatgattggattaaatctactggtactattcgagttgatccagaagatgagaggcggagggttcaaaaaaatccaatttatacagctaaggtgtataaaacgttaaataacaggtgtatggaactacgtaaaacctgcaatcatccattgcttaattatccatattacagtgacttatccaaggaattcattgtaagatcttgtggaaaactgtggattatggatagaatccttatcaaacttcagagaacaggacatcgagtacttctcttcagtaccatgacaaaactccttgatatattggaggaatacttgcagtggcgaagacttgtatatagacgaattgatggcacaactagtttagaagatcgtgaatcagccatagtggactttaatagccctggttcagattgctttatcttcttgcttagtattcgtgctgctggtcgagggcttaatcttcagtctgctgatacagtaatcatatatgatcctgacccaaaccctaaaaatgaagaacaggcagtagccagggcccatcgtattggacaaacaagagaagtcaaagtcatatatatggaagcagttgttgacaaaattcctagccatcaaaaagaggatgaactgagaaatggaggtacagttgattcagaggatgaccttgccggtaaggatcggtatgtgggatccattgagagcctcattagaaacaacattcagcagtataagattgacatggctgatgaggttataaatgctggtcgctttgaccagagaaccactcatgaagagagacgcatgacattggagacattattgcatgacgaggagagatatcaagaaaccgttcatgatgttccctccttgcaagaggttaatcgcatgatagctagaagtgaagaagaagttgaattgttcgatcaaatggatgaagaatttgattggattgaggaaatgactagttatgaccaggtccctaaatggcttcgtgttggtacacgggaagttaatacaaccgttgcaaatttatcaaaaagaccatcaaagaacattttgtttggtgggaacgttggagtgggatccaatgaagtgggctctgattcatccccaaaaactgagaggaggaggggacgaccgaaggggaaaaagcatccaaattacaaggaattagatgatgacaatggtgaatactcggaagcaagttctgacgagagaaatggatattctttgcatgaagaagaaggagaaattggggagtttgaggatgatgaatttggtggtgccgctgcggcacccgaatgtaataaagaccaagtagaagaagatggtccaacttgtgatggtgtatttgagtatcctcgaacttcagaaggtgttagagttaaccatacagtagaagaagctggctcctcagggtcatcttcagacactcgaaaagtgacaaggatagtgtctccagtttcctcgcagaaatttgggtcactatcagcgttagatagtagacccggttctgcatcaaaaagacttgtaagcaacttttcatcgtgtttattttatttgtcataattatttgcttgttatgtctctttgatgtcatattctgtttaatttttgcagacagatgaattagaggagggtgaaattgctgtatctggagattcacacatggatcaccaacaatctggaagttggattcatgaacgtgaggaggctgaagatgaacaggttttacagcccaagataaagaggaaacgtagtcttcgtattcgcccccgtcacaatgtggaaaggccagaagagaaatccagtaatgagacatcttccctacaccgtggagatttgtctcttcaacgtggagattcatcactgttgccatttcaggaccacaagaatgtgacacagttacgaggtgacccggacatcaaatcctatgcagattccaattctttgaggcatgaacaaaatgaatccttgaaaactaggcggaatctgccttcaaggagaatagcaaatacagcaaaattgcatgcctcaccaaaatcttctcccaagtctggtagtagcagattgaataacatgtctgcttctgtagatgatgctactgagcatcttagagacaattgggatggaaaagttggaaattctagcggtactactgttttgggctctaagatgcctgagatcatccagagaagggtatgtactgttcacttcgtctcttttctgcagcttcttgctttctgtactgatgatgcatcgtattatagcattgttgactttgccttgtgaaaaccacatacttgaagaggaatgaggtgtctgttttcagcccctaagtagggggaatatttcatattgtttgtgtgtcgagtactcatggttaattttctggaaagcctagtgactgctttgccccagttcatatttctggtcaacgactgattaatgtgtttataattattgttaattggttggatattgtaaatttactgattccctgaggtaaagtgtatcttggtggatatggtgtacaaggtgaatttgattattgtgggaaatattgtccgtatgaacattgttttccattgcgattactcttaatgtttctattatgtggactgaactaaacttctctgaatgcagtgcaagaatgtgataagcaagcttcaaaggagaatagataaggaaggacctcaaattgtacctttgcttacagatttgtggaagcggattgagaatactggctacacaactggatctgggaataatcttttggatttaagaaagattgatcagcgtatagagaggttagagtataatggtgttatggagctggtatttgatgtgcagtctatgttgagaagtgcaatgcattattatgcgttctcacatgaggtaatgccttttaaattctgtgtttctgtttactttaggacgatcatactaattgcattcgcctcttgaggttgttactgatccacagatttttaaaataaaatatttatagtgttagaatcattttgtaaaattcaaaatcagaacagtactttgcctgttgcgttcttgagccatcctcatccatgtacctacctacctctcctagaacaggaatataatggtctctaatagtgtaattactaatgcccaggtacgaactgaagccaggaaagtacatgatttgttcttcgatatcttgaaaattgcattccatgacacagaatttcgagaagctagaagtgctctttcattttctagcccagtttccacaactgctgctccttcacctaggccagctgctgctgttttaagcaagagacagaagatgataaatgaggtggaacctgacccaagccccctacagaagccgcagcaaaggggacctgtatacaatagtgaagactccaggatgagaagccttgtgtcacagaaagaactgagacatggtagtggcagtggcagagagcaaattcagcaagatgattctcctcgtcctgctcatcctggggatctcgttatttgcaagaagaaaagaaaagacagggaaaagtctctggcgaaggttaggactgggtcggttggccctgtttcaccccccagcatgactcgtggtattaaaagccccggttctgtttccgttaccagagacacaagactaactcaacaagccactcattctccagggtgggctaaccagtctgctcaaccttcaaatgggggtggagggtctgttggttgggcaaacccagttaagaggttgaggacagattctgggaagaggaggccaagccatctatgacctagaaagaataggatactgatgtaatggagacttttcttactttccctaccttttttttttcgtgttcattattggtggcccttcttggcccaactgcaattattagccaatattgttaatatagtttagggatctgttttatccgccttgtaggttacaatcacctcttcccatggaattcttagcattgtccctcataaattacaactctttgtatagatatgcttcatattaatcgtcagagtttatagttttccaaaactaccgtcaacaaagagacttaacttgcaaagctttgcttgaattgcaggctgaaatggctttgaagctggagtagttgtggttctttgagagcatttccaactgaattctactattctagtgcaaataatgacaataatagactaaaaaagtatgggagttaatatttttaaataaaaaaaaaaagatgaatatttaattttgtgtatagtggtttgagatgaaaaattggagggtaaaacttatataattcattcccatccagtgatttgattttcttattcttgttctgtgttctttaggacaaaaattgctacgaagttattgtcaatgcatgtttggagttggataccatgtacaaatttaaaattaagaattctggtacacattctgtattttcctgtaaggacaacaatgatcaaatcggtggcagcaagtctccctatttatgctacgtctactaacagagtcccaaagtcgatatgcagagagttggatgcaatggtggtgtgaaatattggtgcataggtagtttggacaaggatagattttggcacacaaatcatgggaaaacatatgtcaaccgaactatcaggtggtcttggactcagaagatttgaagacattcctttctaagctagctttgagcttggccgagaatgagactaatgcatcctcaaaaaagatagcatttgttctaaacttttggtgcacggaacagaaaagtagtgactcccccacttccagaaaagtagcttcaaaacgagaaatattattttccagggaagttgtgctctggaagcaacgggagttcatattgatttgtggaatcagccttggattccttggatggaatttaatgaattcagagattcgatggaaagttgtcgagttaatggtcctttttactagtctctgaagaaattcaaggaagcgttgttaaacaaaattgctggtttggatagaattccttctctggtctatgttggatgtttgtttgttttcagaagtgtggagccaaagaaatcatctgagaattgcagagtgcaaatgagataccaagaattcatttacaggcccatgtttgagaaaactagtgacgccaacaacttagtgactactggcgatgcgagtataggcagttcgaaaatattctcatgactgatgcatcctgggtagatggagatgctggtagtgcagctgtgatggttaatcaatcctatggaagttgggcgacaaattcaaattagataaaaggcaaattcagctaaggaatctgaagtacaagcaattcttctagccttgcatcgggcagttcataatagttggtcaagtatagcaattttctcagatgctcaagctgtagtgtagtgtatttttttcacttggatcggtcatttgatgtaatcgaaaggtccagataaacatttcttgtcgagcaaaagtagatttcagtaaacattcatttaaaaaagagtagatttcagtaaacagtagacaatgactacaatggaatggaatttctgagcaacaaatgctacattccacattatctttttgtaagatatattttttggactgcttttaattttgaagatggtgcattttacgtctctccaagaaatacaaagctaatatataaatatatgtatgtaaacatattagagtgtgactggagatgtttaaacattttcacttggaaggataatatctgcttgtatggccgaaagaccaaaagaaattgcattgcataatgtagtgtcatatctatcacacaatgcgataacactaaattttagagacataacaaagattgcaatctggaacatactttatttacagtggaagaaggaaataaagaggggtggggaaatttttccccctaccgaatgtacagtcttaaatggagtttcagatgaattttacgatggctaaaacataatgtacagatacagagagaacagaaacccctctcatattttagggatctgcttggccaacaacttgatcatcaccggaatcagactcgttgtcactcagttcctcctcatcgctcgatttgtcctctgcagcagctccaatgtcttctgccttggcatatttttcacagtattctggatgacaaacaacagcatacttatgttatgtcatataatagggacatggaaaccactcaa

SEQ ID NO: 23773 - DNA, 1590 bp, Cannabis sativa
cttgttgagtgttgaatcattccacgcttttgtagcctgaatcattaacaattttaacaaaatgaaaaacaacggaaggatatttatgaaaagtatcaactgtacataacaaataattacaacaatgagtactcaataaaatattccaaaagatcaaacagtttaccaccaacgcaaaagagaaataatcgaattaacatggtgctcaccatttggagaaagtagatacaatttcatattagaggttaaatcaaaggtcctaaaaccgtacacacatataaacatagctggttaagagaaaaaaagtttggtcattgccaaagtaaacaccaataacgtccgtgaagaaatggatagatagagaaaataaaggaagaattaacagaaaaaagaacaaaggaaatgatgcatacttagtaatggtatgtcaagaaaattttacttttgttctcctacgatttcacacactcttatggtcttcagtagaaatatcaaccacaaatgtttctttcagctaattaatcaaacagtttcaaggcaatgaatgaaacatacacaaaaacaaagtaggttatagaaacaattaaggagtgttaatcactcaaaagtagaacctgtatatgtgcatagatgaaatattatgaaacaaatgatagaaaaacttaataagctttctaccaattcattttcaaaatgattgcagtataaaccacaaacatggttaagagttgtaacaaaactgacacatacacattgagcttcaatgaattgtacagttatgagaaaatccataaacatacctttacaattatcctaccatccaaatttgttgctccgccaggaatgctgtcgccaattttaatgtctaaaggcaagcttctccaagcaaacgcctctcgtgacgagagtaaagaaagaggagtggtggtcgctgagatgaacgaagaaggtgacgaaggggaaaagagacaatgcgagacgttgtgcgctctctaatattttcttttttttattttataaaatgaacattttccaagagtttatcacactatagttaaagcaatcacaacactttctttaaaaaaaaaccatctcaatgataatatttcggagaatgtttaatgaggtagaaagtttacgtggcaaaatatgttatactattgtagataaaagaatgctatttttaaaatttgcattgatgccacacaatgacattgatgctatatcttttttatacaataaaaaattaaaaatgcaatatatataatagtttaataaagaaaaaaacttgtatatataataatatgtgatatcataattatagcatttttaaaaagtattatactatttgagtgtttttaaaagtaaaggtgccaaaaatgatgtggaaaaaaaataaaataaaatattatattttggatgatatatagcatcttcaaagaatgttaccattggagatgcgtataaatatttaatggtttcgattttataaacttaaatacttaatgtttattttttatggcaaaaatacctaatgttacaattctcaccgttactatcacttccgttattaactcataaatatggaca

SEQ ID NO: 23774 - DNA, 2845 bp, Cannabis sativa
gtgtaaagacccaataaagacttgaagcaaggacgttacatgctattccatccaattttgcgttggtggcataggcatcaattcctactcaaaaatttatctcattgtttaaaagggttggaaataattttttttagtagtgtaattatataatcaaacatcattatatataagattatttttgtagctaatactatggagaccaaacattaaaaacaagccaaaatttataaaaataaataaagacctttaggagatagattggctgcgcgcataaaactacagttaaaatatacttcttttatattactaactaaggaataaagccgtgcttcgcgtgatcttatccaacttttatagtttcttttatattttgatttttttttttttttttttgtattaattaagtgacataatcatatttataatatttatgtatctgtattataaataaagtaagttagaaacatatataatttgctattttaaaatatatagagagatgataattttgtgacaaatactaaaaatagtgaaagcaatagagaaattttatgtgtttttaaaataaaataattgaaacagataatgatatttaagtttaataaaaatgagcttgtgaatgatggtatagtttttattttttattaaaagattatttagattttttttctttagcaaaaagaaacaattataaaaataatttaactgttgaaagtttttatattttgactactttttggtattgattattaaattctatattttttttgtgtggatttaaagtagttgagaggccaaaaaaattattgagaagttttattttttcatatatatgcaaatatagtataataaggtactttattcatcaaatttttttatttaattaatatgctacatagtgatattctttaatatattagatggatgttagatgctaagtcatctatgtttagttttattctaggttatatatttttttttaaaaaaaaaaatcatatgtaaattttggtgaaacattatggaagaaaacacacaagctcgaactgtatgattaagctagattcaaggaaggcttataacatgctagaatgagatttcattgaagagattctgactgctttaaactttccaccaaaattcattcaagttttgatgatatgtatttgaactcttaaattcagtctattcttcaatggatcaatgcatgactttttttaaagcaaaaaggaggcttagataaggtgattcaatgtctctccttatctttgtattatgcatggaatatctttctcgtattctagcaaaggtggagaagaaaatagattttaaatatcatgataggtgctcagatttgaaacttaataatctttgctttgcagacgatgttttactcttttgccatggtgattttaaatctatttactatatgttacaaggtcttaaacttttttctctcttctagattatgtccaaatgacatgaaatctgctttgtattgttgcggcatgaaagaagaggaagtgcaacgagtgttggatgtctctggttttgttagaagtgaacttccttttaaatacctggggattctaatttgtgcaaaaaggttgtcggccttagaatgtgaatctatagtagagaaaatagtgcaaagaattcgtagttggggctctaggaatctttcctttgctgcctgaattacgctgatcaactcagttttgataacaatatacattcttactgggcacagattatgattctacccaaagctgtcctggaaaaaaaataaatggtatttgcaggtcctttttataaaaaggtttggtagaatccaactgctccggttatgtatcatgggatcatctctgcaagccaaaaatagagggaggccttggtttgagaaatccagtgctatggaatgaagcaaccttagggatatatgtttgtgacataactagcaagcaagataccttgtgagtgagatgggttcatagggtatacttaagaaaaatcaaattggtgggattatcgctcaactttagatggaggagacagatagtgaagattaaagaaatacataaaagccactttctattacaacaacaatttatgtgtaaatacaacattcataaagtatacaattttctctctgaagaacatggcagatttgtttggtataggaaagtctggaacaggtataatataccaaagcatagggtcattttgtggttagcggcacagaactgattgcaaaccagaaatcatttgatgaaaaagcaaatatgtcaagatggaaccagtcttctttgtggtattgaactagaaacaattgaacatattatgtttgattctccattcaacaacaggtgtcttcaaggagttaaagaatggttgggatggcaaggagcggacaggtctttaatcgtctctttgagatggatatctcgagcaaaaatgtcaagtttcaagaggaagttatatactgctgatatagctgcactgatatattttggatgaatagaaatgattgttatttgaataacagaatggaaactgtggagagctgcttacaacaagtgaagaagagtgtgaaacaaagaattcaaaatttactaattacaaagatgaatatagaagatagggattggtttattactttataaatgtatctagttattgttcaggcatagatttaaagtgttgtttgatatgtaaatttgatgttttgagagcaatacaacatattctgattaaaaaaaaaaaatatatgatatatataagaatatttttatttaaggaaatatatttctatttaaagaaataaatttttatttaaggaaataaa

SEQ ID NO: 23775 - DNA, 3135 bp, Cannabis sativa
gtggatcaaaaataggttaccacatttaaatctagcccaggcgggaggccctttaccttaaggaggaactgggggtatgctcaagggtcaggtacatcccggagagatgccccctcagtagatgcctgaaatgccaccccggccaaatgggaaagttgccatgatctttggcgggcctcatattggaggaaccactaggaacgagttaaagcgctacgctagagctctaaagcatgacgaagaggtatgagaggtcactcaactcccagctaagaggcttaggctcatggatcaacccattactttcacggaggaagacgcaaagccaacatgtttccctcaccatgaccccctagtcatagagactcccatcgctaataaagttgttgctaggatattggtggataatggaagctccatgaatttgctttttagagatgcttttacgaccatcgggctcactgacaggaacctttcgcccattggttcataactcacgaggttcaatgagataactctcatcccgatggaataagtgagactccccgtcaccttgtgtcctgacaccccacaaagaaccttcaaatattgcacctttgtggtggtggattgccccaccacctacaacgccatccttggcaggccgaccctagttgactttggagcaattacctccattcgacacttgtgccttaaattccctactcgggaggcaggagtaggaatagtgagggggagccatggaaaaacaagataatgttacaacgttgcagtacatttgtcagttctggtggtgcgagggggcgaagagccggtggcagtagaacaggacgaattggctccccgtattggatccaagataagtttagaacctatggaggatgtccaggaagtaagggtgtgcgacctcgacccatccaaaattatctacctaggaaaaaaatctagagccggaggagcagagtacgatcatagacacgttaaaggccgctacggatgtcttagcatggttctagggggatatgaccagaataagctcccatgtaatcacccatgtcttaaacatcaacccagatatgcctcaagtacaacaaaagggacgcccgcttgacccagtaaaggcttacgccttggagaaggaggtggataagttactgtccaacaaccttatccgggacgtgtattacccagcgtggttggccaatctggacctggtacctaaaccaaatgggacattgcaggtatgcatagacttcaccgatcttaataaggcttgccctaaggactacttcccattgccccggattgaccagattgtggacgccacctcgggtttcaagttgctatcctttatggatgcctttcggtgaaatctattggaaccaaatccctaacaaacttagacaagtgatcaaactccagtgtatattcagtcattgtcttatcaccttgaactaattttatgaaatcctccatctaaattgtacagatggcaatgttatagaacttttcttcaaacacgttcttaaattcttccaaggtcaccatacggaggtcttgagactaacctactaaatcccaccaggtgttggcatgcttttgaaacatgaaaacaacacaattaacatgctcagtcccgattactcttatattatccaaaatacgagtaatagtactcatcaactgttctacctttataatattagtgccacccaaaaacgtcgaaggttgcagcttgacaaactactcaaaaattgaatctcagtgtggttgcaaggccaatccagggttggctaccacgggagtaggagctagaggaatcacttgctctactttagctgcctaaactgattgcctaatctggtgcaactctttttcttgacgaagtataatacctcgcatttcagtaaacattcactgccagtctgcaagaggattggcattttttaccctcaccgtattctcataaatttacgggggagctggcggtaccggtggattggttgggttatcaccccgctcaacagactcactctatgatctagttggtttttcagggttcattctttcaaataatcctaaaatcaataatcctagtgtgttaggcaccaatttcacacttacacacgtcatgccaaaaccctaactaacacataccttttcctttctgaatatatcaattactactcccaattaataatcatacttttcattgaataacataattttctagatgcttatatgctgcctaatagcaaagaaataaatatttaatcacataagaagataattatttactctcaacacttactacaccatgagtcgagattgtctttgatgacgattgtacatgtttagccggtcttcagaaaatttaaaaaccttagtgctctaatactgaattgtaatgtcctactcagaggaaccacaaatgtcgtgattataacatactaatcttctgaatcagggtctaaaaggcaagtgatttaaaacaaatgataaactcaatcaaataaataacatataataaatacacagttttactttaaaccaaaataattcaaattacaaatctattatcccgtaaaattcgtttacataatattataagttatttagtacaagctgacctaagaagaaaaatagaatttctaagtaatttcctattagacccaccccttatggtcttgcttagctggaacatgtacatatcatcctcaaagtcctcgatctcatggctgactcgacactgctttaccctttccggcacaacaagcacccgtcagccaagggccaacactatagaaaataatacaatattataattataataataattacacctcatacagtatgccactgcatatatactgtaccaccgcactagattatattattccatataataacgccactataataaatgtctatgtagcatagacctacatgttacgctcacacgacttttttacattcaaggccttactagggtttgtctcagttataatcaccgtgtctaacttggttatgccttacacgcataactctactcagatattcaattaatatattattgcacacttacaacaatacgcacttagggtaataaccctagtgttagaaattattttacca

SEQ ID NO: 23776 - DNA, 2755 bp, Cannabis sativa
catctacataaatcagcaagtagatgaaattattgtcttccagcatcttgtagtaaacacaactatcatgtttagaccttgtgaacctctatttcaacatgaactcatcaaatcttaaataccactgtctaggagactgcttcaagccataaagtgacttctttagtaagcagaatttgtcttcttctcttttttgaacagaaccctcttgtttttctattagtatctcttcatccagagttccatgtaaaaaaagcaatttttatatccaatttgtccagttccaggtcacaagttgcaatgattgcaagtgagactcttataaaagtgttcttgacgactgatgaaaatacttcatggtagtcaataccctctacatgtgaaaaactttttgctaccagtctttctttaaatctataggcttcgcaacaccctctatactaggttttagtttatacacccatttacaacttataactctctgattcttatgtcttttaacaagtatccagctccttttatctctcaaggactttatttcttcattcatagcttggttccactaatctcaatgtcttgatattctagcttcttgttagctttctggttcatgaagatcaactaggtctgtagcattgaaggtaaatgatgtaacaccaacttgagaaacccttgcagggcttgatttctcttctaactctatctcgagccagtaagtaatcttgtaagtcttcatctctagtctcatttgttccatgttcaatgtcacctggttgagtgtgtcatcatgatctaggttctgagctccacattgatcaagtacatgtgatgttgtttctaagtctatatgtgaaatatcttactcgacttgtttagagctagcttcagttctagattttaggttagatttattaaacacttgctcattgagacaacatctctacttatatttcttgtcatcaattaaccacaacttgaactttttataccactaaggtaaccaatgaaaacacctttcacaacctttggatccagtttacctttatcaatatgaacataaccaatgaagctaaaaggttttaaacgatgatatttaggttcataactagaccaaacttgctcagagactttaaagtccaatgcagaagatggagataaatttataaaataacaagaagtggcagcagcttctgcccaaaaagacttaggcaaaccataatcaattaacatgcatctaactttgttcgttatagttttcaactaggccattgttttgaggtgttttttctaacagttttgtgcctaactattccaagtttgatgcataaatcatcaaattaaaagttgcaaaactcaaggccattatttgtcctaatcttttaaccttcctagaagtttcttctcaaccattatcaaccattttttgaatttaccaaaagcctctttctaagttttcagaaaataaatctagactttcctagagaagtcatcaactattgagagaaaatattgagcattacaaagagataaaggtacatgtggacatccacatagatcaagtgtgtacataatctaaagtctcttttgatgtatgcaatgcatttgtgaacttcagtctgtgtgccttaccaatcacacaattttaacagaattgaagatttgtgactttttggatttcaaaaaaccttgcttgcaattgctaagttcaacgagtcccttgtgactcatgtgtcttagccttctatgccatacctcagttacatattgtaatctatagttgacactctagctagatcagttacagtatctacttgtaaaataatatagagcccttactcaggaacaccatggaaccttttatcacctacaagactataccttttttcttttagctgtagcctttgaatctagcacgtcaagagacaaaaaatttctttttaatttaggaataaatctcacattagtaaataccttaaaagtgtcatctgtcattctaatcttgattgagccaatcccttgaattccacatggactgttgttccccatcatgacttgccttgatctctcttctttgagatcaaagaaccactcttatcttagtgacatgtgaaatgtgcaccctgaatctataactcattcattttgaaaatatgtcatagaaacattaagagcatcatcataattatatgaaatattcaagacatcaatattatcaaaataatcaaaaacatttgtagaatcattattggaatttgcatttcattttgtaaattattttttctttgaggataatcctttctgaaatatccttcttggttgtagatccaacatgttctccttcctcaagatttagatctagaatttcctcttcccttgccaacttttttgttagtttccccctttgctaatcttcctctaacattgagtcctttaacatgtttctgtccaattttttggttttctttcaagtttaattccttcgagtatgcaactccaatcacctcttccagagttaatgtctctctcccatacttgagtgcacctctcatgttctcataggctataggtagataattcattaagaaaattgtttgatcctcctccttaatctttttttttttttttgataaatcaagaatttcattgcacaagaaccttttatattacaagctatagctcacagaagagcaaccatctatacatttatttgtgaaagaaaaataaaaaaaaaaaaaatctaacatcctcttataaa

SEQ ID NO: 23777 - DNA, 2127 bp, Cannabis sativa
  modified_base (1847)..(1848): a, c, t, g, unknown or other
gagaagacggtctgggcggtgaagagaatgacttctcgtttttcctgaactaattttccattttaatcatttataattatcctttttaatactttatgtttaaccaagtggaccaatgaaataataattaagggtatatatggatgcttctatattgaccaaatcaattaaataataataataattaagtgtctatcagtatatcccactttgactaattcaaatccaattttaattcaatacactacaatctacaataactttctaaaattttcgtatgtggaccaattatattacaggatagtgaaactattaatgagtctattttatgggtgtctattaaaaaatttcccaaaagtatattagcataaaacgtatatagattgttggataaatctctatactaactgtctcataatgaaatacattcaataaattacaaagaatataaagcaagattttttttacaagactcaacagaccattataacttttggaatagtcagttttcataggctaaaatattatagctctcacctatagctctttacagcacaaaaaaaaaaaattaaataacagcattcaagactccaacaacttgtcacaacacaaactaaaaagtgtaacaattttttaactgtttttcaactaactctcctcagcacaacacaacataacacatacaacaacaacaacaacattacaaaagaggggtcaacttgtccatttgagagagagagagagcttcggttcaacccttgagatagacagcaggtcatttgtacagagagaaaaaccaaaaaaaaaaaaaaaaagagagggaaaaacagagaaaagttagagagagtttgtacagagaaaaacaaaaattgaaagaaaagagatgagagagatatagagattacttgctagttttgtggcaaggaatttccaaaaccttgtaaccaaccttgatttgatagtgaagaatcaagtgctacttagagggtcgcttgacgtagacatacctcttgatttatggtggaactccgatatcaatcttgtgtgtgttctccatttgatttctactgtgtgtgtttcagtttagatttcttctctaaattgacaaagatcagttaagatctttgttgttgctggttttttgttttttttctcttgtgtttggttgatgcatgtgtgaaggaaagggttggaagctcaagacaaagcttggagaagaagagaagctagggtttcgagaagaagagaaaaaaaaaaagacggtgctcggctgctagggttagatggatgtggttttgtgttgctgggactttttcagcaacaaaaagagttgttttatatagctccaaatggcagtgttttcaaggaaagggctctttggatccgcacaagagggaaagttctcttttgaccttggtttcataactttaggggttgttggtgtagggacatttctggtattgtgcatttcctacagttatatcagagcttggtgaagtaagaagattcaacaacacctggaaacaaagtcaaacaagaaagatcatcaaaatattgaagaaactagatttgtgattatcaagaaatcgatatacagaaaaattctaacctaaaacatcatgttacatgcttacttttattatcttgctcaatttgattaatatgagtaatattagagttgttgttgataagtttgatggatcagaggattcactacaagaaatatcacttttactagcacagtttgctactgtgcttgtaaaagttacttttaccagcgcatttcgcaaactgcgctggcaaaaaagtcgaagttttaccagcgcacatttgcagtggctaaaatnnaatttttaccagtgcatttacgcgttgagaaaagtcatttttgccagcgcttttcattttgcgctggcaaaagttctaataccaatgttgatttgccaattaccccttttgccaacacatcagaagtaaattctattttaccagcgcaataccaaacttttgtcagcacaaaaatgtgctggtaaaagtgacatttcttgtagtgattataggatttggaggaaaaatattagagatcttcttactcaaaacaaattactaaggtttcttagtgaacct

SEQ ID NO: 23778 - DNA, 3302 bp, Cannabis sativa
atctattttctttattatttttttctgctaagtccttgtaattcacgggtgctatatggtttaggtaagggcaatgaaaagttagagcaaccatgaggcaacaatcttcttcgacgaatgtacatattaacccttccagtctgtgtggccgagttgctaagaattgttttgggttgtatctactgtatattttgacttactactgtatagagtccttttgtaacaagaatatctgaaacaaatttgtagtgtcgttatgttgttcattactagggttttatattagtatagtttttttatgttattgcggattttaataattaattaatctattattactaaactagtttatagaaccatatacgtgccatccctttagattagggtgttataatatctctctcactttctcactgtaacttctctctctattgtgttgcgtctcttttcttattctttggttgtgtcttcttgttattctcttatgaaatgagatgagtgttcctctttctttatatatcggccaatggacccaataagcttgctatcatatttgacaattgagttagttaatgaacaactaactaactaactaaccgagtttttggttgggggtttaaggaataataccacatattcccttattttaagttttcaaaagcagaaaatgttgtgtggtcccttgttatcttacattcatatttgtgaagaagacattcaatttttaattacacgccccatttattaaatttagaattaatttctgaaagaaatttattttattataaaaacattaattctatttaatgtaataatttcaccaccttcctatatatttaaatataataaattatatttttaatttcaaaatttttacttttataatacacacattaaaatattatattttaaattatatcattacataagtaaaaaaatataaaaatagaatcgagtgtggcttagttctctagtttcaactaaatcaattatttacatactatgctctctttttcatggtactattgtatatttttttaaaatataattatttaaatagtaaacaataataattataattaaaaataaataaagttggttaaagtttaaactgataactttgagcgaattaaagtttttaattttttgaaagttgataaatttaaataaatcaacgattttcttcttttctcgtatgcctcgggatgtttgtgaatctctcactagtgttttaggggttcctttagtaccctatcatgataagtatttaggactaccttgctttgtagggaagagtaaatgtggattgtatcgatgtattcttgatcgaatttagaataagttgtttggttggaagtcaaaactttttcgtcaggtggccgtgagattctcttgaaatctgtgattcaggcaattttgacatatgctatgggattgtttagtcatcctacgtgtattgtggatgaaattcatagactttatgcttgattatagtggggtggagatcctgataggcgcaaattacacttgtgtacatggtctaagctatgctagcataaggcaatggtggaatgggctttcgagacatatttttatttaatcaatcgttattggctaagcaggcagcctgtttatataactaccttgattctttggccggcaaggttataaaaggattttattttgcgaatagttctttattagaattggttgaaactaagcgggcttcttatttgtgaaaaagtattctttggggtcgtgacttatggatgaaaagagtttgctagttgattgggaagggagatatggttcagattcgggaagatacttggattgctaaagaccatgtgggttggacttactctttcaggggtggttcagaggtacaatatgttagtgatttgaaacgtgagactaaactgtggaacgttcctttggttaaagagctttttaatgaaggtgaagccagagctatcttatcaattcatgttttgtcgtttaactggaaggatacattatttggcattttactagtactggtatgtacacagttaagagtgggtacttgagctctgttaatagattagggtggggtcaagtgtcagcttcttcaggtcaacctcggtggtagaagttcatgtggtctcttttagtgctgcctaaagtaaacaaatttatttggaaaacaagacttaatttcttaccttgttatgcgaatttgtaacgtcatggcctgaatacggcaaaggttttccctatatatttccaaaataatgagactactttgcacgccctttggttatgtcctttgctcaaaggaatcagacaagagtggttgttgaaaagtttggacgctcttaagttggcctccaacttttatgatgtattagttggttgtatggatattctttcaccgcatgagatggaataatttgttgttctttgttggcaaatttgcaataggaggaatacgcttattcatgaccacaaattactcccaaatgatatggtgacccaatggtctttaagtttcctttggctctatcaagatgctcaaagttcttcttctaggccggtaatgccaaatggtttaatgccgatcgacctatctaatactacctgaaccgaggagctacagttgggggatatcaacttatttgtggatgttggtgttaataacaaagagtagaatattggtcttggagttgtggtgatgagtcggtccagtgtggttttctacccaggggcgatgccggtggcggcagcctacgaacctcatgtggcagaggcagtagccttgttgcaagggatgattctttgtcgttgactggggtatacaagtatgacgatattctctgactgtcttcgcttggtccaagctacattgagtaaagaaacacatttcattgaatttggcgctattattaaagatattagaaatgtttggtcatctttctcattataagtggtcatttgatggattagcccactcgcttgctcgtattactttttctttgaatactgctaaagtttggagcctgattcttcccctggtctttaattctttaaattttattttaatcgttttgatttgttggctttgtgccttttaaatgaattattctatttattttaaaaaatgtttttcattttcttagagtgtgtttggtaacactttttaatcggttttttgttttaaaattagaaaagtaaattttttttctaaaatcatgttctataaaactatttttacttttcaattttttaatagagaatttatattttaaaaacaaaaaaaaata

SEQ ID NO: 23779 - DNA, 3714 bp, Cannabis sativa
  modified_base (3252)..(3285): a, c, t, g, unknown or other
aacataatattttagggatagatcatataaagaagtgttgggattttcttcttaaaaaaagtacattatctaaaaaatagaataaatattatgttataaatatttttggtaaggagcaaagattatgtttagtaaataaacttttagaaattactgtgtaatcaaacagataaaaaaaactctattgtaataataataaattaattaaatatttaaaaaaaaaataactaacaagaatattataacttagaaatttaatgacaatatcataacttaaataaaaaatatatttattaattattacgttttttcttaaatttatacaacttataacatatatcaaaagaataatataatttttaacatactattgattttttattttttttttacaaaagtcctaaaatatatagcacttcaatagagatgctattataatcaaatattactttaagttagtttatgtggtgagaaaaattatttgttatattgagataaaaaagttaaattatattgtgtcaaaatttaaattgtaaataatagaagaaaattaaataatatttatttaaatagtaaataatatcttaaaagaaaaatgccccgttttaaatttctccctaggcctctcaacaccttgagatgaccctgaagttataatttctcaatttcagagattttagtaaactctaagtgtattatatatgttatatgtaaaaatttatatattttcgataatttttactcggtaatgatagaaatgcgatggattatccattagagtcacatgagttggtttagaatctttcttttaatagggtacacctatttgatatttggatatatcgggttaaacagggttatggtatttaactttttcacctctaaatcttatggttgcttaagagtgaaggagaagacattttggtaatttgccctaagttttattgtgattatttggtggtaaatctagttaactttggggctttatgttattatcatctattccagatagagaatcacagggaaataatttacaatttgaaagatcaattatggtaagccctaaaacatctaattttaggtctttgagaagaaaatgttggtttgaggatgcaactaggtgaattaggttctgtttgaacttgggcttattgtgggatatttttttaagctaatggaagttatcttaagcttctttgtgctagtttggttgggtggttgagttgttgagcaagtttgaattcaagaactcaaaaataactcaacaatggtagattttgaaattctaagttatactcaattttatcacttggattatgttcgttgaggtgtatttagttattctggagcttggtgtgaaatttggggtagaataaagtgcgatttgaagtttttaggaatttttgtagaaaaacggttcacaatttttctaaaaataggcaagatcccaaaaaacagtttaccattttgggaatctagtgtaccagtttgggaaattttaagagcctcaatttttctattttctcgatatgtatggtattaccacgctatttattgatagggaaactttttattttgggtttaggtccccaaaaaggtttcaacaagttgtttatccattttgcatgattgtgacatagagcctctgttcagcaagttaaatttctattcaggttgacagacacacttcaatcagcaaacgaggtagcataagatatatatatatatatatttatctgtgtatgtatattatatgcatgttgtattatgtgattcgtatactaccaacactagtacagttgcaatgcggagtgcattgatacaacatataatgttaagggatttgcacaacattaccaatactagtaaggggcatatacttagtgcatgtggtagaatgcttagttgtgctcgaggtatggcttaaccctaccaacacttgtatgggacgagtacatagtgcatgtggtacagaggtcatttttttaagaatgttcttgattcatctgttaagacttatagatcggtgtatgggcgcctagatacaagtcagtaatatggttatatgttttatacttttcttattgagtctgtcaactcacagatttgttcacatgtgtaggtaaaggaaagacaaacgttgaataacagttagtccaaatcttgaagataattgtacatattaggatggttaggcctagaatgttcagtctcgaggcgacgtgggcttctattttgcattcgttggccaacactttagtaaaaagtatattctgtgtttggttgtaaacttttaacgggatccttgaagttatgtaaaattatgtaattattaaagttaaagtttaatttcagttttaatttctcacgttttttgaggaaacatttgattagcaaagacgtgcacattaattagaaaattactgtagcatacttaaacaagtagggcattacaatttggtatcagagccgccagattgtttaccgaagaccgtcaagatatgtataatcatttccagagacacgctcgactcacagttcagtaaacctttacttttacagtaatttcttttattagaaaagcatgacatgaagcatgttaaaaatatgttagctaagtaatgcattgcctaaaattccatgtatgtggtattttgattgtataagattgttgtctgacaaaacagacttatgggtttgcaggctaatcctataatatggatgcctgacaaaacacgaggagttagggcaatatggttgagatcagaggcagtcagggaagtcaaaaccctcaacatctccatggacgcggcagaggtcgtggtagatttcacaaaggtggttacgaaaaatccaccacaagctccttaagattgggagaaaatttcggtagaaatgcaagctcgaattaataaccaagatgaagagatccataggctaaggtaggagggtcctcctgttatacctcctcaacaagtgtcatctcctcttattctagcgtttccagcagaacaacttgttgctagcaactgcatggagtctttgtatgagaagtttcagaagcaagcacctacaacctttttgggaggcccttatgttatgaagtcgaccagtattagtcacaaaaattataatttgttgtgactagatgtgtttttagttacaatacttattgtgactaaaactattttattgacattttgtatctaatattatgttttaatcccaagtaattttttgttgtgactaaannnnnnnnnnnnnnnnnnnnnnnnnnnnnnnnnnctaaaaaattatcactaaatataattattttttataatgggtataagtgttaatttaaaatcgacacgaaaagtacaatttataatagtgaaaatttggccgaagcaggtgctgtacaaaattgattgaagtaatagaaaatagatatatatatatatatacatatatgcatatataatagggtaaatactattttggaccttatgttttacaaaagttaccaatcggacctttacaaataggaccctgaattatatttttgttaaaataaaatttaatcataatccgatctaaaagtactagctatgacaaaactgtttacattttctgcatctgttcgtattaagaattatcttcaagttggttatattaaaaaaaaaataagttgccaaaaataagttggttatataattattttttataatgggt

SEQ ID NO: 23780 - DNA, 2802 bp, Cannabis sativa
tgcatctcccaggaagctacaaactgttcaccaaaacttttatgaaggaaacttaagcaaagtatgctcaatagactcagatatcatctcctgaagtcgaatatgaaagaaatcagaatgtaatcctcagcaaaataaatagataaataaaagaaaaaacaattataacaaaggcccatcatgattcatgaccccttggctaaaggtttatttttgaagaatcacaatctgatgacactttccatatgagacagcatatgataccattgaagtagtaaaggttcatcaaaagagaataatataaatctttctacttctcctatctttctataataccattaatattccaaaaccaaacagcaagcaataacaaagaaaatcgtaaatcacttcattacaccaagctagctacttcaaaagggtaataaaactattatatttaatggccaaaccaaaccagatcatcattaacactgatatatcaaaatcataactaaataaaaatccacaataagttagctaccattagtaaaccagatgaaacttcaaagactaatcaaaacaaagaaaaaaagaatacccagaaaagtaaatgaaaattgaagtcaaatcaagctggcaaagtagaagtcagctgaccctttataagaaaattataaaaacaacccagaatgaaaaagagatgttatgatcttcattcctcacaaccccatgaattgaaattgcagatcccaaaataagaacagtaatttctcaccctttaaagggagacatttgagacaagaccacctgatgtttgaccacctagacggatatagaacatgggcttttcctctttccttgggtataacgattaacagggagagaatccagacacagaggagaatcaccactcacaaaggaagcaaatcactttcctttttttattttatgaaaaaaatatatataattatcgaataaatatgatttgattatgttaataataatagtacaaataaaagtacttactttgatttgtattttgtagtgtttattggttgaggggccggtgttaaaagtgggcattcattccaaagtagttggcaaccgctaacctcatatataggtatggagtcgtatttgactcactaatttcattaaattatgaaccccaaatatctgcactccacaaaaatatacaatttgtaatgaaagatattatttttgttttttaaattattttaatttttaaaataaaattctacagtgtttttttttttttttttttttttataaattttgtttgacgttaaaataaattaaaataattattcagaagtttgtattttttttcattaaaaaaaatttaattaacaaattatatataaacagctcagttcgacacatttatttttcctaatttaagaatatttccttataaaaattaataatatttaatatataaatacttaatgtttttagttttatgcataaacacctaaacatttaggtatttatattgaaaatgtaactttaggttaaaaaataagaaaaattgtgtaacttgttggttgtttaaaagataattgtatttcatttcaagaaaaaaagataattgtattacattaaggattttttttattaattttacacttaaaattagtttttttttacgcaactaaaattcacataataactcacgtaaaaataattgaaataaactaaattttaaatttaaaaaaaaaaaattcaaaaaaagtatgagtttattccctttaaatttaaagctaaatgtatacaatttattgggttaactattcctaaattgatagtgatttaaagagtaatttgcggcataaatacttaagtttaaattccagttgtttataaatacctaagtctaattttttgtggtaataatacttaagttataattctgaaacttttataggtacctggctgtcaagtgtcaattaaattgccacatgacaattcctaattggtctatatcatttattttttattttttatttaaaatttaatttaaataattaataaaaaattgattagacatttaacggctaagtacttatgaaaattttagaattataatttaaatattattatcgctaaaaattaaatttaagtatttatttacaactaagagttaaatttaagtatttacgctactaattactctgatttaaaatatttatatatttatatgtatgttgtgtgttgcattgtgattgattcaaagatttaaagtataatatcatctaggagttgatatcaatagtaccaaattaaaactatattatttataatgatattttttaggaaccaaaaaattatatatgttttgggtgggaaattaaaattggagaatttattcccaaaataattattttattttcttacttttgcatcacaaagaaaattggtaaaaggactataaataccaccacgtgttacactattatttgttttaatatccattcacatatattttcattttataactaacataaaaataattaataactaatggcaagatgtcactaatggtgttgaactatcactaatatctagtgctagtagcagaacttttatttaaaaatacatttaaaactaattaagtaaataatattctaattaataggttataacttaataaaattatattaaaaaaaatcaaaatacaaaaaaatatcattataacaacaataacattaaccaatccttaatactatatcataataaaattatttttaagtaaatataatatttatatatgtatacattttaaaataaaataattaa

SEQ ID NO: 23781 - DNA, 1522 bp, Cannabis sativa
atacatataaaaagaggtatgttcaaattaaatataaaattaaaagtaaatttgattaattgattaataaaagtgatatttttcaacttacccgaataatcaatgactatacattgaataagggttgtatatttgtattcggtataatagcggtataatagagaagagtatttgcagtgcgaatggtgcagtttttgattattttttttaaaccaatctgtacatgtagttttttcaatttttcaaaccgcacttgtaccgcgaaactaaaaactaccatatattttttcaataaaattatcaataattaaaattagatacacatcattatgtaaaacatatgtacaatttaaatgtgtctataattataattatgggcggatccatatatatagaggccagaccaagcaggcatcccttaaaaaaattggaaatcaaataaaattttatttttaatttgtttcaatagtattatatattatttaaaatggaatgaaatcactaagggttcatttgttatgtcgtattacatcgtattgtattgtatagtattatattgaattgtatttcatgtaatatttttatgtaaatatatatatattgtattgatttttatgggcacttaaatatataatattttagtataattaaattaaaatttaacatagtattatataaaaatatgatatataatctaattcaatataatataatacaatacaatacgacttaatacaacgtattaaacgaaccctaaatggacgaatgatatctgaaaatatatatgtagagataataataataataataataataataataataaagtgaattgtcaatagatggagaaatgaaggagcattgtccctttcaaaactataatcaaaaacaaaataaatgaatgaataatgtgacatcaattgatgaccatttccaaaccacacataagtcatataagctagagggaagtagttgaatattcttttcaaaagagactatcgcaataatgatgatgtttatttcgcttagacttaatgcatgttaatttagattcatcacaaaatcaattggcaatgggagaagtagctcattcatcttatatactacaatttatttccacacattaacaatgtgggattaactctaatacaccctcctcacgtttgggcctgaaaagtgtgggtaaaacgaacgacctttaagaaattacaggaccgaacgtgacatttgaaataatcccacaaagccatatatcaggaaatttgtgggtgtacacgtcggaaaatttgtagattttgaaacaggtcaaagaccccaacactggaaattggtacacattgaccgaaaggttccaaatggaggttaaaggggagacaacggaagtatttatttggaccggcaacactttagctcacaacgggttataaacgactttttggaccggtggcaatttgggctcacaacggatcacaagtggctctcataccatgttagaatctgagaaataagatgaatgaggttc

SEQ ID NO: 23782 - DNA, 2714 bp, Cannabis sativa
  modified_base (245)..(245): a, c, t, g, unknown or other
tggaggcttgaagcggggacgttacacaatttggtcagttgttcatgattgtaagagtttattgaataatttctgtaatgtttcttttgttttattaaactatttgcaaataaaattttggcacgtagctcttgtttctctataggtcatatttttcaggatgttgatttatctcttaaattatgttctattgtaatgacataattttatgattaatgaaagtaatttttaataataataataanaataaataaataaaaataaagagtaatttactatgtaaatatctaagtttaacttaattattattacagttaaagatataaacttaagtatttatgacgcaaaatacgttatagaaggcaacatactcactttcccaatatttttctaatctatatatatagatatatatgagaaaaatatgaggcggtaatatgatattttaaaatttctctaaataccactatttgttctcttcttaattctcttatttttttttatttttttattaactttataaatattaattgattaattaatttaaaaataaaaatatttcgtatcctatatattctctaatttgtctgtaatgccttacccgtaagggcgtcacgtgtgtgcttttatattttagtttatcataataaactatcgattttagattttaggaagaaaatgtgatttaattaaaaattttagaaagtcaatttaagtataacttaaactcttttttaaaatattattggattcggggatcccttagttacaaatttttacaaaagaaccattaaataagtttgttacaaaatattactacatattcaaaagattacaaaagatagatcctgtccaccgagaaccaaaagatggtgaggctaatatgtgcattgtcgagagacctctgactcatggctgatatattttccttttacctttacttgcaccacaaaacactcgtaagtcacaaagactcagcaagaaaaataaataaaacacaagcatcacatgtagcacaacatttttaataacacagagcatacattgtaacatatagtttaggcaattagtcaaagcgtaattaaatgctaataattaaatatttgtcttataagacaagctgaaactcgatactttataatacacccttaaccctcgttatcaacaagtttttaatgtcactattgttgcttaattaagcaatcgataagtaagaaaccaatcaacggtttcaaaagagagtaatatttttcttagtaacggtaattactgtatcttatttttgacatgttaagcgatacaattgacttttcttacctcaagtccaaagtcaggtgtgcgggctgacctgagtggaataatactcaatgatcgcaggccctatgtcacgacgactacaattggtaaaaatcttaatttaccccgaaccaagacctaaactcaaaatcggacaaactcctatcaataaaacacaaaatctagctactggaaacattccgaaatggtccaccgtttcttagaaatggactaccgtttttttgggttctgccctataaaaacagtcctccgctgtaaaaacggtaaactgtttttcctatagaacagcccaaacttgagtttttcacaccaaccccacccaaaacttctccaaacctattgaaacttttcagaacaatttaacaatacttcatcattcaaaacacataaaagtatcaaattagcaaactcgccattgttgagttcttgaactcaactcaaagcataacaaccccataatcataaaattaaagcttaaacaaccttaatttacattaaaaaaaaaaactctagcaaatataaacattcacataacctaattatcaaaaaacccctctaaaacttaaccttagaatcctaaaaccttcaagatcaccaagaaaacttacctcaagactgtatagctcctagaattgattaacttgaccaagattgagatgaaaagagctcgagttttgctagtttttctttagccgaaaagagggagagagaaagagttaggtgatttcttaggtttttgatttaactcttaattatctaaactaataaaaactaatataataaatcaaatatctagcttatggtttactagataatcaaataaaacaaaataataaatcttagtaaaatgactattttatcctcaattaaacacttaagttagttaatattctaggagtattttggtcaatgttatctaccccgaataatttgacaactcaaaaatactaaaacaatccagtacaatcctaataaaatttattctattaccgtcatgacattcttggccaatccattgagttttcactgtcgccgaactcgaaatattttatttcaaaaataacatatataatactcacgtgtttcaataaaatcttcataattaataaattatgctcaattattagaagtcactaattatctcataattgactcaagtaagattatataaccttactctaatattcatataatttacatatttttaaaaacatgtctaattaaacataattatatttttacagatattacattttctctctttttttcttactaaatattaacataaaaaataaacaaacaatcattaaaatatttttttttctcatttagctgattaactcaactataaaaaatatcaatcactttattcatatttttttttcttattttttcct

SEQ ID NO: 23783 - DNA, 4803 bp, Cannabis sativa
  modified_base (2030)..(2048): a, c, t, g, unknown or other
  modified_base (4498)..(4500): a, c, t, g, unknown or other
tcagaggtgatccgtcgggtcggagctccaacccgctccaactaaatggatctttttgacatgcctataaatacatgatacacaaaatattaagtgggcctattatcaaagaattcaaagatggtcctcaactcactaaaagaaatatttttattttattaaaaaaattaaaaaaaaaaacctacaatgcatcttaaaaaaaagtattttcgttctccatatgttttggcatttaagagaattttttattataattattgtcataatcgtatacattgtagttatttaagtctacctattaaattttcaaaaaaaaaatctaaataatttacagtctcgaaaataatatttaaatattttgtgactattttttcttattgtttgaactttattattgccaatataaactagtcgattttttttaaaaaaaaaattataagtaatcctaaataactacaaagtacataatcatgaaaaagaattagactaaaaaataatttaatgtcgaaaaagatatgaagtgtatgtattggagaacattgtctcatatgtattaaatgtaaaaatattaaggcatacataagaacatggggtactccacttattatattagtttcaaaatggaatctcatgtttctcaacatgttatcaaaaccatattcttagcgggctttcgatctacatctatccagatggttagccaactatatgagatccaaatggtgcaaatacgcttgagattcgaacaaaataagatctagatggtgcaaagatgcttgagattcgaataaaaataaaacgaacaaatgacacagcctatgataaagtaattcaagattagtgagtaaaaataatcatcatcttgagagaaatattagagaatattgttctgtataaattaaatgtaaaaatattaaaccataattaaaaacttaaattactctaatcattacctattaattttacaatagaagctcatatttcttaaggcaaacacctttttaaggattgtcaaaatgttaatttactagactttgattgaaattgtaaaatatatcaaacccacaacaattataagtatatgttcttgcaaattctttccacaacacaacttaaactaattcttacataaactacaactttaccataatgatacactgcttcctagcattgtcattggctattcttctatggctataaccaattaacattaaagctacaattataggtgtatgatcatctttagttgtgagtttaattggtaggaatattgactagagatatttataagtgtatatattaattaaccatacatgcatacatgtatttatgaagaaaggaaagtccctacaaaaggtcatatgggattttctttgagtagacatataaataggaaagaggaccccaattgaaatcaatgtgtcggtatgctattaaaatttgggttagagagtttgaaaagaatcaaacatacccacctagtcccaccttctattttatcaataatggacatggatatgactttccttctccatcaatattttgcttcaaacttatgtaattatgtcatttattgaagtcccaacataattactaattatcatcatgtcatccacttcttaccttgcttataacatcaatacatataatgttagattttagtaaaatttagtaaggtgtatggttacatatcaaaattaaatagcaatgagcaggtatatctcaagccaattgaggttctgagccaaaaaaaaaatctaattaaacttttgtatatgaatttttatgtttttttatatataggtgtaagaatttaaaatataatgttttgaaaatataattgggcatttcttcttaaaaaaaaaggatttttttgtttcatttttatacttcaaaacatttttttttttttgtatatttacggaattcacacataatctcttatagcaactaacagagtaacctaaatctcaatcaaaatttgtatagcaacccacatagaaactaccagagcaacccaaaccgtaaannnnnnnnnnnnnnnnnnnaaaatagtatatggggtaattcctaaaaaaaatattaaatatagtataaattaggtatttttttagaaaatagttatattatttaataaataatagtaaaaatacgaaaatagtatttttaaaaataaatttggggcttttttgttaaaggattttttgatcctgagtggggggccttgggcgtgagctcctactgcaccacccttgagtcgaccctgacaatgaaaggagtaactcatgcatcttatatataattttggacagctcgatcaacggatcacaagcagctctttttggactagattgctggcttacaacagatcacaagcaactctttctttttttgctcgtttttttagactgctgatacttttggctcacaacggatcacaatcgactctttttttggctcatctttttatatcaatggcattttggttcacaacagatcacaaatgactctttttttactcactatctttgagtcataatgagctcgtttggcttgtctttttggaccagttattgaatttggatcggatactcattagagttttgtttggttataataccatgttagaatttggtaaggtgcaaggggtccatatcaaaaccaatctacaaatgagaagagaagtccatacatcttatatatgatgttatatttttataccttaacattgtgagaccctaactataatgaccgcatgatttagatatggattagtggggctatagacattgattatcatcattattattattaattgtgtggatatttatgttaaatgtaaaatatgttatttttgtgattctagctcggtggcgatggaaaatacaatggagggttatctaagtcacattggtgaacagagaaccttttattttagcaagttatgacaggttgtgatcgaactttgagtttaggcgaggttatggtattgtaccattttatccctaagtcattttattacttaaatttcaaagcaaaagcaatttggtctttttaaattattgtggataagtgtcctaacctagttttggcagctgaatttgttttcttattttattattagatgatgacaatgatgctaataacacatcatattttgtaagtaatagaaaattgagataataaactagaaccatcctccttcttccccttcttgttcggtccagctcaaaccagaaggaaaaccattgctagtaccatatttatttggattttaagcttggttttgaagtaaattgagtgaaggtaaaatcctagaaaccatattcttgatattgataaggttttgataaatttagggttgtaacttggaaattttggttctaattagttggattttggttagggtagttttctgtggattataattgatgatttaggtttatttgagctgttgttgttggttgattttgaggctgagcaagtttgagttttgactcaacaataacatgttaagttttactgcttttacttggagacttctctaaaatgatattgttggtattctgggaagtatggttgagtttgggaatgatttggttgagtttcaaaatttttgatctattctagtatgaatcggttaacgggttctacagacaggcaggacccctaaaaaaatctgattttactagtttgagttatttttagaaccctagtttggtgttttctcaatatttaggcattactttattgtttatcattaggttaccctggttataagtttagatttttggaaagggttgtccaagttatttacctgtttatgtgaatgtgacataggaactccattcagctcgaaaatttttcattcaagtcgaccgacacgcttgaatttagaaacggggtaagattagcataaagtatgtatatgtatgtgtgtatgtatgtaaatgcatgttagctatattgttatacactaccaacaccggtatggttgcgatacggagtgcattggcacaatgtatggtatttaagggtatgttacggtgttaccaacactacattagtgtgtacgtagtgcatgtcgtacaacacccagtagtaccccgaagtacggttcagccctaccaacactagtacgggaaacgtactttagtgcatgtggtatagaggttgtaattctgttaagaacgttcttaactatttggtgagccttgtaagtaggcacttgagggcttaagtacaagtcaatattacattgtatattttatgcatatcttactaggtctgttgactcaccaatgtgctaccatgtgtaagtaaaggaaaagctaaggcggaggaacaatgagtttggagcttgatgatgattgtgcatattgcggctaaacaacctgaagagtttcgatcttgaaatattttgggattatcttttgtagtcaccatgtgatatattatataaatatagggatatgattttgtcccgtgatgtactttnnnggaatgtattccgtggtacattagatgggtctcaggctacattaaatgattgttagcgtacgtttctactttttaaccctaattatccctagatcaatctcagccgtcagatcgaataacttcatcatctgatggctgtcgtacatcacggattacaatccgtgaaaatacaataatgagacataatcatatccctataaatatattgtgttgtcaaaataaatttgaatttggaatcccagcttgtaaagttatatctttatatattaaaagtgtctatctaacggcatttcttggtttaac

SEQ ID NO: 23784 - DNA, 2015 bp, Cannabis sativa
attgatcatatgcttgctttgcaagtttctcaacctcaatattacactgatgaaattatcaaaggatatattctggttagtaatttttcttaatttttttaactaattatttacttatatttaggtctaataataatatgtatgattatttgttatgtggggtatatatttttgcttttatgtgtggggagtattttttttatttgaatgcatatattattgttgggaccactttatcactttttaattcaatttttttctgtaaataagttattctattgctcaaaataaatatgatatgttacaattatttatcatcattttatactttttaaattttcttaaataatttatcatataaaaaatttgacattacatctttgatcttttgtatgtgtaatatttagattttatattttgaatgcacattattattatttaaatatataaattttgatacatattaactaatcatagtctaatatactattctttttctatttaggtactattatttgctgcgacaggcacttcatcagcgacattagaatgggcattgactaatttactcaacaatcctcatgttttggaaaaagctaaagctgaaattgatgaacaaattggtgaacataaattgatagaagaacaagatctttccaaattaccatacctccaaaatattattcatgagacgttacgcttgtttccagcggctccaatgctcatacctcattattcctccgaagattgtattgttgagggatatgacattccacgcaatacaattgtaatgatcaatgtttgggctatacatagagacccgaaactatgggaagatcctgagagttttaaaccagagagatttgagaatagtgaaggtgttaacaacattaacttgcttatgccatttgggttgggaagaagatcttgccctgggaatggcatggcaaaccgtgtactcggtttgactttggggtctttgattcagtgttttgaatggaaaagagtgagtgaagaaaaaatagatatgactgaaggaaaaggggttagtgttccgaaagctatacctttggaagctatgtgcaaagctcgccctattatgaactcaattctctaaaaatcttcttgaacaaaaattaatatatatttaattatattatagggtagattttgttttgggtgtgagagtgtgctttaaattttttttttgagttacattgttatttagactatttaatatttttgttgaacttggtgtatgtagtgattatattataatatatatattattatatagttaatttatatgtgtcatatatatttaagttatatttaaccttatggtgtcaataattatatcatctacgataacatctccatctccaatgccaattttaagttggctatatttttacaatgatatctattggtatgaaaagaaaaattgtaactaaatacagcgccaaacactataaaagattaaaaaaagaagaaaggaatacatacttattcctcctattccatacaactatgtaaatattttttaagggttaaattaaaagaatagatcatcattataatgagaagtagagatagaagtattccaacataaatacatatttgtctagtatagatattacagcctcaaactcaatcacctgtttcttggacaaacaatttgttcaaaaaggatttcaaaatctgattgtaagggtctagtagagaagatgatagctagaaataagacctggagttctaaaatttttttatgttagaggaatggttcttatcgactctattttgctatctattaatttttattggtctcaatattctatcttgtctaaagctgtggtgtaaaacattataaggctatgtcttcgacacccaaaccacctttcttcttagatttacaaatatcatcccaagcagggacggacccattcacaataatgtgggggctatagccctcactaacaaaaatattgtcttttaaaaaattaaatgtaaatttt

SEQ ID NO: 23785 - DNA, 3628 bp, Cannabis sativa
aatcactgaaatagtaaaattgaataaaatttgacaaaagtctttaaatccaacgatatcaatagttcaagagtatttttaacgaccttaaaagttcagagggctgatttgatatatggcatgatttgatacatatcaaagacaaaaattccaattagcccttattttatttaatttatttaatttttgttttcccaattcttattttgtttttgaacaaagattatttagttttctataagcctagaccgaaaaagctgtcggtgtctacgccgttaaaaataagtaaatttagaaggtggggcccacttatccaggtggaaataataattaatgatacaaaacagtgaagtggcagatagtggtaaaataactgtcaatcgccgtgaattccacaattacccctccctcgttttcctattaaataatcataaaaataagtccgtacaaaagtgacggggttgctttgctttgctatctgaattttgattctcaactatctcacagtgttcctaaaatcaagaattagacatttctagggcacagcattttcagaaattcccaatttcacacgagcgaaagagagggctccaccagtgaaattgagcagtttggagaaaagagtagcgtaattagatttttttgtatattacagagaaaagggagtggacaaaaaaaaagttagggtttttggaggaagaagatgacggatgtggtattgcatatatatgatgtgacaaatagcggatccgagaaaacgaacaacaccattgttcagatcaataagatcttcaaggacggtattggtcttgggggtattttccacagcgccgtacaggttacttttgtttttattttacatttgtctatgtactaaatgtgtggtgttaaaagatggtgtctttattgagggctttggttttagatgggagatctagggttctgttatggttagtagttggaattttgagttcggtgaaacctattcatgggtgttgtttgtctgtggatgatgattgtttgttggggctactttaatgattttgatgccttatgcacagtgttgaaatttataaagctatgatttcaagcaaaaatagtaattctcttgttttgatccagttattatactcgtcttaatttggatttgtgggtaaattagctgtgtctaaaatttgtttcccttaaaattttgttgggttcactgtacaatgtaatttattcaaaacaattttgcattttacttgaagttgaaatatgttctactggctcatggtttgaaagtcatgacttttgttatctctctccatgtttgtcatttttttatttattcttgtatgtactgttgaatccatatgaacttaggtgatgtgatctgatattttgcaagctaataaaggaagatttgaagtatgcatttttacttttgagttaaagagaatcgtacacgaagttaatcggataccttatgccttgataggtttttggtgaggatgaatggtcatttgggttctgtgagcaaggaactggtgtttttagttgccctgcaggtaagaatccaatgtattcctaccgtgaagccattattcttgggaaaacaaactttccgaatttcaaggttaatcagatcttgagggagcttagcagagagtggcgtggagattcatatgatttgttatcgaaaaattgcaatcacttttgtgatgagtactgtgaaaggcttggtgtgccaaagcttccaggtaattaatttgagattaattgttctctaactttttttaaagttcatttcgtggttctgtataattaccggactatttcaaagcttcttgttgcatgggaggaattaactcagctttggcagttatacgtatatccttaatttcttttacttgaaaattgatatgactgcaggaatgaatggaatgaaataagtttttttttttaataaataaaataaatgaggtacttctgggtttaataggctaaacaagttaacatctgactaggtgtgtagaactgtgattatatgcattcatttcacgcatttccatttaatgctttacttgctggtatttgtttttgtgtggatatgcactagatgttaaatttatacataaggagcttattttggtgagattttgtaaatgcaaatgtatttatttactgcttgtctcactcatattttttattagttcctgggaaagctacctcaataaaataaaataaagaagttaatgaactcgccccaccttgtcttttttggatgcagaacaactttgctactttatttggttagttagcaagctatagcccaagagcttagtaccactctttgcctttttgctgcaacatccagtttttctaattatcactatattgtgcttattataatgatttcttacgtaaaggttgggttaatcgtttcgctcatgctggtgatgccgccatggaagtagcaggaaccacagcattaagggtgcgtgtctcttcttcattgagataatttacaatcttttaaggcgtttgttcatgtgtgatgctcatgctgtgattttgctagtccttgtaataagtattttgtcaacgtttctaaaggctaagtagatgcatgtgcctattaaattagttaccattttgcagtgttgtccatattgcaattatcacatggtccccaccctttttctaccaatattacaaaacttggatttaataaatttgttttcctttagtttatatttcatctgtatccaatgccaatcaattgcacttgcttcatgcgaatcgtgtcttctttttattgctgtttgcagtttagacaagctaaaacagagattgtgacagcaagcaaagtggcatatcgttttctcttgggtgttaccaacaatgtggcaacacctactgaatcctctggaaattcaaacagaggttcccctagatttcaaggtacttggtttaagaacttggttacaactggcgccaaaccttcaactagttcagagatcgagaatcaagaagaggattttcatcggcaacacccgcattcagatgcagtgtcacaacagcggcaaaattcacaatctcgacatgacatttgaatgttagtttattaaacatgcttgttatatgtagctgagaccatgcaaaaattattgacgtttgctattcatttgtgtatgaatgtaaaattttcttttattgtttaactgaaatctgcttatagatgatcccaaagcttaaatgttcttatagtgcgtgcgaggatatggaacacactaccaactgttccaatttcattctaaatcagtcaatgttttgcataatttgatattgccttttactagttgtcatttaagttatgtgttcgatgctctagccttttattttcttggttaacatggtgtagttatgcaattttgtttgaaggagtagtgagtaatgatatggatgcactattttttagaacattggcatgtgatttcaattgaaccaaaagagcaggttaggaaaaacaaattgatatatagggcaagcctatggtaggacttaacaaaagtttcctatcggtaggaaattttttttgaccattgattttagaccatgtggttattataatgtaaggtgtata

SEQ ID NO: 23786 - DNA, 2165 bp, Cannabis sativa
tataatagaatcttaacaactcgcaacactttaaaatttataatttaccaaacacttagctcaacttttttctacagttctgctacatctgtttttctccacagcacagttgcaactgcttttccataaagcacaattgtgccaaactggccctaagtcttttgtacattttttatcatttttttcctgtatttttttaatgaattttacttgcttatttttttttaaggttttcttcataattgtttattagtaaatatataaaagtgtaaaaattatatgagcatgcatataatattaatcttttttgtattgttattcttcttttttttcataaatttttgttagttattatttaatttttattctaaactttgtgcttattagtagataatagctaagaaaatcagatgaacttaaattacaatagaacgactaatgatcttaccttcaacaagcaaactgcccttgtttaaatattttttttaataattgtttaaatgtaattatgagtaattactattttgaaactttaaaaatcttatttttaatataagaaactttaagataatttctaacatgaacagaaataaaaaatgtaaccagttttttcataacatttctagattaaattattattaaattttattttaacaaaaaatcaattcaagatcgtatttgtgcaattttagaaaatattgactctattttgtcatttaacaaaaaaaaacagtccaattgataacttttgtaaaatacgtaatccaaaaaagtatttactctacaattaataaaagtaaaagatatgattataacacacatatttggacgggtattaggtgcctctactaaaagatgataaatgttatgtgcgtataataaattattgatttgatggcctcaactacttttctatctatatatctaattaattattactttgtatatggtgcggtagtgttacgtacttatctatgtcgggaaacaatattgggtccctcgctggctctatagacaatatagacaatactgactatactccattccatatcgaacaatcactgttcgaattgtataataaaaacccatatattttataataattaaattttctgcattcatttctaaaaacccctatatatgtaaatgcacaaagaatgtaagcgtgcatatgttatataataattaatgaacatatttatatgatacttatttaatactttgctttaatttttctattgattatttattaccttttgtatcttgatcaatcaatgccattattataaattcaagtagtattaatggtcggcttgctacgaagatcctttcttatttaaaaccatacaattaatgtgtatatatatggaacattataattataaatttttgctccaaaaatttataatagatataattgggatattattctaaatcctcttctcttatatgatcaccatcacaatagaatacaacaattgaaatccctagtttatttatttgttgatctctgcaaattggacattagaaatataatgatacatcgatcacagctgaaagagtatattgtttataattttagttataattaaatttattttatgtttctcattaaaaaaagaaaaagttactgttagtatattttttaatttaatttttttcattaaaactttttttttttagtcacaataaattttttaattaaaagtaaaaaaattgtcaataattataaaatataattcttattctattattaaaagatccgtaacgtaactaaagatattagtgataaaattacaatttgttgtgactaagtatatttttaataacaatatttattgtaattaaaattactatgttttaattaaaaatatttttttttgttatgatttaaaattatatttagttataaaatttttatattataactaaaaaaaattgttactaaaagttaattttattttttgttttttcgtggtaatagaaaatgaacaattttaattagtggcttgctaaccagcttataagtctgttttcacgatcgatgattacacttttagatttatatgttaataatttatatttataaattatatatcgtttttcttatatgttctagcgatcatatgttataatttgtatagaacgtaactaaatatatagtg

SEQ ID NO: 23787 - DNA, 1981 bp, Cannabis sativa
ctctaagcgattaataatttgactacccttaattaatgttcgtccccactatattttgttatttgctcaactcaactcaactcaagtacacaagttaatcaatcaaattacgaacgaaataaagaagaaaagcacaaggcatctatttataaatataaatatatatttaatttatatatccccaaccaacccttttgaattttatctgaaattcttcaattaaatgtggtttgatccaagaatatcttaaacttaattgattggggtttgagcataatctaccaagaaatgatgtatgatacttataatatttaaagaagatattcattattatctcacggaaagtaagactactagttgctcaatttaatttcataatactaaattgtcacttcataaattggaacacacataagaaaatagtataactaaataatacagaatttaaacgcatccactaagttgagatatgaaaagtgtcatttattctttccattttaataaataataaaaattattttatttaaagtacgttgggtaatattttttaattgagaattaaaatttttaaaataaaaataaaaaatcactttcaaattttttttaaatagtcttttttttcttaatatatagtttggactccgaccctaacctagctagatcttgaaaactggacccggaccccaaccaggacacaaaccaggactccaactcctaacccaaaccccgacccagacccgaacatcgaatcccaaaccgaaccttgatcctagaccctggacctgaacacaaactaggactcatacctgtcctcgaattcggcttcggcctgggctcagaactcaacctcagacccaaaccttaatctcagacccgacttaaataaaatcaataaataaaatatatttttgtttttcaaaaataaatttttactattacttttgtgaataaaaagtttaaaatatatattatcaaacgtgatcctaatttgttataaaaataagtataatttttttttaaatttttttctattaatcttttaattaattatcaagaaaacaatacaactttgatcacgcacatgcatgttagataatatctcactatatgttacttgggaaaaaaataataaatcatcagtttcgtagtgtgattattgagagaggggtattcgaacttagaatctcaaatagatgtgaaacctccatacactattactatgaccaccaaaaattaatttttcacttcattttaatttccttagttttaatcatttatatataaccaaaactaatgtaagatttttctgtaaactagttttataaagaatatataatatactgtatatgacaaaaatacgcaccatgtaatcatttagatgttgattaattaagttatgtttttcacgtaagtaattaattataatattaatatatatacaaagaacaaataataaaataataataataaatatttataataaattatcacagagaaataattttttttttctctaagctatgttttttgtaccctaaattattttgcggtaaccgtctccaaccgaattatagtgatcattttgaaatgtgccctttttttttttagtaataaataatgttattgaaaaaaaaaattataatatcatataaactttaagttttatgaaatctcaataaaagaagaaatctcatcaaagcatactagctctctatccactcaaagagtatgctgagttaatctatgtacagaaaaattggacatcaaactagctaaatcctctatcaagaaaccaagctcattgtggaatgaagagtgtttaaaaaatgcatttacaatcgctaaataatcagatacaacaaaatttaaagaaaaacacacgataagaactcaatccaatgctacgactgcttaaacagcctgcaaaaaagtgccaacaaaaataacattaactctaaaaaaaataaattaagaaaataaa

SEQ ID NO: 23788 - DNA, 4565 bp, Cannabis sativa
agagagagagagagagagagccactttttagaatgagaggggtaaagtagggttttagtaaaaattaacctattctacaaatgttgaatagttttgatttaatggaccaattttagttcaataaatgcataaatattcaaatttccctttcgcataacaaataagagttatttgtcagtttacatattaaccaataacatattatataagaattatagaagattgatgatttgcttttttttttcctaatatattaattaatgtttaatactgaggttgttgtgatttgccgttataaccacaattaacggaaatttgctcaacaagggttggaacttggaattagtgtgtactagtaagacatctgaaaaatagggcatgagattatataatggggtttttataaaaataattgattttaggtaaaaatttacaatttatttatcatacgaaattttttataaaaatatatatatttttttataaataatcgtaaaataataaaacagaacaattaaaacaacaggagaacaaataaaaaaactgtggaataacagtgaaaacttaatacagtacacagtataaaatttacacagtacttttttaaaaaaatgcagtatcttttttaaaaaaattcaccccacaataaaaaaaaataaaaaagttaaaaatacccgtatgtagtctagaaaatccttatatatttatacaaataggatattacaaatttacaataactaattctaaaacatatatataaatatgatcgaggagtatctgtaaacctcctattaatattttttagtccatttttatgtttaaaaatacatgtcaattttttttttttttttgtggtggtgattgtgattattataacattattcttataaaattttaaaagatttcgaagagtatatcgaaaaataaatgtattatatttttttatgtagtaaacagaaatattgagagctctgctttcattatattttttttttaggaaaaaaactgctattataaattaaaccaaagagtcatttacaataacagaatttataggcagaggaatacaaccgaccaaaaacaatcttcatctacccctagtgcaaattttgccaaaccatcagcagccatattagctgttcgcttgacatgagatacatttacattagggaaaaaagatagaagactagaaacatccatgataatatcattaaaaactgaggaagctactgttggggagcatattgcatttttcactcgaagtgcatctgtctctataagcagatgaggaaattgaaagtttagagcataatgcacaccatggaacatagcaagagcttccatttcgtgaggatcaaagctgcctagcagtttcttggagaaagctgcaatgaccataccagaactgtgcgtagaatagcacccaaaccagtagtgttgatgtttcggtccactactgcatctacattaagcttgtaagcacctgtagggggaggtttccatggcactttgtgactattcgaagcagagggaatggaagaattctgcattggtgctgctaccggagcttgaaaaggctgttcataattggaaagagctgatctgtaattcagcaggtagtttccagcaaaggatgacaactccatggcctttttggctttgtgtccatgtattactcggtttctttctgtctagattgcccataaagtacatattatttgttccatttcagccttggagtgaatacttgtaagatgaaccaagtaatcccctttatgcattgatgaggctttataccaatcaaagttgaaaccagaagttctccacacagctttggcatacttacaaccaaagagagcatgtcccacagtttcccacgcttgtcgacatattgagcaagtagaatccgtaataattttccttttgacgaggccagtggcaacaggaagggcatcatggaagactctccaagcaaatattttaattttttggggtagcttaagtgcctaaaaaaacttccaccaggggctgtttgaatatgaacccgaacaagcatcaacatcttcaagtgaggaagctaagtgataacccgtttggactgtataaattctagatgtgtgatgatgccaaattaaagtatcactattctaaaaaaaactcaaagggatagtaagtattcgttgaacatcaggttcagaaaaccattgctgaagaaggtctagatcccattctctattatatttgataagactagagactacaccattggctggcccattataatggaaaggaaggaaagtagagtgccctgggatccatggatctaggccacaaagaatttgacacccttcgccaactttccaccttaaacccgaagataggagcttcttaccccaatgaataccttgccaagttaaggatggggaatgtccaagagaggcttcatggaaggagttgttagaatagtaacgacatttaagaagcttagctagtagtgaatccggttgggaatgtagtctccaagcttgctttgcaaggagagcttggttgaagtgaacaaacgaccgaaatcccataccaccatcttcttttcttttgcataagagcttccaagaacgccaatgtattttagtaccattttcattcaacccccaccaaaacttagccatcatcgactcaacttggttgcaaaaagacataggcaagcgaaaacaactcattgcatatgtaggaatagattggactaccgctttgagaagtacttctttacctcctgctgatttttttttttcattccaagtatgcatgagcttccaaatcttctccttgatcccactgaacatttcctttttatctcttccggagtatgatgaaagccccaagtatttttcatggcattcacaaataggcatggacagatgcctatgaaaaaatacttgagcagctagcgtagtgttaggagaaaaagacataactgatttttccggattaagaacctgacccgaagcacgatggtatatatcaagcactcgtttgatggctagacatgagttttcattggcttgacaaaaaaggaggctgtcatcagcaaacaacaagtgtgagattggcggagcatgcctggttagcttgaacccattcagattgcccattgattgttcttgatgaagcaagcgtgataatccttctgaacagataaggaaaaggtatggtgaaagtggacagccttgtcttaaacctcgggaaggagttagagatcccgttacttcaccatttaacaaaaaagtgaaggtgttggtggtgaggcagcccataatcagatttacccactttgttgcaaaacccattttaaccatgacctcttgaatgaagcgccattcaactcgatcaaaagctttactcatgtcaagtttcaaagtggcaataccagaccgacccgccgttttatttttgatggcatgcacaagttcaaaggcaacaaggatgttatccgtaatcaaacggttaggcaagaaagcactctgagtttctaagatgacattaggaaggacatgcttgaaacgaccaacaagaacttttgatactaacttggagatgacgttgcagaggctaataggttgataatcctgaaccctttgtggatttttaattttaggtataagggtgattatcgtcttgttcagtctagtcggatcaacaccatcattcaatacactcaaaacagcattagtgaccgattctcccgcaatggaccagttttgttgataaaacatcgagtacataccatcaataccagggcttttatcaggggccatagaatgtagagcactctcaacttcagcaggcagaaaaggtttggtgagttcgtcattcatgtcatgagtaaccatatttggaattgcatccaaggtttgggaaagagaagcttcatcaatagtatcagcaccaaagatggaagcaaaataatcatgaattgttgcagccatgtcaactttggaatgcacccgaaccccagcttcattaataagtgatttgatcttgttgttggactttcttgccgaagctttagcatgaaaaaatttagtattgcggtcacccgaacttagccaatccacccttgaacgttgttgccaataaatttcttcctgctctaatagatcatcaagaatagtttcagcccttttcagctcacgcatattgtcattatcccgatgtgtgaggttgttgagttcatttactcgagattgagttgctgtgatgtttttcttcatgctgccatatttacgctgatgccagttttgcaaagaagtagcacaagaatccaaactggacaataaggtctgaatcgggtcagtgttggtggaatgatcccaacaattggtgattaactctttgcattccgggtctgagagccacagtttttcaaaacgaaaccgactgcgtctttttcttcctgaactgaggtgccgattggtgtaaccatgactgaaatggctcggtggtctgagctaaaatagtccaagtgatgcaccgtaggggtactgaaagtattgtcccaaaggttg

SEQ ID NO: 23789 - DNA, 3048 bp, Cannabis sativa
cgttttcagtaacggtctcaacatataaaatttaaatattttcttctcagccagttgaagtagtcttcttcttaacatgcatatagttacaagttacaagcgtttgtaatatactagttacaaaatgaaagtctaaataagtattcaaatatagacttaatataactaattaattaagagtcaagcaggaaagttgacttactaacttaactcactttctaaattaccaaccacaaactaacaaatatatatagtacaatcagagattataattacatttacatttacaattacaattactatttataagagagtgtacgtagtgataattaacatattcaaataaggtacgttaattagggaagaaatattcaaagaattaatcaaaatggattcttctatgatgggcttgcggaaagaacaagaacaagaaaatgaagcaacatccaaaaaatctttgccaaacaaaagtatgtacatataaaatctttcattttctttatatatatataataattaacattaatgtttcaagaaaatttaattaatcaatttgtggttatgtactaattaaggagaaggacctattactaatttcacaactcatgagataaatgtagatgtgggtcaggtaataattaaatcaacgaattatttaagttctttaatttacattttttttaataataataataatgaattgattttgttttgttttgttaatttaatttaattaggatgttgtgagtaaagtaatagaatgggttaatacaagtggatcattggacattctttctattgatggcacagtttcatttgcatcattttacagtccaaggaagaacatggtttcaagtcattatgaccatgtaattattcttaataataattaacccctttttcttttcttaattaattctatttaattttagattaattaatttcattttgcagtgtttttttaagattcaaagattagtgtgttgtaaaaacacattgaatagtggggaagaagtaattttgagagctcgaatttgtggaccaaccataaaccatgtttatcgtggtgttgtaagggaattactagcttctactcctgttaaggtatcatcattttaatttattaatcttcttacttaatttctctaccccgaaaatatatatcagaatatattttttaatagcagtgtttattatatttacaataaatattattagtaaatttgaataatttacgccaccgaagataagtttaaacttctttgaaaacacgtggaaatttggaatattaaaaaatttattttcggtactgtaaattaatcgaatttttttaaaaatatactgatatgtgattacaaacgtagagattaattaaaatattgtaattaatactcattttcgtttatatctcaatttaattaaattttctttaataatataattaagaagaatgaaattatatattgtttgataatatcagataagggtagcgagttacaactcagcaagagcaacattgtccgatatggccaagaagactagcccaacactaccaccaaatcaaaacattaattaatttccaatagtacttttatggaattattagttagttagttaatatagttgaactgatcatgagttttaattgtttatttaatgacttttgagtctaaagctagcttataatatttttagtcttttattttttaatctttttcatgaaaaagaatattctttgttgaaatggaaatttttggatttgttttattcttcttattgagaaggaaatacataatatagttagtgtaatgatagttcttgtaggaattatatcaccactaccatgatctctttttctattcttcttctttaattagcaaattaattagtaaattgaatcttttcagtaaattgacaaatttgggctaagaacaatatcaaattattatatttcaatggccaattggtcatctatatttctttttgtcataaactagaaaaatcttattattaaattaagataataatagtgatagttttatgtaatttacttgctattttggttttttttttttttaaaaaaaaaatatgttaattaagtaagagatgaaattccatatctttgtgaaagaaataaaataaatctaccaatgattatttagcattcatataaaatgcactataaaatttttcaaaaatatcatacagtaaaaattatagaaaaatttatagcctaccctctgaaaatgaatgtatcaatttactttgttcgtattttcaaattaaatataattttaattatataataatgtataagtttagaataatttaacatatttatgaaaataataacatttgtgcttcatcaaagattttatacaaatgtgaaataattaaatcatatcttatgtattgtccaattttttaaaaattttacataatgtgttaagtaactacaatacataatattgttaaaaaaaacttacacccactcattatttaggtgcaccctaaaagcaagcaaaattatattagaaaattttacaatgtactcttgatgtacttttgtctatttcagtatttaacgaaaaaattgaatctaatttttttaatagttaaatacgttgttgttatttaagatgtcatacaaaattttgaaaagcttagaaatatttagcacatcaaaaataaagttaaacagtttattgttcatgtgaaatagattgtttgaacattaatttttatattgtaaattattctaaatttctctaaattttgtaaaatgtctaaaataattataatgtatatagagtacgaaaagtttagactataaattctttctaaatgccgaaacagaaaattaatgcatattttttagagggtacattaatgtagaattcccaattagattctacaatgcacccccttaaaaaggatgtattgatgcacccttaacttgttttagcatccagaaaaattttttagtataattttttttttcatattcatgtacgttatatctatttaaaatatcctacaaaattttga

SEQ ID NO: 23790 - DNA, 2042 bp, Cannabis sativa
tgctaaatgctaagttagccattaccaattatagtttgagtttgagttgactcttcagctcattttcttccttcctttgtttctgattcaataattagcaaaaaaaaaaaatgttcagtgtaaattatttttattgctcatgtcaaatgatatcacaattgaatagtatccattatactaacaatggaaaagacttactatcaaatacataatatgttgcatgtaattggattcattatttctagtttcaactttcaagacatattgaaaaagaaaaatggttgtgagtgttaaatgatatcctcaacagttaaaggcacacctcatgtaaagttttccaccatagatctgtcttttcctgtagttctcgccactgcatagccaaatcgaattcaaatgtattggtctgtgtacagtgtgctgtcgatactgcaactgcatttctctacataaaaagtaaagtacaagaagaataacaagatatcttgtcacatatgagattactatgacgcagagatggtaacaaaaataattcagcaaatgcaagaaggaacctgtttcggaaaatgtctcacctgatcctcccgttgctttggaaccttaaatctgtcaagagctagatggccagcaaaagtagtttcttggtcagatactctcagatttctttggcgcccaactacaggtctgcaaatgtaaagcagtaaaccctttatgttccaccaaatttttacagcaaatttagtgaaaaaagaaaaagcatatgaagtttgattaccttccatcaggtaaaatcaggaaactactgttccacttacatattgcagattgagctgcaactttggacttgaataaaacaaaagccttggctgtgaatgcatagcaagacatagatgaactactgcaaagctttaagtgaaacttaatgtagaaattcaatatgattccctagtaaattagtaaatgacacaatgggaaactaagaatagatgagccgaccttaccgtatggtgagtttgaaaatgtaccaaactgtaccattcttgcctcaaccctttcattgaatgcatgccaaattagatcctgaggaaaatatggaataaggaacaaccagaatgtgcaggccagaaaacagttctcaattctcataactgtgaaaatgtgatctaccatatttgatttatgcatcaaatacttagagagagagaaagggtgtacagcggaattatagttactacctcaacttcaactgaagaaaaggatggatccaaattttctaataagaccagcgattctgtttcttgagctttctgcagtttctcttcccaaggctgaaaatcagcaaggaaatgaactctttgagtatatgatgaaacaaagaaactataatcattgctcttttttttcttttcccaaacattgtaaatgtgtcataagctttgagtatataaatatatgtgtatatatcgatgtgggggctctgcccgcagtttaaagagcctttcttaacaatttttcattttaatagtaagtaaattaaattagaaactcacttgctgtttaaaccaactcctatcctgcaagaaagaaataacaaaattagaatattcaagagccagtaatcaaatttccagttcaaaaggtaggaactaacatcatgtctttgcaaacaggttctctcaaaaatttgtttgaacaagaacaaaaatctcacatctaacaattgtgacataacaaaaagatagcacaggctgaaaccattatgaatattaagcataatatattatttctttcaactgaagcacaagacacgacagaattactaagcattcacagctagcacgaggctaggcattagataattagctaataaattaacacttacatagttaggctgtcttgaaacttccaaaacatggttgttcttactgacactcttggcaaatgcatgttgaggaactgatttcactggcgttttagttgcggtttctccagaattctgcttagcaggactcttttcaagagcaattatccttttcttgtaa

SEQ ID NO: 23791 - DNA, 1036 bp, Cannabis sativa
tcttatctttattgggttagtgtttccttcccccatcattacttggatatggtttctaaaaaatctaaaaccatatttattatcctacatcaaaaataaaaatgggatgttttatttcaatacttctttaaatttttttttaaaaaattgttttttcagtatttagcctctaacatgtttttaaagtaaagtgagagttagcaatttaattaatgaattagttcttttttgtaaatctaaaatctgtattaacctttttggtttagaaaatactaaaagaaaaaaaagcagtatcccttttgtgggtttcatttcgtgttccatgtttttgtgccaactggaatagcaattttagataaaatgttactaattggacattacatattatggttattaacttattatgaataaatgatactttacccaataaaatagtagagtatgattacaatgatatatttttaaaagtaatttactatatcaatatttaaatttaactctcagttataaataaatacttaagcttaaattttaaaggtaataataactaagtgatatttctaaaactaagtaggtaccttgtcgtttaaaactgcatttgcacggtcggttttagtattaatggaaaaccgaccgattaaatcaagaaccgaacatatatattatacactatacatatacatatataatataattatttttttacatatttaatatacaattctattaaactagttttacttcttattttttttatttaaagtctcaattattcattgctttattttattataatttaatgtatttaggtattatatacacacattcataaaataatacaagtttttaatataactcattaccaattagtagcacaaataatttgagcaattttaaaaaaaattattttacattatttatttaactaaattttttttgtcttaaattatatatatttgatacaatactttaatttttttagttttcaaataattatagtaaatttaaaaacttatttcttttttttttttttaaa

SEQ ID NO: 23792 - DNA, 2163 bp, Cannabis sativa
  modified_base (1073)..(1073): a, c, t, g, unknown or other
aacctacttaaagtagtgtaatagtgtcaatcaacaaagtaactaatattgaaaataaaccctcactaaaactgaacattatcaaataaaacaatacccctgtaagtagtatgcttataaaagatcttgggtgtcaaaactttagttagtggatttgctaaaattatgctcaatagacactattttactctaaactctcttttaacaactagagactcaatttctatgtgtttagactttgataagcttctactgtcatctaaatatagaactgctaatagattgtcacaatatatctttagtggtctttcaatttcttacacaacttgcagccaagtgacgaaatttcgcagaattatgttgccacgatggaatgagctacgagtgtctgcttagcccttttacatgatatagttgttggaaatattttaccatgatctaaatttacttgtatgttggattataattctataatttaacatcctaaatatgattttttttaaaaaaataatgaattaaacacataaaggtatagaaaatcttacattgatggcagcggaataatatgactcattccattcaaatctctaacccttgatccttcctattgcagagtatgatcaagatctgagcttaaattctcctttggtgacaattggactacatagtcttttttcactatgctgagtattgctttaaaatgtgtggacaagttcttaacactaaggattgtgaatttgatgaagaaatctaagagaaaatagcctctgtatctttaaaattaaagagaagaagaagtgagcattttagggttttctagcttaaaaaatcatcatctgataaagctctcttctcattctatttataggcttcacttatggttaggtttaaatgacattgggcttaaaatagagacttgtgttgaagtctaactctaggcccaaattgcttattgggcttttgagttagatttatgccactttatttcattcacataaaaaaatgacttttcatattttatcagttatctcttctaattatttaaatactaattttattttaataattataantaattatcaaataaaatataatttaaatatatttattaattagatccataaagtgtattaactaagaaataaattattatttcttttctttttctcaattatgcaattctttactaaaattcataactaagacatagtcattatttagaatcctaattgatttaaataaaccaattaattgagattacaaaataatattatctcagttagtgtggggaccatgggcctatgtaaccaagctcccaataagtagttctaaaatttactgagtaaattttctatttgaataattcctcctgactccactatagattcaaaattgcactcttaattacatagaatgctctattcaccaagaatagatatgctataaattatccaatattgttttaatctaaacaattgaatatcctctatagatgatttacatcaagtatggacaaatttaacattttacccttcaatatattttatccttaaaacacttatcttcttataaatgatatttcagtaaactaattataattactgaaataagagctcttccatctatgtatgttagccaagctctaagaaaatcatcatttcacttctaaatagtaatagaagctatagattccttatctacgattaatacccccactcaattatagtaccatgttcccaagatgtaagtattggatcgatcctaatggtcatctgtaacaaacaagtcaaagaacacatgtaatatatttaagccagaacctaatcatctcggggttaagatctttaatctaagatcaactaagtgacattaacttaaaaaaaaatataacggtaagtttatgatatctttttcactgttaatattggtccagtctgatgtatagccaatacatccgatactagtatactttgctaatgccctagaaagaacattctacatattaacgtgtaagtaaattttatcgttaattatcacgtcagtataaatctattgtactgataaatcattggactaaatagtgttaggctaaaattagtctaagtttcgggtcgtattttcagttagttttcactctttgtttctagttttagggctatttta

SEQ ID NO: 23793 - DNA, 2532 bp, Cannabis sativa
  modified_base (43)..(43): a, c, t, g, unknown or other
  modified_base (169)..(172): a, c, t, g, unknown or other
aaaaataagattaagtctaggtttcttgccctttctaagaganaccatttgctcccaaatcatgtcagccaaatcaattttagcaccaatagaaactttacacaaaagaaggaaatttcatttgaaacatttatcggatttgagcaaagaaaccaattggatagggcannnntcataagagcagcatgatgataggtgagttgagacatatgcattgtgtcggagagttccacatcattatcaccagtgagatacccgaacactttttgacgattaaattccacatcagttggctcaattcccataggcagatttagagcttcagccacttcctttacagtaaagaaataccagtgttccctgacaaagtttgccaaacataaaatagtccccatcgaggcacttatcagtgatattagcataaaactccttgacaatttgatccacatagccatcaacaccgatcaaagtatccacccattatctttctttcaacatgttataaaccccaaatggcttatgagcaatgacattgaaatttttctcaacagtataattcctattctcataaaatttcatgtctctatcattatcattgtaacaaaaataatgagaatggggcttgaagttttcaagagtaataccagagggcctcttcgttttttgaggcaaaatagggcttgcagtaacaatgggttgttctcctttgtccttctttggcactgcagcagggacaacaactggttctgcattgataggatcaacattaggcacttcacttttagacttaaaatcatgaatagagggttgttctttgggaacaaattcttcactagaatcagacacaccctctaattcttgatcatcttcggtctcttcttttggttcagaatccgatgatgaaacgtaaggaggattctctttgaggtgtttgccctttgaggatgaaggcaccactttctttcctttggaggctcttttgggcagaaccactttggtgtggacaccttggacctggttcgtgagctcaccgtaggcaagggcacaatagctttctcgaaatttggagcaccattcgaagaagaagacttagataaagagtgatcaggtgaatgggattcatcgtgatcactaagcgtaggagttggggttgcaatcagagaagcaatgatcggaggagaattgagattgtaagtcgatttttgagattgggattttgacttcttggcagttttcgttagagtagacgacgacccaggggttcctaccacaggagcaggtggcgtgactggagaagcagaggctgaacctcgagtaagcctcttggagggttgagcattttatatcttggccatttttctttgaaaccctagaaaaatcaccctctcaaacttgaaaaagattagacttttggaaagaaattagagagagaagtgaatagtagtgatcgtgggaatggtgggtagttgtatatatataacactttaaaataaatacccaaaaactagaaaaaagaaaaagaaaaaaaaaaaaaggaaagtaacttccttaccttggtcacgacatgacgagagaaaaaaggaaaccaacaaggataattcaaaaattagtcaaaggttgcaaaaaatggaaaaaaggaaacaacatatctccacaaaatctaaaaattaaacacaatacaccaacccaaatctgaaaatgccaccaaaaaaggaaaccaacaaaataataaattaaataaaaacaggtttcctaaagccacacaaaaaaataaaagcaaatcctcaacaaaaaaataaaagaaacacaataaataaaatgcattaaaaacgtgtttccataaatgaaaaaataaaagaaaaattgccaaaaaatcagaaaaaaatatgcccccctatttcttaaattttttcaaaaataagcccattttttaaaaaactattaaaaacaaaaaagacaacacacataaagcaacaatcaacttagagcaaaaataatgtctaagaaaatagtgaaacataacaaagaaaataacaatagtttttaagaaagctcaattgtcagtgtcggtcacacatttttattttttttatattttttttaaattgaaaagcagaaaaaataaccttgatagttttgtcaacaaaaagtaaagaatgtccgcttgtctttgctcttgatgaaaaaatcaaactcatgagaatagtcaaaattattttatcaagctaatgaactagtggaatgaggtcataccagctacgcatgaaaaaagttaactcagtcaccaaaaatattaaaggcaaatcaaatagacaaacaatatgtaacaactttataagaccattttcaaatatgaaaattttaccacaagctgtgccaagcataactgtgtgaaagtgtaagctgtgaacattgcccaaattgtcaaaaagacttttttgataaattgtaaccataggagacgttgtcacactatctcaatggtagcgtatcttctacataactcccaattacatagttccaacttactca

SEQ ID NO: 23794 - DNA, 1440 bp, Cannabis sativa
ttaaaaaatatcgctaactaatcacaagacaacacgtctaaaaaatactaaacactattaatatctaatagtaatgctctaaaataaaatttatttaaagtcgcaacaaataacatgtattaataataattaaaaggatatgtttaggtaactgtaaactgtatttaaagtccacaagttcataaaattattaatattataatgttggctataattgtttatttctagaaagagatgaaaatagaaaataaactttaataattgagctatacattatacataataataataatagtaataatacaccacgtttgttgattgttctctcaataataatattattattgtgatacgacagcgttttgtttgtttgggtattttttaatacatttcaacattttgtgtggattctatttctgaaaatggaaagaacatcactttataagtttatatatatcaagaaacatactaaattttatttgttttgtgcaccaaccaaatattatttatattaagataggttatgacacaagataccaaattaatgaacttgagatttttttattatttatttttttgaaagggaaatgagtttaacataaaataaatagttatagattaaaataaattatatttaattatacatagattcaaattagactaatttgcgatataaatatttaagtttaactctcgattacagaataataactaagtttaatttttgacagtattgatacctaaattatatctttaaaacttttgtaaggacctagttattaaatatcaagtcaatggccacctaacagtttttaattggtccatgtcattaaaatttttattttttatttaaaaattaatttaaatatataataaaaaaatgacaacgacaaagtaggtaagttcaaatataatttaattattattaccgccaaaaattaaatttaagtatttatctaaaagttaaacttaggtatttacgccgtaagttactcttaaaattaaattcagttagagatgattaaattttatataaaaactaagttgacatgcaagatccaaaattagtatatttaattatgaattaatatataagttataaatatgttaacctaaaattaactaatttattattattgtttagaaaaaaaaaattatgatttggttactatatgtatttaataatgtaaaatttcaaaaaaaaaataatgtaaaatttcaagccaagataataaagtaatactttattttggagatattttaagcatatataatattttatttggatatataattaattatattttaaattttgcctatatttacattttaattttgagtttactactaagttaaaataaatttctgcattatataaatgagtgtggacaacttgttgccactatttgtgactaaggtgaagaagaatgtgaatttgga

SEQ ID NO: 23795 - DNA, 1647 bp, Cannabis sativa
atacatacatatataataaataatatctaacactaacaaaattttaaaaacatcatttctaaactaattaaaactctcaatacaaattatatatacacacaatatatatattatctaaataatacacaatatatatgtacaatacaaaatatattcacacaatacacaatatatacacacaatacaaaatatacatacacacaaattccataaaacataaaatacatacatatatactatatattaaggtttaaatatttaccttataagcgcaatctgatgaacaattttgataaaaatttggccaccatgaacatacacaacaacatagtgctaataaaatagaaaaatccaaaaaatttacaaaaaaataaagcaatgtacattgcaaaaatgaatagaaatcatatttatactttaataggcattgagattcaacattttctctactaaaatcagtggtcagagttataccatcaattttttttaataggttcagtttacagtgaaatagaggtgaaaaaacaaaacttttttagtgtatagatttagggatcaaaaatagaagatttggtttaaaaaagaaaaggtaaaatagtgtgaaaatggaggagatatgggtgtttagggtggtggctggcgaggattttttggtggtgggtttctggttttggtgactgatttgttcgtgatgaagaagatgaagtgagggatcgtctgctgaaagggtttgataaataccctctatggcgtcgattttaatcaaataaccgactccatatgctgaaaacgtaacacatgtcagcgtgtcatatggcatcgattatttgataaaaactgacgccataaagggtatttctgggaatatatattctaatcctaaagctgactctaaatggtttgtaagaaataatatagctatgttttttatttaaaaattacctctaaatatcaattttgaaccaagcgggtatttttacacccctgaacttttttttttttttatatatatatataaaaaatattaaaaaaatagcatttaaagcccaaattgttgtagtgtatctctttaatcttttattttatattaaatgtgaatataaaaatttttaatacttattttttaactcaatcaacatatctaaaaaaatatttttttagtagtgttttttttaaacaataaaattgaaaaaaatatttatgtttctcaaagaattaccattgtggtgtcgttatctattgcggttattaaaatatatctttttattattattttaaaaaaaaatgtatgatatttttaaaaaataaaaagtattactactaaattaaaattataatttacaataaattttgaatattattatatatttttttataaatctaatttaaattaaatatttttttaataaaaaataatactgtttattgaataatataagaaaaaaaaatcattaattatacaattaaaaatatacataaccaaattaaaaagtataaattgaaaatataactaaatatacaaatacccgtctacaatcactattattaatttagtttgggtgactattttatggttacatttttattgtaaccatcatggttatttttttttttttttttttgcctgtactagcaggttactaatag

SEQ ID NO: 23796 - DNA, 2604 bp, Cannabis sativa
  modified_base (378)..(380): a, c, t, g, unknown or other
tctgggtcgccacaagctgctcttgaagtcctcttctttgtttctagggttccaattctgaataatgatcaaaaatcacgagctcccattttagatgagccaagtttcctctttaaaattcatgaaattacaaaacttcccatgagctcgtcaggaaggctttgtcacagcgaagcttatttcccgtcgcaacagctgaagcatcatcaaatcggaaaactttttgccaagtcccgtcgagacaaaggattctgcccgtcgcgacgaagcttattccccatcgctacaaaggatattgcccgtcgcgacgggctttggtagaaaagaactttgtacatattttacctcaagtttttcatttcttgtcctctattcttnnnaatacttcctttaaacatccggggacctgaaacaaaagaatcaagcataaaatagccttaaaactagaaataaagttcaaaaattatccaaaaacgtgacccaaaacttagactaaaactagcctaacagtttgtctcctcaaacatccttcaattattgattaattcatcaatcctaggagctattcaagattggggtaagttctctttactattttggtgaaattaagatttttaaaattgagttttcatgggaattttgttaatttcgggtgtgggattttgtgtttgattatgttggttgtttagcttagaattaaggtttgattgatgttgttttgtagttgtgtatctttgaagcctcaagcttgagtgtttgaaactcaaagcttgagctttaatggttaatttgaggtttatgtataattttgtattatgagttattaagtgagattattattgatgttttaactgttttggaagctttggtgtggtttagattaggtttggggaaaagttgagtttcaaaactcaaaattttggtatccttgtgaataccagttatctgtttcaccatccggttactcggatgaggccctttttggatgtctaggtttttgtgttttctcaatatttaggttattgtcacgctatttatcgatagaaaaactctcatttagaatttaagtcctagaacggattaaattgagttatttaccatattaccgttgttgtgacatagggtcccgaatcgtcgagcaattttcactcaagttgaccgacatgcttaaatttggattatgagtaagaaaagtacaattgtaccacatagcatgtttaaatgttatacgataattatcgtttataagaaagagttattactctaatttgaaactgttgtttcttatataaaggttgtctcattaggcaacgatattgtaaaaggtcgtctcattagacaatggtattggaaaaggttgtctcaataggcaatagtactagagtgggttgttttattaggaagcggagaatagtggttactttataaagtaacgatatcagtttgtctaattagataaatatttgatattttatgattgcttatattgtgtaatgttatttcctgtttatggaataaagtatttgttacttggctgtgtttaaatgtgtatatatgattatatctctttattgttatgaatgttgtgttattgcttttcttattgagtctttgtgactcacgggtactttgtggtgcatgcatgtaagagatagaacaaatttgagtagtcatgagttcgagatcttccctaaaaaatgtacatattagtttatccgactagcagtgtcgagttatcgggacttaaatcctttgatggcgctttagagagtgtattttaaagaaatatgtatgacaatttttttgtcaaattttaaatgggatcctataatctaaaagcttataatgtcatgaatttcatgtttcaaattaattagtaaaattttaaattaaatcacatattttattaaattattaatttattattaaaaactaatttataaaaccatacaggtggcgtccttatgagatagggtgttacatgaagtttgtagccaacggtttagactagttaataaaggaattgcagaatgttctaaatcatcagcaatagtggctcaatattgccgacagttgcataatgtcatgttaaaaaaaatagatttgagctacacgagcctaaatctaccaaaattaaatcagattaacacagatctaaaacaaacaaaaacccatgaaagagatgcacagaattaaaaaaaaaaatccttaaatttcaaattaacaaatttagagttggtcgggttcgatctataactctaaccaactgcgatctcaaactccaacgcaagcttggccatttgcgaacccccaacacagaacaacttcagatttgtggacaaataaagaaaagaaactcaaaaattctgtgaacaaagagagaacctgagatctacaaagaaaataaaaatgaagaagaaaaagatggatccaaaaaacaaaaaagaataaaaagatgaagaagagagaaggagataaggtggatagacatttacctcatgaattttttggggtcgacaatctcaaactcgtgctccatttggggtcattggtcgttaaaaatgggtctagagagaggtgttaacagagagagagagagagaga

SEQ ID NO: 23797 - DNA, 4395 bp, Cannabis sativa
aggatcatgatgggggattttcattaggaaaattatgagactaatttattcctttaaatgtcgtgtgtcacatgctcaaaaacacggataacaggtacaaaataattcactttatataggtctctttaaattgaatacaaatgttatggatcaggaaaatggaaagattggcttaagtgcagtggttaaagatgggcaaagccataaagtttcaagtttgtgtattcctatacggaataacaaactctactcaaattgaaacattcgctttgaaatcaaccttacaacggtgtgaagtcacaaggatgccaattgctaaagttgagtctgattctaagatgttaatcgtaaggtgaattgtaattataaagataaatcagctttagtggatattctcatggatatttgtaactctttatcttatttttctaaagtcactcttaggcatattcttagacaaaataatatggatgctcatatactagtaaaaaggttttagggctaaataaagaagtggtgtgaaacggtttgttgtccactcttttatgatttgtaacatgtattgaatgtttcttactaataaaagttacaaattctttaaaaaaaaatgtataatagaaaacaatatctaattgggttgtgaagtggtcacgtaatgaagttgtagcataacttctaataaatgagaaaattaaaaatttaatgggtttttatacttcttttttgtgtaaaaatatagtttttttttttctcaaaaagattattttgtaaaaaaaattgaagaaaaagttaaaaataataggaaaatcaagtaaggataaccagaaactcttgtggtaaccagataacagagagataaccagttaccataaaacagtaatcaagtaccttatgctatttttttatatttttttctaaaattttaacataaaaatataaattcccttaaatataaatgtaaatgttatcttttttgctaaaaattaattataattacacgatcgaggttaattataggggaacttacaaatatattgtgtttaggggactactttacttttatactgccacactaagaaatttacaaaatactgtcctcaatttaaaaaatttcttttatactgtacaaaggccaaaacgcacatgaagccttcattctcaaaacctaccatcgtaaccattagagcaacatcaaaataactaaaaaataactatcattccagttagaaagtaattatttaagatttcaatcctagaataataacatacaaaaatcaactaaaacaacagtaaaactacaaaataaagttacaaaaaaataatattatacctcaataactcttttgccagtgggaattttcataacattacgagaggaaaccttcacttgaaaaattttcccttaccctaaatacattgaaaaacaatttggaacaataaaaaaaaaacaatcattaaaaaatataaaaatcaagtatataatactaaataccaaatagcacatacattacaacaaaacatataaaatttaacaaaattagagagtgatgaacaaaatctcaaattgttatctgagactggacatgcacaaacaaaaaaataaaaattgaaaaagaagcttaagtagctaaagaaatttttgaagatgatggagatgagaagatcaaaaagtaatggtaattacaattgaaaaaatattgatcaatttttcaaacaaatgaataagaaaaaactggaaaaaaaaagttaagaagaagaagaaaattttgaaaatgatggagatgagaagattagtaagtaatgagtttggagtaacgtgcattcagttgttttaaaaaaatctgactcaaaagaacaagttagaacaacaacaaaataattgttaaaaaatattaaaaatatgcattcaataagtaacaaaaatacgaaatacgcaacaacaacaacaaaaataaaattaaaatgagtagaagatatagattagagaaaaagaacctagaacatctacaacaaaaaagaaaaaaaaattcttaaacaactgaaaaataacataaatatctttgacattttgggtatctcaaaatctttatcatcaagtttgaaatcagagattgaatcttcaatgatcagtttcgaattaattttctcttttctagaaaatgagcaattaattttcttttcgaagctataaaagatgtagggctatggggttttctttgaaatttttcttacatgttgttaatttactaacaaaaacaagagaaaaaaaaagaggaagaagaagaactaaaacgaaaatagaaaataaaaaaagaaaattggctatctatgaaaatataagcaataaacgtggaagcttggaagagttagcttttattcatcatttaaaaaaaatttaaaaaatggagaaaagttggagaggaagaaaaattgaaaataaaaagagaaaaaagaagaagaagaagaaactacaaatagagaagaaaaaatggagattgatgtatgtttaatattagagctttaatttttttcaaaaaaaaaaaggaaaatgaataaatttcaatattgtaactcttatgacaagactaataaagtcaacaattattatatatttttttctaaaaaaaataataaaaaaagtctttctcacccaatgctactcaaggagtcaaagatcgatttaatagtgtgctgggaatgcctatttgtgcttctccatgagaaatatttgggcctcccatcttatgctggcaaagataaaacaaagctctttagcagtatcaaagatcatatttgaaaacttatgaatcaatgggatgctaaactcttttctattggtggtagggaggtactactcaaagctgttgtccattccatcccaacatatgctatgagttgtttcagtcttccaaagaaattttgcaaccagctagagtctatgatggctaatttttggtggggattcaacacaaataactctaagatatactggaagaaatggaaattcatgtgttcttctaaagctgactgcggtatgggttttcgttctttcattcactccaatcaggctcttctggaaaaacaagcatggagaataatggatatcccagactctcttttagcaagggtcctcaaagcccgatactttaagaatggagattttctttcggcacagtttggcattctaccttctctcacttggcagagtatatgtgatggcaaagaagtgttgttgaaaggcctcacatgcaaaattggtactggacagaatgtaagatgtgcatcagatccatggttaccaggaaatactaattttaccccttactcttatggtggtgaccctcttttcacagtgaaacattacatctcaacaaataggcaatggtatacacagattttagagcatcatttcggtgctattgacattgagtgtatcctttctattcctcttagtcatttccctaaagaagacaagcttatttggcaccattcggatacgggtttttatactgtgaaaactgggtatcatttagcagttagcttggactccatggatgaacattcatcatcttcatcacatagacattggtggaaccggttatggtctctaaggctacccaaaaaagtcaaaatctttgcttggcgattggttaatgatgcgcttccaacctccgtaaatctggcccatagaaagatcactccttttactgcttgtactctttataaatgtggatgggaatcagcgggacatgccattttttgttgtgatcgtgctaaggcagtgtggaaaaagtttcgttacaatgtttatataccgaacataggtaacataaaaggttttgatattttttccacctggctgttgcttacaatgatgttgatctagagttgattacatgtcttatgtggagtatttggtttgaacgaaacaaagaaatacatggtactaagcctaaaccagcagacctgatttgtacctttgttgtttctcatttggctcaatatcaaaaggcgacaacaccagcacaaaaccaggctgctatacctgctacgaaatcagaaaatagaattggccaagcacaacaccaacgcctgcctgtgagatctccaccagtatggaaaccactgactgtaggatgctacaaattaaacttggatgcagcgtgtgaaaatggagcaattcttggatttggagctctaatccaagaccatactggagctgttattgttggctttttgaaaccttacagaaggtgttttttacccaaagaaatggaggcagcagtaatgtttcatagtgtgcaatgggctattgagtatcaaattccaatccattttatagagacagattctcttttggtagacaatacggttaataatatgtcatctactaga

SEQ ID NO: 23798 - DNA, 8041 bp, Cannabis sativa
  modified_base (40)..(56): a, c, t, g, unknown or other
  modified_base (2502)..(2504): a, c, t, g, unknown or other
  modified_base (7000)..(7003): a, c, t, g, unknown or other
taaacaatcactaaaacaataaaattgaataaaattagannnnnnnnnnnnnnnnnaacaatctcaatagttcaggggaatttttacgaccaaaaaagttcatggagcataatttggtatatgtcaaagttcgaggagaaaaattactaattagccaaaatattatttactttttttgtgacaacaaattttatgatggctatactgtaatttgtgaatcatcgttataattagtattaacttcttaattacgtataaaaaatatatattttataaaaatcaaataaaatattttacatatacatatagacttatggaattgcacgtctttagaactataaagtatggtaacatgacacatacattattttatttctttccccattaaatttgttttttgtattctttcatattctatataattaatgtaatatccacctaaatcaaaagagacatctacaactgctgccatatcatcatgtggcatgaataatactacttactattattattattaataattattatcaactagctagctagcttatatatagagctgtaattataataactatgttatatatgtttaaatattatgaattaataaatgctaagatgagaaatcaatatcaatacaatgatctcatatatataattaatacaaatattaacaactataaaagctggttacgtaaataaatacctttcgaaaagaaaagttatgcaaatgggcaaataacgttttcagtaactagaaaatttgtgagataattaattaataacgatttaaaaatgatatagctaggatttgtttagtgctttaaaactttgacttttaagaagaagaagaagagtttgagtaattaatcagagatttattgtaaaattgtacattcgaacaagtattgtactcaaaatatttttaataaaatatggattgttaattaatatactgatgagaagctattctttatggtttttgtctctgttaacactacttagataaaatgaggtataaaagttgaaactgattgttaacgtgcggttttcttactttgtaaaaaagaattttgttatatgctgaatttagcttttggtgctttcaggttatatttatgtaatcatattattcataatcttgttaaactagcgttatcgcttgatgagacaaaagtttagcgttattttggccttaatgaaagtttcattttatttaaaaagaaaaaaagaaaaaaagttgttgggtgtacatccaaagtctcacattggctaaaaatgtaaaagatcttgggtatataagaatgaacactatccgacggtccttatccatagtcaagattgtggtaatataaacttacatattcatttgaagaaaatgatatgtatgcacacacaaatttgatatacattgatgtggtaataaggaattgagtaatttacagtgtaaatatttaaatttaattttcggttacagataaatacttaaatttaattttcgtaagtatgtgactgttaaattaagtgtaaagtattattttttttattggtatatttaaattagtttttaaaataaaaaaaaaaattaatgacctgaaccaatcaaaacatgtcacgtgatcatacttgacttttcatacttaatgatcaagtacctataatattatttatttttttaataaatttaattgcactaaaataatatttatctaattactaaaattttatcattagattaatttatatatattatatcgttatatacaagcgtgtataatatataatatagctatatctatgagagattgcaacgaaactacacctagctatgttttaatatgtatatatatatatattagaaaattctacaataaaatttggatgtatttttattttttttggtgtttaaaataattattaagtcaattttatttcaaagtatcatttacattatacttatttaagatattctgtaaaattttaaaaaaaaattttaaaaaaatttacacatcaaaaatagagttcaaatattgtgttgtactcgtaagtattttattttacatgtgtgcatgttaaataaactatttaaataatactttctatattgtaaattactctaaatttctaaaatttttataaaatattttaataaataattacaacatacacaaataaaaaataattaaattaaattttttctaaataccgaaacaaataaaaaatatacatcaatacatggtagaaagcacccaatatttatatatactcctaatataacaccttttgatcagttttgatatggtgattgtattagtaaccaacagatcacgtacgactagtttaataattcacataatttcaaaaaaaaatgtcatacatgaaatgcctcaatatatataataggttaatttgaatttttagtcactaaacttttacactttaaattacgccctttgaatttttcaagttgttaaaaattcttcctgaactattaaaattgttgannntaaggacttttgtctaattttacttaagaatatctaacgtggatgaaaatttaagggcacaatttggtacatgttaaaattcagatgacataatttaatatattaaaattcggggagtctaatttagtacatggacaattgccacattagcaaaattagataaaaatggacataagttcttaaatttaacaaattttaatagttcaaggaggaatttttaacggaatgaaaaatccaagaggcatgttttggtacatgtcaaagttcagggacaaaaatctaaattagcctatatataataacataaaataattaatcgtagaatatatatttatatagatataggaccatttttaattagctaggggtcctttacttgagcctataagtgctactccaatacagttgctattgagaagtaacggtcagaaaatgagattaaatgtcagaaaaatattaacttttcaaccttaaatataaagtgggttgctcgtgttgagcaccgttgcccactttcttttttcttctattgattaatttattaatattttaattaaaaaataataaaatacagccacgtagctagcattcgagctcgcctaatgattattattagtgatcatcagcaaaatatttgtttaatcaattaatctacacgggggtgtttatgaagatttaattttcttttaggattagttaaaagtatatcgtttattttatttttccgttcaaaaaaatattataattcgtgtagtaattttttcttgacaaataataggtagtaattaatacagtatcactttacccttatagtgttaaattatatttaatattatatttttttttatgtaaaattataagtgatattaatttttataagcgtataaatatataatattttaatataaattaaaattttacttatataattatataaaagtataatataaaatagggtaaatataacgacataagtacctaaattttcaagtttgtatgtagtataattccaatatttattttttagcggcataaatatcccatatttgtaaaattgtaatttttctctaatttcgtcatacaaactctattattttcttaaacagaccacatataaggtccagattcttgatcattggatctagaaagaaatatgtagtatcagtcactttcaaatgttcatttaataaatttaaaacggagtgtatactgacaaaactataggaaaattatagttttacaaacattagatacttatgtcgctaaaaataaacattgagtttatgcctcttacaaacttaaaactttaggtacttataccagaatttaccttataaaatataatttgatataataagacgtgtaccaaatgaaccatatatattagatggacaattatttttcatgagtgtgatgttgtattctgaagtacaccacaaacatatatatatatatatatatagataatatgtatatatataactcattactaactcacaaaaatttgattatttcaattaataaagaaggaaaagagtgctatatcattatcgttatgacaaaatcaaatttgcaggctatcctaggtatatatatattagctaattaattaaaatacattacctatgttgaaacaaatccttaaagtaaatttttaatttaaaaatttggggctgacttataataattaatttgcaggctaataaagatggaattaaatataatataatataaagtaattaagtaagtaggttgaaattaaccatgtcttaattactcttagttaaagtagtttgttcatttattattgcccatataagtgatctgtcatcgtattcaattcatgcttgccttgccggcctatttaatttcatttttcacaattgtttgatttttttcgaccaataaaaaaaagagtttttttttttatttttatactttaaaattattattatttatttttttttttacatttttatagaattctacatagaaattctattgcaagtagcgctgcaacctaaattgcaacaaaaacttctatagaaattcatactgtaactagcgctgcaactactttagaaactcaaactgtaaatttaaaaaaaatatatatatattatataaagtaatttcccaaaaaagaatcaataattgtaccatataaatatataaaaaaataaggacatatacgtggacaattttgcatctcattaatttcaattacttttgttaataatttatatatagttattttaaatattgaaaaaaattgttgaaaatttcttaaaaaactcagtaaaaaatgtgtaaaatttgtatataataccacccaatgtggggtcattcatttgctactccttaatttttttattaattatatttttaaatattttatattttattcttaaaaaattaatattttttatttatatttttctaaattttttcattttgttctcataaattttttatatatatttttttaatttttatcttcataaaatttatatttcttacatatttttattgttatgagactaaaaattatatttttttattatattagtccttaattttttttgcttccactaaaaaaatgtgactgactctgccacttattaccaaaaataaataagggctccactagttgaggacttttctaggtttcccaccctaatcatttccggtttcccaataataaaattctacaattaatatataaagtcttccaactttgaaattagatcagcttctattactacacagccacactacatatcaaaatatatacattatcttaaaatattattttttattttgtctcccaaataagatttgtcatcttttatttgacagctctaaaaattatccatcatgatcttagatcacattaaattatgattttttaaataaaatacaatacaatcattatctatattaaacaagacttcacataaaattatttttaaaaaattggatcacattacatatatatgtgatcgacaaaccccattaaagatagatactctaacaatactcacatatatatatatatgctgtaaaatccaactattgtattaatgattatatcttttaaattaattatcacatgtattaaattgtatttctcaaagttatgtacgaaattatactttttaaacttttttaagccattaaaaatctctactctttcgagctattgagatttagatataagaaattccttttagttttactaatgaacatgtaaggtgaatgaaaattttttaaacatgacgatttaatacatatatcaaatttcaagagtataattttgtaaataattcaaaggcaataaaatccctaattcgttatatttatttacttatatataaatatatgacattttcaatattttgtgcacatgacatgttttcatactacactaattaaggtcaatgtattcggccttgttttttagccacaagttagagttgctcccacgctctacaatagacatatatgcatggatccactattaatcatattatgatatatatatatatataaattttatttgaattattaatttcgatcttaaaatttttgttatgaattttaactcatgatctagaagatggcaacaagtgtccttgtcctattctttcttatgttctcgacttcttagaataagatttggtcaatttttttttgatgaatgtcaaattaattaattgaaacttaataatttcatacaaaaaaaaaatatatatgcatgtatatagctatatagatatttatttattgctaaaaatcctgtttaaaaaaaaaatcattagtaatatcttcactatctcaagtattgtccctgatatttgataaagaatttatttattttatacataaatattttaattaaccacataatgtgatctctcttttaaatagatatttaaccattaatgtctagaataattcatatttgtgatttgagtgtatatatatcaaatacacgtttttatatatgcataaaaagtctatagcattattactcatatatatgcgttttagatgacttataaaattatagtttatatatatatatatattattatttctcaatagtacgtagtatcaattatttctcaattatcatttatgcgtttcttttttttgtctccattagttggtttgcgatcgaactttttaaatggagtgtaattaatttgaccacttttggttttgttgattaaacacacgtgtgaattgtgacggtcgaccagaccactccatacataaagttactttattatgccattttgatttttggtaatgatttttgcatttacattatgcatatatacataaattaaaataattaaaacttcaatataactataaaaggttatataagttaggataattcgtacttccttcaaaacaaaaaaaaaaatctattaatgtactttttatttgtttcgacatcttgaattttttttttttcatattcatgnnnnttatagctatttaagatatcctataaaagtttaagaaatttagaataatttacaatataaaaaatagtattcaaacagtctattttacacgagtataaaataaaatagtcacgcgtacaacacactgtttgaacgtagttttcgacgtgttatataattttctgaattttttcaaattttacaagtatgtcttaaataactataatttacatgactaaaacagataaagatgcatcggtacatcccttttaagggagtgcattatagaattttcctataagttatactgagttatttgtaaagaaattaagatttgaacaattacttagcacgtgtataagaaaaaacaattgacgtataacaaaatatttaaattttctttatagtattataaattatttgaattttttttaaaaaaatttatgatcataaataattataaggttaattagcaattttttccttcgaactttgacatgtactaaatcatgtcctctatttttttgtcgttaaaaattcctcctgaagattgttagatttaaatttttttatctaattttagtaaaaaaaatctaacatggatgaaagtttagggatatgatttagtacgtattaaagtttaaggggcatgatttggtagatattaaaatctagggagcatagtttagtacataaataattactgaaacggtaaaattaaatgaaattagacaaaaatctttaaatctaactatctcaatactatactctgtattaaaatgtgtaaactatagacttaaggtttttctatatttctaatcgagtagtgatgttcacattgacatattttagggttattattaggattattggctgctggccatagaggagagaacaaagtgcatttatggataaaatgaaaatttattataataataataacaattattttgtaaaataaattagtgatgtcatggtgatttctaaatcacgcaattttggtcttatctttagttttaattaagtactatatttggatttttgcaaagttaattatga

SEQ ID NO: 23799 - DNA, 2808 bp, Cannabis sativa
  modified_base (41)..(56): a, c, t, g, unknown or other
tagaattcatattaggatattaataaaacatacttggtagnnnnnnnnnnnnnnnntaaaataatttccaacacttacttggtaaataggtgtccctctagtgccatagaacttaagacacatgaggaaaagtggtcaggaaaaccccctgatttgtcaaaccttagagtatttggttgtgcagcttatgcacaccaaagtgtggaaaactagaaccaagagacctaaggtgtgttttcctaggttaccctgatggtgttaaaggatataggttgtgggttagagaacaaggtggttacaaagttttaaacagtagagatgtaatattcaaagaagattgttttccttgtatcactaatgaaagttcaagtgcaggttccacaaactctaacagtgcaggttaaatcatagttacaccaccagatagtgatcaggtggaacaaccaagaagagaactagacattggtcaggtggaaccaacagaaccaagatagaatgaacaacaaccagatactggtgaggtggaacaaacagaagagaaccaacctggaaatgatcatgaagacatctctaattaccaacttacaagagacagagctaaaagggtccctaaacctactcaaaggtttagttttaatgcctgcaatgaagtattggcctatgcttttctaacagccatagaactcaccaatacagagccaaactcctatgaagaagctattcaatctaaagatgcagagaagtggaataaggcaatgggacaagagatgacctcactcaaaaagaacaagacatggatactggttagaagacctaagggggtaaacatagttgcatgtaaatggctattcaagcacaagaaaagagtaaatgaaggagatcctattagatacaaggcaaggcttgtagctaaaggattcacacaaaaagaaggatagactacacagagattttttcacctgtagctaagtataaaactattaggattatgcttgctttggctacaaaatacaacctagaagtggaacaaatggatgtcaccactgcctttcttcatggagagttagaagaagagatttacatggactagccaaaagggtttgttgagaaaggcaaagaacacttagtgtgtaagttggaaaaatccctatatgggttaaaacagtcccctaggcagtagaacaaaaagtttgactccttcatggtcaaacatgggttcactaaaagttattatggtacatgtttgtacctaaaaggaagcaacatcacgacaaccacatacttattattgtatgtggatgacatgctgttgatcagtaaggagaaggccaagattgaaaatcttaaaaacttgctgaaaactgaatttgaaatgaaagacttgggggctgccactaggatactaggtatgagcatcaagagaaacagggaaagaggggaactaattctacaccaaacagattatatatagaatttgattgacaagttctccatgagagaagccaaacccactaagcaacctatcactaaccagcataggttatctaagactcaatgtcccaagacagcaaaagaaattgatcagatgagtaacattccttactctaatgctgtgggatctgtcatgtacttaatggtaagtaccagaccagaccttgctcatgtaatgagcattttgagcaaatacatggccaaccctggtaaagaacattggcaggccatgaaatggaccttcagatacttactaagcactcctaaagtgggtttaatctactgaagacaagataaaaatacaaaaatagaaggatttagtgatgctgactatgctggtgacccagataccaggaaatctacctctgcctactattttcaaattgaaggatgttgtgttagctgaaaagtacaacaacagccagtagttgcactatccacaacagaatcagagtatatagctgttactgaagctattaaggaggctacttagttacagggagtgatggaagaaatcactaaagaaaggaagacacctattgtgtactcagacagtcaaagctgcattcatttgtgtaaaaatcctatctttcatgataggacaaaacatgtcgagataaaatatcattttatcagagacaagatcacccaggaattggtgaaaattgaaaaggtgccaactgaggaaaaccacctgacatgggaacaaagattgtcactcttaacgaattcaagcactgcatggatttgttaggaattgacaaaggaggataagacctaggcacctatcgagctaagacccacaaggattactatgactttatctcaggttagcacatgggggatttaggtggaagtttgttgataaatccaccctgtcccaacctgtccaaacaagtaacatactttatatttatagtcaattaactatcaactaatttctctaacagtattccagctcaaacacaaagacagttagaaatcgttaccttaattctctcgaccacaaatgtatttaagcatgcctctatacccagaagaaagggaggttgttttcgaagttggttcacctcgaaagagagagaaaaacacagtgtaagagagaaagaaaaagatgaagtttttgagaaaaaaacaagatacagagagttgagagaagagagatctttgagagaaacaaagatagatcgattaccttctgagatgtggctggaatcgatgaactctaatgtaatcttggcatgagtaataaaattgactgagcaacacttgtggtgagctcgacagaggacgtaccctagaatttttgggcgaacc

SEQ ID NO: 23800 - DNA, 3386 bp, Cannabis sativa
ggacctgatgttaatagagtgagcattgtaaatcttcttttcatgaccaataatggaggaagattataaataacaagaacaactggccagcaactatacgtactactaagagaactatgtggattgataccatcagcagaaagacctagacgaaggtttctaggatcactttttattttctcccatttatcatctacatttctccacgcaggtgaatcagccacatgtcgtagcttaccatcttttatcctttcttcctcatgccaaatcaaattttttgcatgattataatttcgaaacaaacgtttaaaccgtgggataggtggaatataccataacacttttgccggaataccttttcgctcctcttctgaattctttttcagtttccatcttgaacgtgtacacaccggacacttatttgcatcagcaaattctttacgatataaaatacagtcatttgggcaagcatgtattttttcgtactccattcccaataatgataacgtcttctttgcttcatacaaagatattggaatttcattttcttcaggcatcacctttttaaaaaagacaatcaattcagaaaatccaatatcactccatccatatcgtgcctttatattatataactttactaatgtagaaagttttgaaaattttgagccaggataaattggtttctctgcgtcctctaaaattttggcaaattcattaggacgatctacaaaatcatcatcaaatgcatcttccaccatttctaatgggtaattatcaacatcattctcagttgaatatcgaacattcttacgagaatgtggagtctggctaggtacatactccccatgccaactccattctttataatttggattgatcccattaaaaaataaatgtcctcttacatcaacaggagacattttcttaaagtttacacacttcttacaaggacatgagattaaaccattactatctgcaggagacatagatctattgcaaatttcaaaaaagtttcaactccatccacatagtctttggcagttctatcacgaattgacatccaatttctatccatatctattctttaaaagtttctctactgaaaaaaaagaaaaaaaaataaagaaaattatttgggttggaaacgggtagtagtgtattgaaaatttcctaattttaaattatttaggctgattcataatatatgaaaagtaggaaaatgatatatgactctataagtaaatgcactcatgcatatattttgttctatctcactatattcatattatgggaggtaagtttcagatagagcttgatttatcgttgcaaaaaaaggaaaagatgtatggaaatcaaatcagaaagtatttcattctaaccttatcggtaattctattaatattagtaagtactccctcactagctttatttctctgatattttcaagctgcctttaaactttgcgaccttatcggtaactctattaatttctgtatgcttctctaaaatatctctgctagtgttttttttttcttcattttattgaaggaagtttgagcttgatatatctaataattgataaatgtaaagcttactcggactattatctaagttaaaaaagaaatttacatgtagaattgctatgtttgtgaagttattattttgttcttgtttgggaagtttcatgtgtgagggtgtcaaatataatagggcctaggcgtaattttgttcctcaatcagtaatgtccacaaattcagcatcaaaattatgtcatcgatgacagtaagaattctagagaggtagtttcttttagtggggatcctatatattttaaaaaatttaataatataaattaagataaccaaaacattgccaaagaatgttagtaagttaaatcagttacactaccttcagttttagagactattatatattttattcaatagcaaggaaggttattaaggatcatacatttttctcccaatatatcacacattctaaaatttattgaacatgttatataggatataaactacaaaggcctgaagatatttttggcctaaattattgttaattctcacacttgaacaacttatatatcagcaaattaaggaaaaattggtattaattttaaccattgctgggatgatgagtgaacttgacaactaactgtgcaaatgtaagtaatagatattattaagttcgtttatatattatgttatgttacatttagttttgaattaattctttatttttgtattaaatttataactcaacttaaaaataaaatacgtcgaatcccttagctcaagtcgttgatgaaccagaaacttcatgatgcttactaggttttagcaatggagagaaatattgtagaagaaaaccttaatttatggcatttgaaattaattggctcaagatgtggaaggagtatcattatggaacatttaaaaaaaggtgtgactataagagtaagtatgtaatggaatattctagcatcttgttctcaagcttattaagtaaatgaggattaagaaatattttttagaatttttctttgatggcttagagatggaaagcaacgatgccgttagtgtaaatagtattgtgaattgaaatgcataccatatttcatgtcctttgtttttcttctaacttatttcatgaaataattaggctacaataatcagaattggtctaataattggataagatattgtatttaattgttgcctttattttgttttatcttgactgttttgtttgtattaattttcaatcacccctttattatttttttagaagaaacatcaataatattttaaggcacatggccaagaaaccagattaatacacaactttaagcatatcaaggctataagaaaataggaaattctagcaactagaatttggaatcattcattcagaatgctagaaatttattattggagtgcatcactcatttatcaatggagtgaaatcacatggaacagtagaaatttattggtggcctgtaaaaaattgatttgctatgattttcatatttattatttatttttttttttagtacacatgttagttccttattgttatttcaatatagtgttgataattttttaataatactgatcttgcaatcaaaggtattgaaagcattcacagtaggttttgtacttcctcagtgtgctcttgcaagaggtgttcatgtatatggttggagtagaatgtaggtatgctcgtagtttaatttgttgtattgattagagtttagtttagtgtattatagtatgttttatggtaacatttaaagtagcttttttcttaattaatttcaattagacactcatgtggtacatatttagattctgttgtttgtacagtttag

SEQ ID NO: 23801 - DNA, 4094 bp, Cannabis sativa
aactagcgctaactaagaaacccaccgtaaattttttttaaaaaaagttaattaaaaaaatagaatataggatttaaagcaaacaataaactcaatctttatctacatttcttttcaaacttaatcaataacaatgaagtttccaaaaaaaaaaaaaaaactcaatgacaatgaggaatatgagaagtacaatgttttacaatgaaaattttaaaataaggaaaattattatatatatatatatttaataagtatctattctatataaagtgttcctattgatttaatgatacttttcgaatttttatgttaactttaacagaataacttattaattaacaaaatattctttattaatttcataatattattatatatatttaaatataaaagttatataaaatttcacactcagtctagagaaactatatcctatttcttatccaacagtactcgtacaacgatacacgtgtttatcaaattaatatcttttttcttcttaacaaaaaattaataatattattattaaaaacagattaaacatcgaagaatgagttgtaccactattattccgaagcccatctttagcataacttgagctacaaagtgccactctactctatcaaacgccttgctcatatccaatttgagtgctgcatagcctttggaacctcgtttcctactttggaggaaatgtagaagttcaaaagccataaggacgttgtcagttatgagtctttgagataaaaaggcagtctgatattcaaaaatgacctttggaagaaaaggcttagtcataaaactatggcctttgacaccaatttgtagagaacgttacataagctaataggtctgaattgagtgatatggattggcgtcttaactttcagaatgagggtgatcaaggttctgttgaagaaagcaggatctgtaccattattgagagcatccaagaccgattcagtgacaaggggaccaatagtgtgccagtaagtagtgtaaaacatgacatacatgccatccaaattgggacttttatcactactcatggtcttaagagcattagagacctctgctgcagtgtaaggagctgagattatttgttgagaatcaacatccatagtggttggaattgtttccaaatatagcatcaattcaaggttaatcaacaccttggctattgaaaatatcatgaaaataggtagtgataatattcaacagggccgaagtgcctgtttgggtgtttccattagagtcagttagcttcttaattttattattgttgtgtttagcactcgcatgctggtggaaaaatttagtatttgaatcacccaattacagccataaaactcttgaacgttgatgccaatagtctttctctggtgccaataaatcatcacaaatagattctaagttttgaagagcatcaaaatggtcttggtcagtctttggtgagttcttgagggctgcaacatgttcatgagtttctttaattttcttttttagatgtccgaattttaattgatgccattattggagaacggtagcacaattagacatgttactagtcacttgggcaatgctattagtagtatcttgaaaccaattgttgatgataatttcaacacatgtttcctcctccaaccatattttttcaaagctaaattgtgatttgaagacacgttcagcaggctgatctccaagagcagtaacagagacattaatagctctatggtgtgacttatagaaatcgagatggtgaactgatggtgtgatgaaggtagaatcccagcaatcattgataagaccataatcaagcatttccttaatattccctaatccttggcatttattactccaagtagcacgctcaccttcaaaagacagttggttaagatgacaaccagccatagtagatctaaaagcttcaatctgaactacacttcgtgttgggccaccaatcttatcttcattcaaaattatttcattgaaatcaactagaacaagctaaggtgacaaaggagccacatcaaaacatctactcaaaaccgtccaagtgtgagatctttgattaacacaaggatgaccatagaatccaataaagtgtaaagaaggaccatcttgactctcaatgaaacaatcaatgtggttggtagaataattatttagtgaaattgtgatatgagaattccaaaggaatgaggccaccgccttggcattgtcttggaacttctaatccatgaggaaagcgtaacctttgacgaaacttatctataacatagagggtttgcttaaaaacaagcaagtataaatgtctgaatgcactcaggttccctaagcccccgcgcattccaactaatgaaattcatggctaggggcggtgttgcttagcaacagtcgctgaaatattagaatggtactgagccgaatccatagaactagaaatagactgagtagatggatcagtaggctttgaagttccaaactgatcattgagggtgtttgatcgacaatgcttgaggacatttcaaagttaattagagttgacttggcgtttaaacatcttgttaggatttgagttctccttatcatcaacagcaccaatgactgctttacctttgagagcatcacgagatgggactgctgcaataccaaaagatattgtgattgtggtagcagatgagtaaagggctaatggtaatggtagtgttagtgtggttttaatttggtttgggttcatggaggatattgatggtaagtagcaatcatagttgaaggagataaataaggaggatatggtaaaataattatttcttcaatggtagggactgcaatagtagtagtgtcggtagaaatttgtgaagttggagatggagtattgaataatggaacaacttaatgggaagggttcagaccaacaataacagaggtttcgttctcagtcaataaggttggaaaaggcagtggccttgcatcaaggtttggtattgcagcagtgaaggatcttttagccaatcttgtcattaaagaccaaactctccctttagaaattaatcctataccgatcatagccagatttagggaatggagaactaatcattgaaggaccataggataaagagggatcaacgccattatatattagttcaagaaacttgtgacaagttttgaaaggatgacctattgcacctcattcaaagcagaattcttgcaacgctcacaacaaaattttaactagaattcatctctcgagtccttatgtctaaccattttccccttaataatggtttagagatatcgatagttccacggaaacgaaaaaaatgatccccagccttcatataaagaatcctcagggaatcaatgtaagatcctacaatgttatatgcccattctgccataactttcaatttgttgagaaatggtaatcggtggagttgcacccagaagggggataaattcatggattctgcagaagcaatttgtagagcagttggtgggctcaacacaatgtgatggttttagaaatgccatggctccattagtaggacttttttaaatctccaatacaaccaaatgtgactaaaagcagccctgaatgatgaccagtggtggtaagagggaattggcctttccaatgtccactcatcttgatacaaaaaagtttttcgatttatttcttaggatgaaactactcgtgcataaagaacattattctgggttgtaagactcccgttagacgaggaagcagggagagtctgaacttcccattcaaaatcagtgagaattagagattgattcatgtctttgagtaaaagatccatatacaaaagcaatgcagaagaggaaagggttaggacagtaataatgtggttatcaaggagaggttaaacatggtggagggaacgatttttgtgtataatttaaaaaaatagagctgatggacatggaggttacaaagaggagaggaggagaagcaaaacaaaggggataaaattagttaaaacaattagagtaaattgcggcataaatacctaatgtttcagattttatacactgaaatacttattatttatttttggaggcaaaaatac

SEQ ID NO: 23802 - DNA, 1970 bp, Cannabis sativa
aaatttaggaagattatttatttaattaactatacattttatgtggcagaatgagtatagtcgaaagttttagagacaaaattgttaattatttttttttatataatttttatggttttatgaaaaaagaaaaattcgtattaaaactaaaaaatttaaaatattcttagaaaaaaaaaatcaaatactccactgaaattaaagttgaagatattaaaattgggatatttttatgaattgacaaccataccacctcattccaatacaaaacttaagaatcaacttcaaaccaactcaacttgtttgtcatgttttgccactttctgattcccacactatcaatcaagggatctctattctctacaaatacataatataaaatatccccatacccatatcttttctagttacttgtcagattgacactcccaattttaattatttgatttgtgacgtaccaaattttttaatttgtgggtgtttatttatcataataaaaaaaaatatttgcccttattttatataaaaactacaattttagtgtatatattaatttgataatgaagctctcacaaaattaaacaaatatagtacagaaaagatttatttttagtaagtgtgaattattttgaattaatatatgattaatttaaaaaatttattacataaatatgtttcaactttatgtgttgatgatgtatcattaataaataaagataaaaactcataaaaatgaatgggaaataagccatattcgtggttgaagcatgtccatagtataaacttttttttaagataaagattacaattactcataaatttatgatgtaaaaatttgtaattatcttttttgaattgagataatttattgtctaatcgaaaagtatactttgttaaattataaactgttaaattcttaacgcaaaccacataggataaaattgcttaatcttcactggcataaagcattataatggcctaaattttttttttcttttaaaaagtacgatattcattcaacaaatatgtatgcatcttacaaaggattagacaatagtccgctatcatttgaaaatttctccattccacctaacacaaactttcaaattaaaatctaatttgagcaacaatattaattgtttctctaacctagaaacaatattatttttgcacatttatgcacttggaaatacaaaaagatccgtttcaaaaaaaaaaaaaaaatacaaaaagatacaattaacaatagtatcaaaatttgagcacatcacacttcgactattcatcaactatttcgctttagtgagactcatgaacaaacttcttaatacaaaatataataaatatttttttttaataattagtatatattttttaaaattagatgatttttgaaagaaaaaaaaattgggaaccaattactagaaaaaactttagtagaggccacttgacttgctagcacaagtaacgtagtgcttgctagaaaatgttaatacttagaagaaaattaagttatagataataatggagtgtcattttgagtagaatgttttgaatatttaggttggttgaaattagtataataagaaatgagtggtatgattaaaaactttgataagtttaaaaaagtaggtattattttatgtgttgtaatgttaataaattaataaaatgaataaaattgaatttgtcacccatttttgtgtagaattcaaacttattactttcaattacaacggctaactattagtgggccagtggcatatatatgccatattaaaatcagagacgttgacaaaattctttatacctatgttcatttggtcttgtaattatatataacatgtattttaattaaaataataaagcattctaaaataagacaaatgtcaacaaattttttacaagacaacaataaatctctttgcagtcttgtactgagctatgcaaaaactttataaaatatataa

SEQ ID NO: 23803 - DNA, 1758 bp, Cannabis sativa
ggaaattgtttttgcaacagataatcgaacgttttaatgggcggctacctggttatataggcagtggatttgataaatattccttctcccatatagatgatgtagtagaggggcatatcgcagccatgaacaaaggtcggcttggtgagagatatctactaaccggtgaaaatgcatcattcaagcatgtttttgatatagcagctatcatcactgcaacatcgaggcctaaatttaacattcccctatggctgattgaggcctatggatgggtatcagttcttttctctcggatagtgggaactctaccgctaatcagtcccccggtatgaattattttttctgcaattcccctctgctattttatgatgctgggcattttatgtactgcttgctctatagctagaaaagaagattacatgttctattatatctaattatgttcgttttttgatcaatattggagacagacagttaatgttttaaggcatcagtgggcatattcctgtgagaaggccaaggtagagttggattacaaccccagaagcttgaaagaagggttggaagaggttctgccatggctgaagaacttaggcttgattaaatactaaaatgagaaaagccatgttttttgtttcctccttgtatattaatgcttataaatgtataataatgcgtaatcatcaagtaacttttcatgtgcatatcatattctgatagtccacaaatttatcccaatcttaattttacttgtaaaagttgtggaaagatttgaagcaagtcctggttttggtgggggagaagtagactcttttcaaaattaatggcacgtgatgatgagaatgcttagagacaacatgtgctggacacttgagaatctgattgtagtagagtgtggttacatttacacttaccacgaatgcttcatttatagcaatgcattcgacaaatttgaaggtgggttggaacacatggatttgggggatttacaagtgactacgtgagcaacaaatgcaagcattgataaattgtaaaagataaaaaacttgaacaaagtaatgtgtaatgaaatttgttggcaagagtatcagcccctagggagcgtactaatcatgaattgggaagtgggtctcttaaggtggtgactattaaagctttctctaagaatgtgttagattgtgctgacccagtgatttgtatggttcacggtgtggagaattctcatttgactgatttgagtccccgttgttgttgaggatgctggttctcgagtgtcttctctttaatgtattcttgtgaagtaagatagttcatttcctccacaggagccatgagaggtgtggcgtggaactgtatagggttgggacaaatctctacagttcttgaactaaagtccctagttcggtcgtgtttacctgactttatcttttcgacagaattaaaagtcgatgtaactccactggtacgtactcttagacaccttcacttttatttcaatatttctattctggctgtggggaatgtggggggtattattttagcctgaaaaaattgtttgtatttgaaagtatcaatatttctcgtaaccaaattcctggtattgtttactctgacccgacctctcacccttgacttctctcttgtgtttatgggtccccgtatctccatgcgaaaaagaaattttggacaaaccttatgaaggcaggggatagatttggtggcccttggctaattttgggggatgctaactttgccctc

SEQ ID NO: 23804 - DNA, 3312 bp, Cannabis sativa
  modified_base (2967)..(2967): a, c, t, g, unknown or other
cccagccataggatcagcaacctgaccggccacctcatccaaggcctggcttgccatatcctcatcaaagtgacgagatgatgttccctcagtttggccgacagtttggcctgccccctggctggcctggtctaccaatatcatgctctcatagagctccttcccctgagcgagtgatctcttgcagaaaggagaccctatgtacctgaggttgacattggggttgtgcaagtacacctcgtacaagacctcagaggataagcccaaacacttgtccttgatggcttggtctccatcaagggccaattacttttcccgacgctcgttctcaagctccatctccaacctggaggcttcagtggcaaactttgtcacttcttggttcatgataccaagtaagcattctaggtcattatttaggtcctgagtttttctcaagtgagtctatgtctagacatgcacatccctctccatcttaagctcggcctccttggccttcagcttctcccggtgaacgtcgacagagcccttggcccttgcatgagtgaggctgaccttcagcatggcctgaaaacaaagttaaacaaaaaaatagaccttggccagctagcccctaagtggtgcataccttgttggccagcccctgtcaatgcaaaaatttgagtaaaattaaatatacaacttacagatgatttgtctttgagggcgctagatgtcaagcactctagctcctagagctccccatcaatgataggaaaagtcttactaatatagttatgagcagcctcaacagtcctctgaccagtggatgaacaggctccctggccagacgtctgggcccccttgtccaaaggcctgcatggggtggagatctcctcaaaggagggtccgtaatcaccggctgaccagccggagcaggccctggaggagggggaggcagtggagactgagtggcatcagatgacctggtggttcgggccaccttggcttgaggacgaatcaaagaagcattgcaagaaggttcccctactagatccgtcatcttggaagccatgtctacaaatagaaagtaacaaagttagaatacatgttatcagtattaaatgtaagaaaaagtaagaagttggtactatcaactaccatctaaaagacaatcaccctcagaggaagaatcatcagagccactatcactaatggcaaccttgccctttcctctaaaggcaggcatggggcgagcaaggctggaaaaatcttgccctctaggcctaatcaacaaaaaaggatcaccaacagtaactccgcatgtcaaacgctgtccgaggggcctgtccctcttatccatggtcttggcaagcctggagatgggaaaatcatcatctaaattaggtgtatgcgttcccccaagtaagcctcctctgtcactggggtgtcatctgggcatgcagacgtgcccgcaactccctcaccaccagacacaagagggtacaagccctacctatgaaagttggcctcacaagccaacctgagtatgttcctcctctcaacagggagggacaaaatgtaattagctctatccctcaattaaagagtgggaatagagtgagtgtaagtcggaaccctataaaagtggtgatggacttgcaggatgtcccaagtgatgaagtaagtccgagaatattgtccaacctttgacaaggctttgatattagtgttcccaatcactggtagcccaactggctaatatagaagtacccggatcggccctgcctcgaaatggattttagattaaagaaatacctgatctcatagggtgagggatggtgccagcccaactcagcataaaggacaaacattgctgaaaggtactttatgcccttttgagtgatttgagttggagacagcctaaagtagatggttatatctcaaaagtaagggtgcaggggtagcaccgctccctccccaatatgatgctctaactaggccatccacttgaatgctaggcgatgtgctagctagtctctagtgggcctatcacaccgaacttctcctaatagtcctcccgccttgttctcatcaagtttcttagcagaaatagaaggcaggggagatatccaccgatatagctggtcaccgtgcttgaggattcaagggtcggaagcctcctctaaaacatggtctatcccgaccttagatagatgaccaaggatgtttaaagggggaccagcctcagtgtaagaacctaaggggttgttcaagaatacggtataagtcttgtaccgcctcccaattctcctcaacctaggacgcactatttgactcggcgagggctcctcatcttgggcgaccacgagctgcccgaccataggttcctcaacttggccagcacctggctccccaccatatcgaggctgtgtaacctcctcaacagccccaaacttttttttttttaatttttttttcaaccaatagaacaatctcagcccatatgatgtaaaagtgagagatcttttaattaaataaaaaatattaagcataaaaactcaaatttttctaattttacccatttatagaatacccattaagatttttatatatatattattttaagcattgttagtgatactctgaagccaataaaaagaaataaaaaaagaagaaaagaaaaaaattattattttttctaattttcttacatacgtatttataaattgctagtgatttttcaattttagatgttttgccgttaaaatttaaattttaaagattaaatgcaaataaaatagggatttttacatttttacacttcaaaatatatatatatatatatattttttttttttacatttttacggaattctatacataaacacttatagcaattaacggagcaacctaaatcacaactaaaatccgtatagcaacccacataaaactatcagagtaacccaaactgtaaatttaaaaaanaaaataaaaaaaataatatataaaataattctctaataaaataaaattattaaaattatgttgcaattcacttttatcagtttagatacatcttccttcactttagatacatgccaataaaaaataaaatataaaactagtaaagttacaaaaaatatccctaaaattttatactacattaaaaagtactataaacaaatataaaattttatgtagaaaacagttacataactgattatcagagatgaaaatgtcaaaaaatgacctttccccacagtaattattttttgtctcatttgatgtgccttatacctctaaagaaagtgacgtattaaataagtcccc

SEQ ID NO: 23805 - DNA, 5588 bp, Cannabis sativa
aaaatccacttataattatttagttaaaaaatatttaagttgtagtcacatttgttattattacatcgttttataccttcataagtaaatttgaaaacataaaattaattataaagcttgaggcaacaattttacagagaagattatgaagaatagaagtattattaatttaaatgatattaagagttatgaaggttaaaactaggagagtcattcctaatcattttttgaatcaaacttacaaaggttagacttgtttattttgaatgataggctcttgtacaatgaaaatcctggtatgaccatatatgtatatatttaaataatgaccatatatatttatatatattgttaactttactatgatcatattgtatttacatttgtaatactttttattagtattattagtattattatgtataaatattatattttttttaaatgctttgctgatggattttgggtcgcttatcttttctatgaatataataatatagcttatttgtgaatttttaatatgtacaaaggttttaccgtggacattatgcttccttttataatcgaagcaataggtgaaaaaaaaacatattttagtaatttatgtgtcattttgtaatcgacggtataactttttagtgacgtttttgaaatgccacaaatgatttttcgtcatttcaaaaatgacgcaaaatattaaaaagaagaatgtatattttgtgatggtttttaaatgaagatatttttttttgcgtcatttaaaaaacgacgataataaaaaactatttgcgattatggcatatacgtcggttttcaaaaccgacgtaaattctttaaatgacacttagaaaccgacggatcttgtactttttgtagtagtaaaggtatggtttccaatatgggagattggaaatcgaaatggttctacgagtttaaagtactaggagttaggactgacttcaatcgtcgacctagtatgttgcgtatcccaatacttagtatatacttttattaccttgtatagtcgctaatttttgtcttttgtcaatcgtagataggccagctcgacctgtacttgattctgctcgccgggaaattaatgaagttctaggtagcttgcctgttcaagatcgcattggcgactgctgtgcactgctacaaaattgcgagaacataaaaaaacaaaagaatagacaagcgtctatctaaataaacatcaagaccaacatcaggtaatgtgcttaacatattcattttttttaaaaaaaattattaaaaaaaaatttctcttatggtcttctcgcagaaatgacattcctaaagcaagctcccatcctcaaccaaaagcctaaggttgtaaccgcgacaacttctcttgtcatcccgtagaagaggaaaagcgatgctgtcccttcgccagtggctgactcatcaaagaagcaactcaaatatgcccaagacaaggggaagaaggtcatgaatgatcctgctgttagggcccgcaacatcataactcttcaagacaaattcgtgaccaaggagttcgtttccaaggacgagagggttcctgtcgaggacttgttgccacgctctatagaattggcctcgcaatttatgactatgttctcgaggccttttgtcacatgttctaaggaactcgaccttttgatgaagtagaacacacttctccaagacagcgtaaagaagctgaaactggaggtgactgctaaggacaaagacatctaagatcttgagaaggctaagggggatgcggagggaaaagtaaaacttctagagtcacgagttgacgaactcagttgttaccttgagaatgaaaaggagatcgggaagaagcaatattactaggccgtctctgattacatttatacgactttgtccaagctccctgactttgactttgcacttcttagagcggaggcatttgaattggtcgatgcatttcgtgctatgtcgcctactcagactcgaggacacgggggaaatctttttcttgaggatgccgagaacgcgaatgcggaggaggttgcagatggtgctgcaagtaaggtcgcagacgatcccaatgctccaacctcctaatttttctaagtttgtttttatcattgtcgaacttttatctcttttgttagcggtacacgggtactcgcgctttgtactttgaacaaattatctttattttgttattgaacaatatatccttttgaggatatattacttttgcgtacttgtttagcattacacaggtactcgcattttttaacctgcacttttaactattgcttttgttttttcttcgcaaaaatctttagcaatattatcacagcttggtgtgaaaacttagaatataaaaaacttgcgaaaaagattaaaaaactctgaaaactttgaatatttcattaatataatcaatagtacaatattaggttatacaccctatacttagtacatttattgaaataaattgacttagtataaatacatgcgagtaatattgatagtaatacttcaatatttctccattccaagctcttttgattgttgtcccgtcgagatcagatttaaacagtaagtcgcattatcgattttttcagcgattaggtacggtccttcacagttatcgccgaatactccatgtgctgagttacacatgttaggcataactttgcgtagcaccagatctcctactcacatgttttgttctttgacatttgagttgaaataatgagttgttcgctgctcataggctgcatttttcaaatgagcctaatcacgtttttcttccaaaagatcgagttgtaacaactgactttctgtattgttgttgatgttgaagacatctcttctcaaagaacctgctccaacctcgacaggtaccatggcttcgcatccataagaaagaaagaagggggtttcaccagtcgttgagcgaggacttgtgttatatgacaatagaacttgtggaagttcttctggccctgcccctttcctttctttgagcttaccttttatggtatgcttgataattttgttgactacctctatttttccataactttgaggatatgcgaccaccgaaaaagctttcagaatccccagatgatcgcatagtcgatgcatctccttacaattaaattgcttaccattgtcaaaaatttgttgtatggaatgcgaaacctgcagatgaaagcactatagaaaaactcgcgtagtttggaggatgttatggtcgcaagaggtttggcttcagcccattttgtgaagtagtcgacggcgactgcagcatattttactcctccttttcccttaggcagttcaccaattaaatctattccctatagtgcaaataggcaaggactagtgctagaatacaattggctcggtggcctatttacataagttgcaattcactgacagttgtcgcatcttttggcgaagttagctgcatctacccaaaacgtaggccagtaatattgttgcctcataatctttagagcaagggaattaccaccaggatgattgccgcagatcccacaatgtacttcttggagtatgtttcgcatttactcccatggatgcctttaagcaacgactgaatgaaacttctgtgatagagcttgtcgtcataaatgacacatcaggcgactcgatatcacagttttttggctttagtcttatcgccagggagcactcctttttttaagtaatcaattattggggtcatccaggtgacctttttgattatagccacctccatcatttcaagtcgatgaataattggatgagttaaaaaatcaacaagaattacgtcgaggccaatcgagccaaggcatatgcatgagaattgtaagcacggggtattctactaacaattttctttttaaatttttgtaataactcacaagtgtaagaaagatatttttccaaacgtcgtcctctggctagatattcttcgttttcttggcaaattacgagttgtgagtcgctgaatgcttgaaggtattcgactttcatcttgagagggagttttaatcctgcaattaaagcctcatattcggcttcgttgtaagatgcaggaaattcaaatcatagggcagcttgtaccttgaattttttgggacatatgaggattattccaccacctaatccttcattattggatgtcccatcaacctacaaagtccaccccttgcttgttcgtacatcggggtcaactcgctcttctgtgattatggccacctcattgtttggaaactctagtatgaaatcagcaagggcttgtcccttgattgctgatctcggcttgtacctaatgtcgaactggctcagtgctattgacaaattaagtagtctctcaaacgcttctggtttggcaaaaacttgttccaaggatagttcgttaagacctcaatgttgtgtgcttgaaagtaaggtcacaacttccttatagcaatcacaagtgtgaatgcaagccattccatttgtggataacaggatttagcatcctgaaggcatttgttcacatagtatactagatgttgcctaccttggtcttcgcggatttggtaccgaactaattgcgtattcggacactgcgaggtagattgacaagacttctctaggattcagcttggatagtattgggggtttccccaagtgcatttttagggtctgaaaagcctcttcacacttatcagtccactgaaaaaaaaattccttttaaaatcagaaaaaaattctttacgcttcttagaggaacgtgatataaagaaatttagtgcaccgactttacctgtattggtttggacttcttttggtttggtgggagctcacatctccaccaatacttttatttttgcaggattagcttcgattcctcattgattcatcataaagttgaggaattttggtgaacccactccaaagacacatttgagaggattatgtcgcattttatattttcgtaggattctaaacatggcttcaaggtgggtgacatggtctttcacatgttgagattttacgagcatatcgtcaacatacacttcgatcgtctcacctatcagatctgcgaacatcatgttaacaagagtgtgatacgttgctcttgcatttatcaaaccaaagggaattaccttataacagtacaaacctcgatctgtagtatgcttgctcctggtctggttcatacatcggaatccggttgtatccctagtatgcatccataaaactacgaagttcataacctgtagtagcatcaacaagtttgtcaatgcttggtaaaggaaagatgtccttgggacatgctttatttaaatctgtgaaatcgacgtatgtgcgccatgagccgttgggctttggcacaagaacgagatttgctaaccagttagggtagaataacttgattctaaagccacatgccaataggcgatcaacatcctctttaagcgcttggtacatcgccgagtcaattttgctgagcttctgtcagacaccttgcatttctgggtcaatgttcaatcgatgacacatgacatgcggtgatattcctgttggaatatattttacca

SEQ ID NO: 23806 - DNA, 1319 bp, Cannabis sativa
ccacagaagtaggttcaggacctacttcccaatgctatttttgttattttttgggaaaaccttcgagtgtgcaccgagggagcaataatacttactaaagttcaagctggaaccttaagaaataaaaaaaaggctcagttgctaccaaaaaggttagatccgattgggtttcttttgaacttgatgaaggtgtgacgacattagacgatcagagttcaaagatggggaggatgtgaatcgatatttgaaagttcaagactccaaaaactttgtaattatagagcccaattcactctctgaataatttagggatagatgggcatattaatgaaagagaagttcttcatcatgggaattagagatcagttacggttagagtttttgaccaccatgatggagtggagttattagggccgtcagggtggagaatttcagagagagagcatgaggatggaagggaattaggatttcatattttgggtttttttctaagaaaaaacaaaattcattttttttattttttaattctttttagatttatttctatctttgaattaattaattttaaaatctattttatttttcaataattaattacgtggaaaaataaaatgatgttacatgtatgtccatgtgtacaatatgctagtatatatggacaatccaacatggcacttaatataaaaaattagatgcaaatggtcaattgctaacggaacacgagtttgagtgggttttgccgttaataaatttgttttgggggttagatgcaaataatgtgaaactttagggagtttagccataatttactctaaggggttgtttggtgtacgtgtttccttactcaggaatgggaatactaagtctaacctgtgtttgatatgtatttttatttttatttatttggttgggattttcattttatagggggataccttgcctttacacagagggaatatcaacatcttcaaaacgttgacttttatttgcttggaaactcagcccttactttgaaacactctctctgcgtcgttggatgaagccctagccattgttcacttcctcttcttccttcttctacttaaccaagtatctatctctatgtacatatgtgtgtgtatgcaaaattaaattggtcaattgaacgtatctctaactttcataaatctgtatcagatgtgatcatttttttctaatctccttcatctctctctttcgttcattatctttcaatttgttaacggttagtagttttgttcaagattttctctgtttcccaacacttaaaagctttgtccattgttctcgatatttatggg

SEQ ID NO: 23807 - DNA, 3113 bp, Cannabis sativa
atgaacaaaataatattaataatgggaaaaatatatattaaaatgtaggttttcttgagttgtcactatgttggaaaggatctaatggtaaaacttgagaaaggagagacatggaaaaaagtttatggccccatttcaatttttcttaattctgcctcaaacaaccctaatcctgaatcctcattatggaatcatgctaaagcacaggtatgtatatatatacatgatacacatatatataatttgtgattgtatctatattctatataaacctataattgaacctacattttaatgtttatcaggcagaagaggaagttgccaaatggccatatagcttcataaattccaaggactatcccctttctgatcaaagaggaagtgttataggtcaattgtttgttaaggataggtacatattttttcaatctctactactaatatataatctaaatatttgtaatattcttgtgtatgtatcagtaatcagtatcacttaccctttttttttgtcccttttctttttttaggtacttaaacaaaaataacatacatgccaaatttgcttatgtgggattagctgcacctggaaatgctggttcatggcaatgggaaaataaggtacatacttattaatggattttcactagtgatattattaattgcacttgaattaataactaatgtgcataatattttaggggtaccaattttggagtcaagcagatgagaaaggaaatttcatcataaaaaatgttcgacccggcaattacaatttatatgcttgggtccctggtgttataggagactatgtctactacaaaacaattactattcagccaggtatttaataatattaatatataaactactttttaattgtctagtcaattttgttattaatgtgaaaaaatcaattaatgcagggagcaaaataaatttaaataatctactttatcaacctccaagaaatggacctaccatttgggaaattggcattcctgaccgaacagcttcagaattttacgtgccacacccattgtctaatgtcacaaatagactcttcatcgataaagaaagtcataggtaaacttattttattaagaataattattatacatatatatatataatatatttgcattattattaactttgctggaattattacaataaatataggttcaggcaatatggtttgtgggatcgttatactgatttatatccagaaaaagatctcgaatacactgttggcgtgaatgattatcgaaaagattggttctttgctcatgtcaataggtacgtacttattattcatcataccattattaattataataaatttaatttggtaataaacacacttggtaataatattgtatatcttggtaatagaaaactagaaaatgggacataccgacaaacgacatggcaagtgaaattcaaccttgaaaatgtggtgcaatccaaaagctacactcttcaattagcattagcttcagcaagtgcttcagacttacaggttagtattaattaattaaaatatatatgttatatatattatttaataatgaaattaatttatatgtatattatttgtttaggttcgaatgaacgagcgtaatacgtatagtcccatattctcaacacatttattagggagagataattcgatagcaagacatggaattcatgggacatattggatgttcagcattaatatctctggctattggctccgtcaaggacaaaatatactttatttgacttcatcaagagctttaggtccttttggaggagtactctatgattatcttcgattcgaagccccatctcaaacataattatttcactatttaattaattataattgctcatgatgaataagtttaatattatataacttcattgtgtatttagtacattgaacaataatggcaaattaccatactgataatttatcagctgtggtataaaaattttgtatcttcagtgtattttacttctttgaattattctgacatttgtaaaagtgaaatttcatattttataattactaaattattatttaatgaattaattaattaaatatattcttgttataattaattaaattaccatactcatgaatttttcagtggtatattaattccttattattttaatttatcaattattatttaattaatcatattaaggaataataaagatactgaaattattctatagactgagaatttgtaattctacaaaaaaaaacttgtaaagaaccctagtttaggaaaataaaaacacaatcaattaattaaagtgtttataagtggtatcaacaattcttgcctatgtggtcatgccctgaaataagatatcttaaaagtataaagtttttaatttatgcataaatagactctctcttatcatcatatgccacaagcttaatttatttcaccttaataaattaacattattgaaagtttatgtattaatttgaactctcttcgagtatttatttcacttgatttatgacttcatctgattgaaccactttctctccaaagcttatacttttatttttctcctttgttgacttgtttaaagtctcaacagggccgtcttaaggtgatgagaggcctagggcgaaattagaaacgaggccttttattttaataaaaattaaaaaaataaatcttaattaaattttgacacaatattagttttaattcttttatctctatgttataaatatttttttgcaacgtacgctaactcgatcaaagtaatatttaattactaagaacatctatattgaagtgttatatattttagcagaaaaaaaaaattgtttaaattatatatatttaaaaaaaataataataaatataaatctaatttattattattattttaaaattaaaagtacttgaatatattttttgatacaatctaatacaaatatttaagttataatattattatttatcacaaataattaaaagtataaaaagtagtgagggaaaggtcaaaccttgaacctcaagtccaataaaagctccacttaccatttgtgctacatgtttttcatataatttattgagttaaatatttatatatta

SEQ ID NO: 23808 - DNA, 3203 bp, Cannabis sativa
taaaacaagaatcgagttatgcaagtggatagggttggatcaaatttcaattgggcccgactcactaacttgagcctgacctagtctagcccacgcccttacaactctgggtctaacttacccagcccatattccacttagaacaccacgatacccattaacgcaccatcaaggagaagtgcaatttctatgaatagaccagtcgagatttcttgtcactcgtcgtccaggcagctacaagaaatacaccgacatcaaactccaagcacacagagaaaagggacagtgctttaggtgtgaagagaaatggtcttggggtcaccaatgtaagaatcaactcatgcaggtgttgttcgttaatgattccttcatttgtggggaaggtgaagaggagaacatactctttgaagattgtttggaaaaggttccaccgaagcaagttgacggtaaactctcaatggactcagtagggtttcactgaacaccaagaaaaattgaatcacatgaggtgacggtactcaatagattgtggagcaacccacaatttcatcagcaaggatactgttgaacggcttaaaatacctctcacaattacatgtaactgtaagaatctattattgtccttacttgagatagatgtggtagaggattttcttccactcgaatcgggaaattcatatgtgatcctgggtacagcatggctgacaaagttggggtcaatggaagtggactggcaaagattgattataagatttaagctaggacgcactactgtcaccctctgaggcaagtctagcttaagtaagcatttgatttctctccaggccatgttgtgaacgctgcaagaaggtgatcattgtttattaatagagctggcgtcgtttgagtcacaactcagctgtgaagtatctcctccaacagaagtacaacacttaataaatcaattttccgatgtgatgactgccctattgccctccctcctgaaaggatcctgaccactgtattgaattagtgcaagggactgctcttgtgtcaataagaccctattgggaccctcataagcagaaagatgacatcaagaagatggtgggtgacatgcttttagcaggcattgttcagactagtcagaactatttattgagtcccactctttagtgaagaaaaaagatggcaactggagatttcgcatagattacagggctttgaatagggtcacagacccagataaatttccaattccagtcatcaatgaactattagatgagttcaccaacttcgggctatcaccaacttcgagttagaccaaagaacgtgccaaagacaactttccggactcatgaagggcattgcaagttcttagtgatttaagccctatctctgaaagttggatcttgtattcttcaatgatattttggtttacaattcgcatctccaagagcatttggtccatttacaataggttttggaaacccttcgcagtcattctctttatctcaattcaaaaaaatgtttatttgggcaacaagaattagaatgtttgggtcatattatttttgccacttccaatggagtggcaactgactcttgtaagatccaagcaatggcagaatggccggtccaaacaaattagaagcagctccaagaatttttggttttaacaagatgctactagaagttcatccgcaattatggacaaatagctgcatctttaaaagattaatgaaaaaggacaatttttggtgaaatgaggaggcccagcaagcccttaaggagctcaaattggtcatggttactattccgatcttagctcttcctaacttctcaaacctttgtaatcgagacaaatgcttcgaggtcgggataagggatgtgttaatgcaaaatcagtgccccgtagcttacttcagttttgagcaatcgagcatgtttaaaaattgtctatgagcatgaacttacggtcattgtgttggcgattcaaagtggcacccttatttgcttgggcgaaaattttggttcgaacgaaccaaaaaagtctaaaatttatgctttagcaaaaactggtagctgaggaacatcaaaagtgggtcaccaaattgtgaggctacgattctgaaattgaatatcaacctgcggtggacaataaagttgtcgatgctttgtctccccaaagtgaacatattaaccttgtctcctttcgctttcatggtcggatcattgggaagtcttgcaaactaaggttgataaagatccaattttgggccctaagaagcagagcttgctagctggtgcagccttaattgatggtcatacattgtggcatggaaatctcatgctccatgacaagttggtcattccagcaacatcttcattgattccacaactcttagaagagtaccacagtggcaaaattggggaccattccagtgctttaaaaactttccaacgtttggctagaaaagtggtttggtcagatatgaagaagtgagtgcaacaatttgtggctcaatgtgtggtacgccaacaagctaaattcagttctctgtgtcccgcgagactcctccaacctcattattacagtttgggtattggaggatatatttatagactttgttgagggtcttcctcgctcaaaggggtatgattgtctcctggttgttaaacacccctttattcccctacgtttgcatgaatttccatgttccattgactcggatcgtaacaaggttttcttaagcaaattttggtctaaattgttacgtctccaagggacttgccataatcatagctcatccaatcaccccaaagtgatgggcaaaccgaagtggtaaatcaaagcattgagactcttatcttcgttcttttgcatgagacaagccaaaacgcgaatatcattggattccatgggctgagtattagtatgagtattagtatgactttattctggggaatgtaccaccatgatccaccccctcttctatgcttggagttgggtgccaccctactaatggcagttgatcaacaactgcgagaccatgacactatgcttgacgatctcaaacacaatttgcttcgtgcccaacaacgcatgaaagacatggctaataagaagcgacgagaggtgcatttttcagtagaagatttggtcttatgtttaactctgcccttaccatcacaagtccttggctcaatgcaagaatgaacaa

SEQ ID NO: 23809 - DNA, 1175 bp, Cannabis sativa
tcgacaaattctctttaaatatagaccctccacaaaacaacctacaaaataacaaaaataaaacttcattaccaaataatataatgaaaaagagtatgcgaaagaaataatagtaaaccaatctatattaaaattaagaacttaaaaagacttaaaatacttatctgttaaagtgaaaagattgttaaagtagaaaacgagagcacaaaataaatcaaatctcttgtccatcataccacaaacctatcctaaacaagtaggaacaagccataaaatggcacaaaaaccataaaagatacaaaaactataaaaaaaaagctacccatttttgttttcatgcaaaagaaatataataaagtaataataaggttttgatataatacaaacaccaattatataatggaattattacgtaaaaaaaatataagttgagactttatttataagagtattactaaatatattaatattatttgatattacttatacaattaattaaactcactctaaatatattataaactctaatggactttcatattgggctttaattaaacgattacctacttagaaaattagcgggatatttacacacggtactgcttttttttttttttttttataaaactttcttttttactattgtacgcatatattttcctttttactgtataatctacataatgtatactgaattagtataattttttttcccttttattctttttgtcacttcaagatatgttttttattttattttattttttaaaaaaaaaattaataaaggttgatggaaaaattgattgtcaagttagtgacatgtatatatatatatataaatattttaaaaaaactaattatagaagttttgattgtatttaatagtaaaaacgttttgatgtgatggtgttgtcattttatgattttctttttttttaaaaaaaaactaatcatgaagagcttaatatacatcttcctagtttctacacgttatcttttttctttttaagtataatagcttttattacttatttttcattgtatttgagctatctctactattcagcttgctcttcattttttttctttttttttttttccaaatctataatattacccaaataaaagctaactctctccttttgtagtaggtaactaaataaaaacagcatgtg

SEQ ID NO: 23810 - DNA, 2053 bp, Cannabis sativa
cattaaaaagaatagtgaaaataatcagtggaatggtgaaacctgatgcaactggagactttcttaatccaaaaaccccaagagcaattatttgcattaacagtaatgaaaatatagtggtattgtgaacaataggccagtactgtcccccactttcgtattttgtaacatacacgttcagaatctggtttcggtagacaaagaatgccattataaaataaaccagcaagaagggtaaaattaagggaaccaagatagaacatgtgaagccaatgaatccaaatagcaaaagtcttggaatttcggtatgatatggaaaggagagagcatcacttggtgagactgacgatgagtcgattcttagtataaatttttttatcaagttgcaaaggagaggataaagttgcatgacttcacatgccaagcttgcccaaccagatgacaaaacataagtcaagaagaaacctgcttgagctggaacagcaatagcaagctgtgcaggtatgtccttcacactagaaaagactctcaattggcggattacagacccggtaaagacattgacaaaaaacacattccatattgtgaaatacaatattttgcaacatgcactcttctttctcccacttcttgatatagttccttctactgctgaaaataacatcataactggtggaactgtatacagagctaacatcaaaatcacacttggaaggtaacctgtaaacaacccacttacaagtttcttctttaaaattcctttaagaaatggaaatgtttgttgtaactgctctagttgagtcatgccttgaacaaaggtaactggaataagaaacactagcatgaaggcaatggcagagatatgaattgctatcttacgaacccagagttgcccaaatggtatccaaaggtttgaccaataaacatcatgtggttcaggcgccatgtctgtcacccataacatgggatttgatgattgaagaacctgtgaagcaacaacagctgcatggcgcgtcttgaagaacacaaaagcagtggcacactcctttttactacttccaggaaaatccatatcatcacaaaagtcatgaacaacttttcccttgacattatcctgatctgaagaagaaaggatcttaaaagaatttgaatgctctacaacacatgaagtaccgcaatggattaaactaggtgcacaattcttttcaattgcagaaacatccttaaacatcatgtacattttctctgcatcattcatcaatttctgaattgtaccagctttatataccatttggtgaaacaaataacctgctgatgcatgatatttcataaagaatcttttcacactattactatacgagtcttcaacagaccaaggaatagcacgaactagaaccgtaaaatgacttgggtttggtggagattcactaatatgagcaagcctcattttcgaaatgcttttatactccaagtaaagaagcacacaagctgagcatgttatgatatataatgcaagacaatgaacccaaagccactttgaggcttctttaacatttaagatggtaaatacttccaatgactccaatggaatttgttggtactgcctcttttgaccataataattcaccggaagaaccagaaaacaacaagtgagtgcagctatagtgaaaattctaatactaaaaaccacaatcctgaggaaaaccacagcatccaacccaccaatattaaaaaactcttgttcagtactttcccaggctctcaatacccaactcggagaaggaataaatctctcaaagcaataaggatcaatatttcgccttgagcgaccggtagcaatcctccgcccaaagtaaacacttatattacttggttgttttctcaatatcgagtataacgacacaagtaccaaacacacacctatattgattccagcagaagtcaaaagtgctgaaatcttcatctccacccggatccagactcactatatataaatatatataaatatatatatatagtgtctatccaaaggacatacttagccaaatcaaac

SEQ ID NO: 23811 - DNA, 3266 bp, Cannabis sativa
atacagaaatacagaaattaaggttagccactcacttcacttcagaatttatttccatttttttattgttttctttttcaactgaacaaaatctttgaagtttggatttttctgtcatgattttttagtatattttgtcctatgaatgaacaatttcatctttctataatcttattccttttttaaagttaataattttgattataagcttagtttgatcattgatggcagaaatggggagattttgtgatttgccaagtgaagttgtggagaaaatcatgttgttggtgcctgcagattctgtagtagaatgtaaatctgttaacaagttttggtattcttgtatttccactttcatcaacgatccaaaatttgcagctaagcacctcctcaataccaaaagcgaatcttccatatcctttctttgtttcgaagacccttccccccatgacgatcatcgcatgatcacatacccattgctcactataatccatgttgatggtgatgatgatgacactataatccatgataatgattatgtcactataatccatggcgatgatgatgttgtcactattatccttgaagatgatgatgatgatgatgatgatggtggtggtaagaagaatcattttagaacagtcacagtagatctgagtatgccacttttggatatgaatagatggaataaaatatatcactgtgatggacttcttttgctagtaaatgatggtattgaggagactataactatggcgttgtgtaatcctgcgttgaaagaattcatgattctcccacaaccgaagaatagtgttacgtttatagcttatcaccacataggatttgaacatgattctagaaacaacaaatacaaatgtgtttacatttggctcggtgatgaagaagaatgtaaagttgaggtatacacagtgggttctgattcttggagagagatcaacatgtctcaagacgtaatggattatatagtgcatactcaactatgcaatgctgtatgttttggaggtgtttgttactggtatattagccaacctggaattgataagatcctcagttttgatatgagtagtgaggaatttcgtatgatagatttgccagattttgaacatttttatgccgcggaagatttcttggtttcttatagtacgcgcttggcagtgtggaatgattctgttgtgatgtatttggcccctgatttcacatgggggaataagttaatcttttttgtcttcaccatggataaaggtgtagcaggtggttggaccaaatatgtgcagattggaccactagagaagtattacaataacttactaccattttggaagaatgatgagattctgatggaagtctttgtagatgatacgcgcgtatattacttggcttcttgcaacattcgtactggaaagttaagaaatgtttttggtgtagatagaaaactaaagatatattataattcgttttgtttgtatgaaaaaagtctggtttctattaggaaggaaatttaatttccaaactctctggtttggctctagaagtgtagagactaaaatgttatttgttaagtttgattttatgatttaaacattatctatgtaatgaaatgaagtcattattgatgcctttcacagtttttttatatatagtttaaacataagaatatttgttgaaaaagatgatcatgccatcccattcttacatttgcaccaaacagtaaatctattaatctcttttactggtttactggttagactttgtaggactaggacaataaaatgtgaattctcctaagtggttctaaatttcaagttggtctttttggaaggcaacaaaaaatgagcttatttagatttggaaatgaatgtgaatgtgatcctcaaaagtcaaatccatggaaatgaactctccatcaagaaccaaccatgcccagccgaggctgcccggaacagtttttcatctccatgataatacttgactatcaacaataaagaattataacaaagttatattgattgattatatcataaaagaaaactctcaagtctcaattcattacatacaatacaaaaactcatttaaagctttgacatattcttatttatacatgtttcatgttcatatcacattttcatttaccacaaagtttaactaggacacttaaatatagaaatcagttgtaagatggttcttgacgctcaaaggctcaaacacagtcactatcactccttaattccatggtgagattttgttgagcaactcaattcttgctattgatctttcttgacaacacaacacaagtaagtaattaattattgattctggcattactattaattgcaaacttcctataataaggttattgttctttctacgtcataagcttatattgatcattcatggcagaaataatggcgagtttttttgatttgccaagtgaagttttggagaaaatcatgttgttggtacctccagattctctatgaacaagttttggtattcttgtatttccactttcatcaacgatccaaaatttgtagccaagcacctcctcattaccaaaaaccagtcttctatgtccttactttgtttcaaagacccttccccccatgatgatcatcgcttgatcacatacccattgcttactatcatccatgatgatgatgatgatagtgaaaatgatgatgttataactgttacagaagctctcactataccacattttcttaatgagaagtacaagaatgtggcgcatcatccacgattctcccagaaccaaagaatgttaaatttgaagctcatcaccacataggatttgaacttgattccaaaaacaacaaatacaaatgtgtttccatttggctcagttgtgaagaagaagaagaatgtaaagtcgaggtatactgaactatgcaatgctgtatgttttggaggtgtttgttattggtgtatgaaacaagattcaatcgaaatgatcctcagttttgatatgagtagtgaggaatttggtatgatagatctgccagatttagaacctctttttgaaaatgaagattggttcgatacttatcattgtagtgtggaattgttgagaatcatgggttccatctcaaaaccaattggcttacggtatcagagtgaaaatggtcactatctgtataggtgcggatcgtggaaatggtcactatctgtataggtgcggatcggactgataccatgttgagaatcatggggttccatctcaaaacaaattg

SEQ ID NO: 23812 - DNA, 5890 bp, Cannabis sativa
  modified_base (3845)..(3847): a, c, t, g, unknown or other
aaattaaatgtaattaataataaataatttttctatttatttaataatttacataaaatatcatcaaataataattaatttttttaattattgtcttacataaaacattaaataatatgatcatctttcataaagtattcatattatcttacaaatatagttaacaaaaaatggttaaaaagaatatttcataactttggtatacttacaaatatatcatagctttggtatacttgcaaataaagtcaaaacaaaataaaatctagaacaaagttgtcctacactttatttgcaatatactaaagttatggatttaccttgaactatggacctcaaagtaatcaaaaccaagaaattgaaaaaatttcataaaatattacaaatcattaaaacttttaacattaatttgtcgccttcactgtagatggcagcaattaataagtcttggatcaaaatcagaaattgtggttcccctaaattttggaatagtctacaagcttgtttagtgatggtgtcaaaatataaagattctgatggaagaatttgatgcccttgtgtgagatgtataaataataagtttgaaaaattagataatgggagagcacacgtatttgatcgagattttatgaaaggatatgagaagtagacttatcacggggagccaaaggatgttgttgatgatgaagaggttggggattatgaagaggatgaaatgatccctattcagcaagacttcgtttctccgacaaccaaagatgtataagtgggaccaaccacaaaccaacattttgatgacttatttgaggaaattgaagttgaattgtatcttggttatgattggatttcgtctctcaactttttagcaaagctattgcatctaaaagtgagagggaaaatccccaacaacatatttgatgaattgttgaagttgttaaagtttgcatttctaaaggaaaatataattccatcaacgtactatgaggtgaataagagattgaagaaattaggattggcttacgagtctatccatgtttgtcaatgcagttgttgcttattttacaatgagaatgcatctaaggaggcttgtccagtttgcacgagtagtcattgggttacttttgagaacagtaaagggaaaaaagtttcttgcaaagtgatgcgatactttccattgacacctcaactcaaaagattatatagttcgaggattacaacaatgatcatgatatggcatcatactggtaaatcaaaagatgatggcgtgatgcgacacccggttgatggtcttgcttagaaagacttcgatgcaaaacatcataagtttgcaagtgatccaagaaatgtttgatttgggttagttgctgatggatttaatccatttagaaacatgagtcttgcatacagtatgtcgctggtggtgttggctaactataacctaccaccttggttatgtatgaaagataattttttatgacaatcgtccttattcctggtatagaatctctaggtaaagacatggatatatttttaagatctttggtggatgagttataggagttgtagaataatggactacccaccagagatagttcgaccaacacgatgtttacaatacgtgttatacttttgtggacagtgaatgttttcctgctcgtagtagcttgtctggatgaagtggtcaaggttataaagcttttcctacttgtaatgaagacacaacttccattcaagtaatcgggaaaacctcttatgttggtcatggaagattcttgccaagtaatcatgcaatgagaagggacactcagtttgatggaaatgttgaaagaagacatccttcgagacaatttacttgtgaggagatattagaacaagtcaatgctttcgaacagtaaattccaaaatatcatcaagattttaggagcgtgaaacgtagaagagttacggaagattttaattggaggaaaaaaaatattttctatgagctggagtactggagcacaaatattttaaagcacaacatatatgccatgttgttttgtcaaggacaaggccacatggactgtcttgctcaaggggagggttaaaatggtctatacacactgtctcatcggtcttttgtcacaccatatgttcatcttcaatgccatgttgccacttccactcctaattctactatttcttctcttactgatactagatcagattaagaaatgccttgtagtaacatagctgaatcatcaactttaactctttgtaatgactcttctgttaataaagccaatgattttcaatctacttttcttgtccctaatatggctcttattgcaaataagactaatgttaatcactggcatgctaaattgggacatcctgcttcaagaacacttgctaaaatattaacttaattgcacatatcaccgaatttgaaagatctaaaattttgtaaagcttgtaaaaaagggaagagtcataggttaccctaatctatatatgaaacaagagcatctcaacccctagaattggtgcatactgatttatgggacccctctcacacaccttctaaggaagggtatcggtattacatacattttttagatgattttagcagatatacttgaatttttccactcaccctaaagtctcaagcttatccaatattcctttagttcaaaactcttgctgaaaaacagttcaatttacccataaaaagtgttcaatctgattggggagctgagtataggtctttggcaaagctcttgcagcaacatggggtacattttcagcacccttgcccacatgatcatgaacaaaatggccgtgcttaaaggaaacatcaccgtattactgaaacgggtctgaccctattggcacaagctggccttgacttatcctattggtggtatgcttttcacactaccacatatgttattaacaggatgccatcctctgcaataggagatatatctccatttgaatgtttacttcacaaagcaccagattatgagtttctcaagacatttggttgtgcatgctttccatatctccaaccctataatgctcacaagttgaactttaaatctgacaaatgtatcttcattgtatactctcttaatcacaaaggatacctttgtaaaaataatgatggaatggtctatattaccagaaatgtggaatttaatgaagttgactttcctagctcactcattaaatctacttctcaggtaccttctaactcttatctccctattcctactactacattctctacaccaataatgcatactaatgctaacactccacttgctgaggtaccaaatttaccaacacatgttgctgttgataatgctgctgctactacaccagcaacaaatagtgttgcagcccatgatatacctgaggttccagcagtctcttccttaacagaagctgctactattcctcctatgcatattgcaactacctctcaacccagtactggcactatttcaaccccatccacaagtgagcagggtcaaactccacctatatcattacccacagaaaccatttttactcagcacataccagcaccaattccctctgttcagcaccccatcaactctgactcaatacaaatcagatcgaaatttggtatacacaaaccaaaggcctacaatgccacctcctaccccctacttgaatctctcttgtcaaaagaacccacatcccttaaacaagcccttgttgatcccaagtggtatgctttaaagagaaaatatggatcttattaacagggtcggccctgagttgaaatgggctataggcaaaaaataaaaattttggctcttactataaagataaatagnnnttttaaaaattattaaaaatatatatatatattttaaaacgcaattttttgatttgggcccttaaaatgagtgggccctaggcgcgggcctagcccgcctatgcccagggccggccctgcttattaagaacaacacatgaaaacttgtgccttatcacccatcaatgacttttgtaggcaacaaatgggttcataggatcaagctcaaggttgatggatctctggacaaatacaagtcaattttagttgcaaaaggttattcacaaactcctggtattgatttcaaagagccatttagtcctgtggttaaaccagccactgttcgaattttgctcactcttgtagtctctttcaactggcaaattactcaactagatgtctctaatgctttctaaatggaacccttgaagagactgtctacatgccccaaccactaggatttattgaccccaaataccccaattatgtgtgcaagttgaacaaggctttgtatggcctaaagaaagctccaagagcttggaaccacaagctcaaaaatactctgtacaacaaggggtttcagttgtccaaatttgacaactcattgttcatcaaaggatctggtcagaatctaattgtgcttttggtatatgtggacgatatactgattacaggaccaaaccaggttgttattgatgcaatcatcactgcacttaatcatgaatttgatgtcaaggatctggggtctttacattacttgttgggagttgaagttcatagaacaacatctggtatatatctctcacaatcaaaatacattgtcgattttcttacaaagctcaaaatggatggtaccaaaccttgtcctagtccaacaactgcatctcatgttctttctcttaccaatggagaaccttttgctgatcatacactgtacaaaagtacattaggggctttacaatacttgaaattgacgagaccagatgttgccttcattgtgaataaattgagtcaatttattcatgctcctacaacagttcattgggatgcttgcaagagattgttcagatatctcaaaggtaccattcatgaaggacttttaatcagacctgctccaagattatgtttacaaccatactcggatgctgattgggcaagctatctagatgatcgaagatcaactgggggctatgctgtatatttgggaggaaacctcattttttggtcagcaaagaaacaacaagtggttgcacgttctagcacagagagtgagtttcgtgccttggcaaatacaactgctgaattaaaatggctgcactctgttttatatgaactttaggtgcatcttctagctcctcctattatatgggttgacagccaaggagcagcctcactagcagccaaccctgtgttccatgctagatcgaaacacattgaaattgatctccactttgtgagagatcaaattctagccaaggagtttgaagtcagatatatttcatctatcgatcaaaccgcagacattctaacaaaagctctcaccaaagatcaatttttgtatctcaaagccaagctcaatgtgtgttcctctcttttttgcttgaggggggatgataaataaagaactttcacctttcagtttagttagttatctttactgttaggattagtttgttatttttttctttccacttgtctctgtttttacagagtttgttacaggatttgtgagtgttttcttgtaatcctttgcctatatattggaaggttcagctcatgatttttcagagcttttaaagttctttgtgttcagtttaaaattgttccagataggagttgtattgataagctactctttcaaaggacgaccatcatcgatctatttcaagatctgtagttttcacttcctgtgagaatttttacaactagcattgcttttggatgatccccgtgcaaaagataatacaaactttttgaataattatcaaaacgagtattttgatcaagtgcggaaaaatcattggtattgtcagaatcattatcttgattcgaagcattacgagt

SEQ ID NO: 23813 - DNA, 4172 bp, Cannabis sativa
gtttgggtccaagccctggctctcgtgtcctgggttgagatcccaatcctagtctcaagtcgcggtctggttctaattttggtcttgagtcttggtccaggtccgtgactgagactggggtcaggtcctgggccttggttctagttacgggtgttgggtctagttctgagttcgggtctcggacactaatgcaggttcgggtccaaggtgcgggtctgggtcccggaccaagtccaggtgtaggttctggtttgtgtcctgagtctcagcccaagtttggatttgggaccaggtctcagtctaggtcttggtttgggtccaggtccctagtccaattcctgggtcccagttccctacttgtttcggttcaaatttcatggacaggtctgggtttaggttctggtctcggtcctggtgtgggtacgggtccaggtccttgtttaggttcgggcccgggtcctagatccaaacaccgactatgggttaggtccaagccccgagtccaaatttggatcctagtctctgattccagtttggttctagtttgggtcccaagtctcggtttggatcctaattccgagtccggttcaggggtcaggtcctaggtccaaggtgcaaattttagggactgagtctctatcccactttggaggcccatatcctggtcctagttccaaggcccgacttttaggtcctggtcccctatccagctctgggtcacggtctgggtcaaggttctggttcgcaacctgagtcccgatttcagtctagatccttgtcagagtctaggtcccaatctgagtccaggtccctgtccgagtccaagtccctgtccgagtccaggtcctggtctcgagtcttaggtctaggtctgagtcccaatccagctccaagtattggtctgggtcctagtgagggtcttagtctaggttcaggtcctgggtcctcgttcgagttttgttccatgtttgggttctggttttgttttggtcctaggttcggatcttggtccccatcctagtcaggttatggttttgatataaattttgggtctagatttgggtctgagtttatctttgggtcagggtaagagtcctagtctgagtttgggtttgagtcctgggttcgggtccaggtcctagtctgtgtcaaggtctgggtcccatgttttgatctagctctaggtttgggttcaggtattggtttaggtcttggttcgggttttggtacggtctagatctaggtttgggtctttgtctgggtttgggtccgagttggggtcttgggttttggtgtgggtctaagtttggggccaggtttgggtttgggttctgttatgggcccaggtctgggtctaggtttggggccgagttcgggtcttgttctgggtcttggtcctagtcctagtcctgttccagggtcctgatctagtttcggtttaggttctgagtccatgtctggggccaggtatgggtcctcgtgcaggtccaagttcgggtccaggtctaggtctagttttcaggacctgctgtgagtcccaaatccagacactgactacaggttggattcaagctccgggtcctaggtcaagggttcagatcaaaatcctagtctagtgtcgcggtctgtttctggttcggtgattgggtccccaattttagtccgggttggggtcgaggacctagaccatggtcgggtcctgggtctcagtcctggttcttgatcttgcatcttgttttgggtctgggtttggggactttatccaagcttgggtcctaggtttgggttcgggtttgagttcaagtctaggtttgggtttaggtcccaagtccctatccgtgtttggatttggattcatgttccggtccaggtctgggtcagggtttgagttcaaattgtggggtacgggtttaggtcggggtttgattttgggtttgggtttgggtttgggtccttgtccaagtctaggtccaggtgtggctccatgtcctggtccttgatcaagacactgactacaggtcgtggtcatggtcctcttccatttcgagtctcaggtctcgattttggggcatgggtcccgagtccgagtcccccatccaggtctaggtcctagggcccagttcgggatgaggttcggttttgagtttgggtccaggtgctagtccgggtctgggtctttgtctgggtattgggtcctaggtctgggtcttaggtctcgagtcatagtcctgatctgggtctgggtccaggtctcggttttgttactgatcagggttcgggtcccggattctaggtctcggtctcggccatgtcccgatctgcgttttggtttgagtttgggttcgagtttgggtcttatttctgtctcatgtccaggtcttagtcccagtccgaaatcggttctagttttgattctaggtttggatctatgtccaagttagtgtctaagtctaggtctgtgtccagatttcagtttgggccgaggtatgggtttgagtcccaagtccaggactggatccagttaattgtttgggtccgggtttgggtctgggtccctgcatccgatctcggtctgggtctgggtttcggtttgggtccaagtcctggtctggattcccatctaagtttgggtttttgtatggctcccgatttcgagtttggatttgggtccaagtcagggtcctaagtctgtgtctgggttcgtgtcatgatgcacgtccgggtccgggtctcggtacctattcagatctggggccgagtctgggtttagttaaggttccaagtgtgggtccaaagttctgatcccaatcttggtttgggtctggagccaggtctgggtttggttcttgttttgggtatgagtccaattccgagtttaaggtttaggggtttataatttagggtttgggatctagggtctagggtttagggagtaaggtttaggttttagggttaagggtttagcgtttagggtttagggattaaggtttacggtttaggatttaggatttagggtttagcgttcagcgtttagggtttagggtttagggattaaggtttacaatttagggtttagggctagggtttaggtaattaaaaataaatctaattatcattacttatcattactaattatttcttatcattacttaaattaactttattattacatattattattacttatcattactaatcattatttatcattacttatattaattttatcattagtaatgataaatatgtttaattttatttaccctgaaccctaaactctaaaccctaaaccctaaaccttaaaccctaaatataaatcctcacccgaaaccctaaaccataaactctaaaccctaaacccatatccctaatccctaaaccctaaaccctaaactctggcctaagactagaacggggaccacgacccgaaccgggcacaggacccaaatagggactgggacttgaacccgcccaaggactcaaacagggaatgggactggggcctagacccgcacccataatcggacgtagacccagacttgagacccgaacccgaacctggacgtagacccagaaagggatcttgacccagacccagacccaaaccttgactcggaccaagactcagaccccgacccaaacctagacacataattggaaacgaaagcagaaccaaacaaggaccggactaggaccttgacctgggactagaattgtacccaaacccagacaagaagtcggatcgagacctagacatggactgggacctagaacctgggattggacctggacccaaacccaaactaggacccgagacccgatacccatattcgagactcaggacctagatttggacccaaacccagaccgagtcctggactaagactaggacctgaactcgaacctgaacctagagttggaccgagatctaggacttggacctagattgggaatcaggactgtgatcggggactcgaccctggacctcggcctaaacctacgaccaagactgggactagagactcgggacccgaatttgaaccggattaagacacgagactgggatctgaataaggaccatgggattggacccgacaagtggtaggtgtctagatcttggatttggacacaaacctaaactcagactttgacctagactcgaacccaaaccc

SEQ ID NO: 23814 - DNA, 2540 bp, Cannabis sativa
  modified_base (546)..(552): a, c, t, g, unknown or other
  modified_base (2514)..(2514): a, c, t, g, unknown or other
taacagaatagtggttgggggtttacccgcagaaatttgggttgtgggggtttagtgaaactaaaaccaaagtattgggggttttgccgccatttacccttaagtttaatattcatgataaaagttttaatttgacacgtttttcgagaaaaatctttgattagcaaagatagcactgtaatttaaaaagcactgtaacgtgccttagtatttacatttactgtgttattgtaaattacttacatcttatatggttttttatactttttgtacaaaaatatgccttcttttttttttttccaaaaaagttattttgtggaaaaattgaagaaaaattaaaaaaatatattaaaaaaataggataaaatcaatccggtaccttatggtaaccataggggtaaccatgtaacctgtgttatttttactcaatgaactaagaggtacttctataatgcaccacattaaaataggtgcaatggtacaacttttaactgttttgatatctaaaagaattttttagttcaattttttttatagtcgtgtacnnnnnnnttatttaagatattctgtaaaaattttgagaaattttaaaataatttacaatataaaatttaacgttcaaacggtctattttacacgcatataaaaaaaaaagttatgcgcgcaatagactctttaaatcctattttcggtgtgttaaatttttttaaatatcttaaaaatttacaggatgtcttaaataactacaatgtatacgatcataaaaaatatttagactattttttttagataccgaaaaaaataagagtgtaacgatacatcctttttgtagagttttcctaaattaaatattacgaaatagattaataaactatttaagaagtttctcagctactattcaaaataattgtaataaaatgctaattagttacaagcatgaatgaaatgtgctatttgaaattttaagttgtctaatattatattgatgtgatactttataattattaaattaaaatatataagatctgatatcgaaatgcatcaataacagtatgttactttttgtagtgttgaacacttgaaagtatctccaataaaaatgtaaattagtgatcaattgctaaaatgtaattcatcttgtaaatacttgatccaatagtgtagccaaagttaatctaaatttatcacatactaaaaattgaattaaatttaaattataatatggtataatgtaaaatttatatcacaataaatacattacttctattttattgttaatactttattatttaatttagttattacattaaaatataaattttttaaaattattttttattgttttatgcaacaaaataataattaaattaataataaaattactgatttttttatatttttaatgaaaatattaattaaacatttaatttcacattaagttttataattatatattaaagtacaatactaaaaattgttgcagattataaaaaacaaaattatgtcaaatataaacattttttttagtacatggatataatacagagatattccgtccatggattttgtgtcatcacgtgggcgcggtgagttaatttacttaactctacttctccccacaatccaactgcttttgactatttttatttataattaataatcgaattgttgtaccaccttggagcttagatattgagtcttttctcctagttttttaattaaattgggttgaacttaattcggccccaattaggttgggagttattaggcttaacttgaaaagacattttctccttctttaataagtgatccatgatcaaatcttacgcacctactgatttttagataagatttgcattacttataaattatatgaaaaactgatcatataagatcaatcacaacaataattgcatagtaaataaaggggtgcagaacctaccacagcttgtaatcttattattgtctcattgatgaaaaatatcctgattgatatttatgagagagtaaactttactcacccttttcaatatttcttctctagaattacaccatgggtattcgagcaaaagagcttcatcactttatcttgtttcctttaatggggcaaggacatttgatcccaatggttgacattgcaagaatgttggctgaacgtggtgtaatcatcaccatattcaccacaacacaaaatgcagctcgatttgaaggagtgctcaaccgggccaaggaaaccggcctcagaatcaatctagttcaattcaattttccatatgttgaagcagaattgcctcaagggtgtgagagcttggacatgttgccttctcctgaattgggtgaaaaaatgttttgttcaacttctttgctacaaaagcctatggagattatgatcccggatcttatgccgcgacctacatgcgtaatagcagacccttatttgccttggactatcaacaaaactcgaaaacttagtgtgtgtttggcatcataactaaaaaattattttttattttnaaaaacagaaaattgttttttgaaaa

SEQ ID NO: 23815 - DNA, 1333 bp, Cannabis sativa
ttggatttgagctattgtgctgatcggattggatccaaaaattaaaattcgcatttagtgcggattaaatacaatatgaacaaaataatacaaattgaattagatgaacacccctatattaaaaagcgtctaacaaaataaaaaatatatataaatatataaaataaaaagaagtaaaaaataatataaaaataaaaatgcttactaattatctgtttattgctgaaataaaatacaattttattaaatgaggtgtcaactttttataggcttcgagacaccctattgataaagtcttttcatcctatatttatatatattggattattttaaaagaacaaattattaatccaccacaattagttatcaataatgagatttgagttaattaatttgtagataacagctattgatctaaatagagaagcatatgaagttggattaccgttcattcagaaagctggtgttgaccacaaaataaattttattgagtctgcagcttcttgtgcccttgatgatctcattaacgatgtaagtaatcttataatatatataattatttataattaattaaattttttaattaaaaaaaaaaggtaaaagaattaagtgagggttcgtagttggtatgagacaagattcaaatcttggattttttttttaattattattagtaatatcattgtttatgattttttttttttttgataagtatattatgatttttgtttcttataaaaaatatttgtttataaattgtcacactggtctttttaattttccaattaataatagatgacaacgaatagaatatgagtagtgcacgctagtgcttattctacaatcttatctgatattagtctatattttattttgtacagatagggtatatctaaaaatatcataaaattattttttttttataaaatatagctttaactgttacacttctcattaaaagatagtctaagtaagatagcttactcattataccaaaactgctaccatgtgattaatattcctttatttacaaatatatgttgtaaatactaactaaaatacatatatattttttttcaagggaaaaattaccccttgcctctatgtgggttcgaacatgccctcaccctaccctaaacactattatttattagttagacagttaaggaaaaaagttattagttattggttaagtaaagggttatttgcaacataaccccctttaagtggttaggtatttacaactaactcccaattctaaaattttggtggtaaaacctcctaaatccagcttctgttagcagttagtcatttccgtccatttttgggtgtt

SEQ ID NO: 23816 - DNA, 2367 bp, Cannabis sativa
gtcatggcagccactatttatcatatttggggctcgtttggtaggacgtatgagcatcgtattgtattaaataacaaataaaactatgtttggataaagcattatattgtattaatccttacgaccttatattttattacaatatgaatcgtaatatttaatacataacaaatcatttgtattagcttgtattataatatttacaaaaagttcgaggttaatcctggtctcggacctcgaacctgaatcctaaactcggaccaggttcccggatctagattcgaccccgaccctagaccctgaccccgatctcgactcaaaccctggactcgggatttggacccgaaccccagcctaggacctgaacctagacctcgactcgagacctagactcgaacgcctactcaggacccaaaactcaaacccgggagtagacctcggaccccagaccccagaccctgacccggaccaggtttgggtctaggtttgaggttgcggtctgggtctgaggtcgaggtctggggatggggttcgagtccaagtccaggtcaatattggagttggggtcgagtttattgtaaatatatgtattataattttacacaatctattaatataagtcaacactaaacatagtatgtattaagtaatactaatataatacaatacaatttaatagaatgctatacaatacaacattgtacaccaaacaagctttcaaagagttagaaacgtgactcattagggtaaagtttcaacaattgtttctactattaataaaattaaagatgtatataacaaaactataaatgttatacccataagaacaagtcaagttgattgatgcatatttttcccatggggatggtgtcccgtcctcgtcctattagaggattccccgccccatccccgatgagaaataagcggagatgggaattaaaattcttaacgggaatgaagacggagagagcactccctgctaattttccgctccgtgtgcatccctaatagggagtcttttttaaatattttctctttgttgatgagttggttttgataaaaaactattaattaatcatagcgcgctatatcattatagtactctatatatatatatatgtaaaactttaaataagttgtagaatgttaaaaggtgagtatattgtggttaccaaagtaaaatttgctttaattggcacatgcgtatgttagaggaatacgaaactctttcttatatagaatccaataccaaccgtcgattaattattttataatagaaaaatctaagtacattattatattttgggataaaaacaaaactcaaataagttaaaccaaattgatattatatggtgcctatcctatactcacatcaataattcttgtcaaatatatttccaaataaattccatgcaaattcacaaccaaaagccaatttgatcatttccatcttaattagctacaatacaacatataaatatacttatatatgtgtgtgcatgtgaaaccctataccaattattttcataagtcattttcgacaaattatattataatataaataaattataacaagcatgagatgcaatagtttaaaatttgattgagaccttaaatcatattaattatttgtattagtttttttttttttttaattttaatatttattcgttttaatttttaacaatattatttgttcaatctgatcagacagattacctgaacccaaaccatgtgaaaagcatccaacccaaaatttattattattcaataattaccgaattattaatgctatgactaattagagtaatattaataagcaagattaatataattgtgatatatattataagaaagtagttatatgttttcgaatgtaaggaacgaagactcatatttccttccataagatttttggatatatatctattgttagaatttgttgatggaatcataagattattacatatataattatatatattatctagttagtcaaaattatatatattttacactaattatattaaaaataaataagtacatgaaattctcaccaaaaataaaataaaatagttgagttatattacaaattgaaactttttataatacttttttttttcttctaaaaaatgatatttgcttagaggcttcatgagaccaagtaggaggcctcattctgcagcacaaatccgagttcaatatcgagaaggttatgagagctccgatttgggaacccatttccaagtattgggagcataaggaagactccattttgaggtttacattttcgagcttttaagggtaagaaagagctagaaatggagttgattttgagagtatgtattgttgagaatcatggggttc

SEQ ID NO: 23817 - DNA, 1377 bp, Cannabis sativa
tttttctaatacttattaaatgaaatgaaaataaaatgtataatatttaatatttaattatattaataatgatatgataatttgggatgattttttttttcttataagatatgaaaatgtttaagtttgatgaggtggaattttatgcttatctaattctgtatgtaagtttagaaatatacacataatatacaagttgccaagtggccaataaaatctgtctcaaaacatgctataattaattatctcctcatataatccttttcattcaacaaaaatctaaaagaaaaatgttgtgaagaatataaaacatttttcttgagtcattttccaattaatggcatcctatgaaaaatgtccataacaatctatttttcatgttagtatatatattattttatgacacaataaccaggtattattgtttcatgtcgcttaaattgaacaccaacaaacttgacatgaattattatatatacaataagatactatttagagtactgctaatatatattattattcatcactactaattaggacatttaattggagatatatattcatgtgattgtgaataataataataattatatttaaacttgtagctatatttatatttagtgtgaaaccgatttgaccttcattcacatgggtgtttatgtaataaagtccaaaaaattgattatttaaatcagccaaacaaggcctaactaagtgtactcgaagtcgaagacatgaccgtttgtgcaaactataaagaatctatattaaaattgtacgggaatgcctcttgttggctcattgattttgatatttatttgtttatttttttatattacttaaaaattacgaaagcaaaaaataaaaatattacaataatattataagaattagaaaaacaaaagcttcggtgatatattagattcctcagccatttgatcaagaattgagaaatttactccaaggcttctccaatggtaaaaaaaataggtgcttgggagagaagatttttgttttatagggacttaattattataaatatgaatttttggtagctaaatcctctaaattattgcttcacttgtgtttaattttccaagtttaaattttggcgataaaattttttaaattactgaactgttattaaatttaaggtatcgtctgattaacaaccatcatagactgtttatgtgtatattcttatacaccaaaatttactaacagctgagttatttagagagttttcctactaaaatttgaatttggaaggttaaatgcaagtgaaatgatatagttgagaaggttaaattgcaaaaaaactctataaaaatttgtataattactttggataaaaattataggatatgtctatggtaa

SEQ ID NO: 23818 - DNA, 2556 bp, Cannabis sativa
attacttatttttctcatcatttctcttatcttgctcacacactttcttcccctaaaaaaccgtcaccatgggccttcgaataagaatctcacactcgcactcaaccaagctctcacttttttcgatgctcaaaagtgtaatttcttttcttttctctctttttttaagaaaatttttggtgatgaataattttttaaaaaatagtatatgagataatttttcttatttttattattgacagctgggctgtacccgaagaacaatcgggtgaaatttcgaggagattcggggttggaagatgggaaatttggtgggagagaaagtgatgaggatgttgtgggtggattttatgattcagggaacaacataaagtttagttttcctacagcttatactataacattgttgagttggagtgtgattgaatatcaccaaaaatatagtgagataggtgaggttgatcatgttaaggacatcatcaaatggggtactcattatttgctcaagcttttcgtttctccttccaatgattcaacttcagatgccagattgtacacccaggcaagcctaattaagattgaattctctttcattttttttgttttttcaatcataattgttttgtgtgtttagatttcaaattaaatttaactaagaattacgaaaaaaaaagcaccagtgatatgtccagctggtggcatatcgttgcaataatattctaacctcttatttattttatgatattagtgtatgctcaatttagctatatatatcattgttcaaaaaaatttagctatatatcaatgttagtaagtagttttctttttcatttttctaataagaaatcaccataaaaattgatttagctagtttattcacaaacgtacgtacactaaatttaagatttagtagttagagtttgataacattttgtgtctaaaaaaaataaatattagtcacattttatttctacggtatcgtttttaactaaatatttttaagaaaaaattacttaatagatcaaaaaaaattttaaaaaaaattacaaaaatacattaacatggatttttttttttatttttacacttttaatttttttttatttacaaaaatacctcttcagtaaaaatgattttttttgttgttttatagtttatttataattctattagagttgccatgagattgttttttggttattttttattgttttatagtttatttataattgatttatagttagtatgagatttttttctcgttattttatactttttactcaacttagtatatttttataattttgaaactttttataaataaaaattttaaatggtacaattgtaaataaaatataagaaaatgatatttttagaaattctcttatttttagtcagcaaaaatgagaaattttgtatagtagtgaggcatttttttgttaaatgttatagtagtttgttatttgggaatttttttttcctttccataatatatttatatatactagtaaagcttaatatatatataattggaatatatatcattgtacatatatgtatatgtgaataaaaatttatttttattaatttaaatctcttctctacactacacatatacttgtccctagacttagcctttaataatgaaatccaggttgggacagcaggaaacgacacgaaaacaccaaacgacatgaactgctgggaaagaccagaagacatggattacaagagaccggtttcttattgcgatatttcaaaggcatcagatctagccggagaaatggtggcggccctatcagcagcatcattagtgttcaaacaagaggaggcagtcttctcagaaaaattggtccaaacagctgagaagttgtttgaattaatattggagagtaccactaaaaaggacgatgaatattgtagtggaatagaggcaaggaaattctataactcatctggatatttagatgagcttgtatgggcttccacttggttgttctttgctactggcaacacttctcatcttcaatatgccacacaaacgtttacttctgtaacaagtaataatgatgatgatgatcgcaccatttctgaccaaggcttcttctattggaacaacaagcttattgcttctgcagtacgtacttctctctctctctctctctttttcttcttaccaaggcttttcctgcatactgttatgatgatgatgatgattattctggtgcattctaattaggggtgtcaatccatctaacccaattacaactgatcaattcaatcgattgcaacacattaaatatctaattgtgatcggatcagattgaatgttatttttgaatatcaatttagattggattgaatgttggatgttgtgttcaatattcaatcaaaataattaatatttttatttagtttagataaataattaaattgattatgttatgttaaaaatcattatcaaatctagaatatgttagaatgttttacaatgttctaagaaatttgtaagaaaaatcaagaacactctagaaagttttagagaaaacttagaat

SEQ ID NO: 23819 - DNA, 1144 bp, Cannabis sativa
attattatattaatattaataaatgaaaaaaaaaatactttatttatatatactcttgctctccgtctttcttgactcattggctctctctctctctgcctctgtcaatttccattctagaagccaaagctgctaggaaactaattctatcctccattattgctctatcgcatctcaatctcataattcataataatagatcacatcttgaaaaatatcaagcctccactccatgaatgaatctcagttagtgcttttttcaatattcatcatttttctttaactttcacattcatactaaatcaaacacttttttcatacagtctctttattttgcagatgttaaactactaaagtagagaaaatcgacaataaaaaaccagccaaaaaataaattctaactaaccattaaatttgataatattttacagaggcaaaaaataatattaataaaataaaataaatcggttttggcagtttgaacggaccaaattgtgatttatattggccggttctaaggagtttcttataaacaaacagactgatgctcagtacatacaactgtactcgtagcaaattcttagtggtcaatattaattattaaaaaatattttaaatcaattttaaaattaaaaaaataattagttaaaattttgtaggtcaagtaagacccctaaaatagaccacaatttttttttaagagtaaattacaacaaaatttctaaaactttcatctcgatagcaattaattttcaaaatttattatgcattaaccaaatttaaatccaaataaattttaagttaaataaacctcattttatgagtattctactaaaattattttcaaattttcacataaataagacacaattttaaatataatagattatgaatgtataggtttgtagaaaagttgatgtaaaattttggttagaaaaaaatgaagattatcgttaaataataaagataaaattggtaaaataattaaaaaaaatatataataaattttgaaagagatcgtaaaaattagagacatcaatttacaaagggaaatttcatttttaatgcttaaaaaaataccctctaacaaaatttagactcctaattaatttatacaatcaaatgctattattttcaattttta

SEQ ID NO: 23820 - DNA, 2394 bp, Cannabis sativa
agagagagaaataatatgagttggtgaaaattttgagttagtaaacagagctcagtgagtgagcttagtagcataaatggtttagtttacaatgaacttttgagtacacaaaagcagatcatggggtccattgaacattgtttaatattatgatcagtttgttttgttttatggataatagtgtaaaacaaaacatgaataacactttcttaattactgtaaagtaatgctaattatatgttaatttaattttggtagactgtggtagtggtagtggtcctatcccaggtgcatggtttagataaattttataataaagaaataaaatagtacattacatgtgccttcacgtgtatgaaaataagagaaaactaagtaagtagcattgtaatatttaatatttgattataaaatgtagaggttaattagaatacagctcaaaaattagatcatgaagttaatcaacattatcacaaatacacaataatgtccaactttcctactttaagttttgttttattactttttaatggttatatacaaatttttgaatagcactcaaagtttaccaatcttacaaggttgtatcagattcagatataattgttacaacttacaagtaacaattacagcttgttaaaataaaagttgcagaaataacagaattagttataagtgcttatttggcatcatccaagtttgtacgtagcccacccaatctgcatctgagaacacttccaagcttgaaacagaagctggtttcaaatactaagtgagagcgtggattgaaacacaaagccctcgagtctgctttgaaaagttaagttttgtaatcatgaaaaagtttgtcaaggcttgagatgctgacattatttgttttcaaggaaaaaatataaaatctataaactgatttagttcaaaatctgatttccaagcaagaccagaccacttattaaaactaaaaactatagaacaaataatatagttctgtttattacaatatctgccaacaaccaaaatatttctagtgaacattgctctaatcactctaaacacacaccacactcaaactttgttggtcttatacagtacacccttttacttcaactcaatccaattggtcgtcagcaacaaacatacaaatcatttatggttggaccctgcaaaaatagagtaatcaaaagcaaaaccaactaatattaccagcttcatcaacttcacatgcttaatatgtatgcttcaaattagctgatgaatccaaattctatcattaaacactaattaatggttgatttaatattgcaaaagaaagaattaaatgcagcaatgtaccagtgattgtttcactggaggtactttcttgttcttagtgactttcccatgcctataataacaatttactctttgaaaatataaaggtgcaaaatgatctttaattcagtattgtacacacaacacaatacagcctaaaacggaaaagaaattgaagactttgattcagtattgaataaatcttttaaacaagtaagacagaagagaagacaaaagagcaatggatacctatattttcttgtcatcgataatgatatttgggatgtgagcaataattggccagtccccccctgtctccctctcgactcgtgttcttagcaatggacaattaaatatttcaagccgtgtcaatgacggaaaataatctcctaacaatgtcactttgagtctcaaacaactttgaaaataaagattcttaagacgaggaaaaactccaccttcgataaatgaccactcttcaaactttttcatatcacgaaatttcaaggtctccaaagatctaaagaatggctttgcttgtattgcagcagaagaatcaacactagtagagtaataaaactctgaatctattctcaccacaccacaatccataatgaaaagatacatgagagaaggaagctgtcccaacgacggcaagaagctgcaattagagcaatatgaaatctccaggcttactaaattagacaagcaacgatgatctcccatccaatttgggaaattgtttcccttgtagcctcgaatcctaagttctttcaaatttggatgaggctggaggacactgagtagctctctttctttatgcaactcatcaacttcagcttcatgttgaccattatcccatgccaaatgtaggtgactaagagactttttactctttaatgataatgctgcatcataaacttcctcaagggtacgaacattttctagtcccttaataaaaagactcccgtgaagatcttgaaactctttcaacaacttgatgccaacagaatctctatttcttcccacaacaaatgcattaagtgtttgtagattttttagctttcccaattgcaatggcat

SEQ ID NO: 23821 - DNA, 3522 bp, Cannabis sativa
attataatattgtttttattataaaaacttatataaatttatatttatctatatatatgttttaagtttataaatttaacagtacaaaacgaaactttcattctaccgtacgaacgaaaccctcttccctcattttttttttattttcaactcaaaacctagcgatctaagctccggtagtagcggatagcaaatcattggagaatgagagcttaaggtaagaattagtttcattttaaattaaaaacggttggttttatacagtgactttataaatggaagaatcgatcagctttatcaagtcttgttaccctaatttgagaatccttataaaaatttctaaatgtatctctttgccatgttccgataattgataatggggatgcccatcataatgcaagagatgcattacgactatatagggatttattttggagagtttaatatatcctctctagctttgtaactgtaactctgtttgtagcttttttttttaagttagttacagttacattaaaacaaatttaaagattaattcaaactttaccacagttaatttaaaaagatagcatttctctccgtccaccagtggtctcactcagtctctctcctctctcctttagtagtctcttactccttctgtggcctctctttctgacaatgtgacagtttgatggtggtctcttatatttctctaatttggagaagatggactatagaggcattattgtgcatcctgaaatttttagctccaaagctatgacctatgcattattgtgtcccttaaatttttttgcactttgaaaatggtcatcgaactattcaaagtgttgtaaagtaattcttctgttaaattttatcacacgtggtaaataaaatgataatgtggatgtttataccattgtcacatcagtgccatgtgtgtaatttaaaattaaaataaaataatgcacagtaatagtctaaatagccacactatcattttgtttgtcatgcgtgacaaaacctgatagaatgatcacttaacaatattgtgaatagttcataaacccttttatcgagttaaaaaattcaagagacacgaaaatatatagttagataataaaaattataattaacttttgaatatatgtatatataacacaactcaaacatgtaattacaattgagcacaaagtgatgataacatataaaatctatttcaaaatatatatatcacataaatcattaattaatttaataaagtaaacccacacatgaatataaacctataaaaactaatatacattcacacaacaagcacaaagataaaagaaattttttttacaatatctatagctttgtagagtggaaatgacaaaccaaaatggcataaattttcattcccatttacatctaatttggtgggtgtgcttgaaatcataagtcaaagcaagagatccatccattcttctcaaaacaaaactctccaccaaaatatagcaaccgaagctagtccattcatccaatccatcatactcataagctttcaccactctcccttttctcctatccctaacccaaccaactctttcttgctcccacttcattctatcaacaatagctgcattcaaccctattccacaatcttctccaactctttcactcataaaccacaccaccttattggtgttcacattcttctcatcccaaatggctttccttattcccccaacaataagaacatcttccgtctcaacaacaacatttacaaacaccaagttcccctcgtttccacactcaaaaacccgaacccatctttgctcaagcgtcatttcgtagaacatagatctcttcatttggtctttcaatttcataacttcttccacgaacatgaacggacagtaccatttcccgacgacttgagtggtgttgaacgggggaagagttgcgcggagagttgagttgagacctaaggcttggcttagttggtagtactttggagtgcgcatttcgacactccaatgtttgttcctcaaaaagtaaggaggaaacccatctgaggcaatggacgtggctgtgaaaccatggcggtgttgagttatctcaacctgttgatattgatcacatggatctaatggccttggtttaacgtctttaatatagctaccgaatatgctagtactgctctcgtttttcttcgaacttgtgtatgcttctctataagtaacaaacaaattcatttaatcaaataattaaaaaaatttactttacagttaattagccatatatggtattattttccaaagtttctataaaaaatgaggtacatatttttttagagtaataaaatgaggtagatattaagtagtaggagtgaaggaaaaaaaaataataaatttgaggagagaatggtgctatactatttataattatgaaaaaaaaattacaaaattaactatgcacagttgatcgaaattattgaaaacataaacactaaaacacattaaaagtaaataatatagtaatacatatattgaaagaggactatgttattaattatacgatatcattaataattaatagccgttgaaacaggatccaaacagttgagatcaaatacataactaagtctatttgatatcgcaatatcatttaatttatattattagtcgatcgatatacacatacatatatacataacaagagagatgatacatatattatatatgcgtaccctatatggttgccctcctgaacaatagcatagtaaagattggaagataatgggtgattgagaacagggataaaaaggacatcctgatagaagtcatcatcctcaactttgagaattttgttctgagggaaaggcaagtccctgatggtgttgtctttgtatgatgatccagtccaactctccttcaactcataatcatcttcgttaaaaattacaagataaccagaattcggaccttccaactgaggtgttattgacagtgcctcatgctgtcttctatacattgacataggccttgttacgtacattttaatttttattcttctctgatctatattgtgtgatgatatatgattttttatgattatatctatataagaaagatgatctgattatatatattacactttatgtgttggtctgggattcctttattttactttcatttaataagtattataataatttgtgccatcacatttattaataataatggtcaataatttccatgtaattcaaagtaagagcaattctttctaaaataataaattaaaattatatagtgaacatgaagtaatcccaaaagggtactacttataaacttttatataaaattaatgaaatatagatacatatttaatatttatatatattgatattggtcaattatgaaatggtatggaagttaccttgaactgttctgaaaaaccaatatatgttatcatcttaattatcttgtgaaaggccaagtcacctctgacattactacagaaacatttgtggatatagataactagaaatataca

SEQ ID NO: 23822 - DNA, 1941 bp, Cannabis sativa
ttatttatctaaccattttttaatttttggagatcgaatgatcaaagtgttttaataaaggacaaaacctactagaacaacttgttagtggccctaaagtcccaatgacatatttttctttgcaacttgcaatttgtaatatatatatatatatattgggtttgtgccttgaatttgaaatgtatattaataaacaaaatataaattattacacaacttattacatagttaacatcaacattaaataataacaataataataataatgtctaccaataaactttagactttatcttcacctcttcaagactcttttttcttcttatcctgtctttttgtcatttttatatggtttttcaatttgtcactacaaacacgattctatgagttcagactaactatagttctgtgtcagcatatatatacacacatgtacaatattctttaccatatagctacttatactcatactttatatattaatatatgtggctaatcatctaatatttgaactacattaaattgttatatcataatactaattaatgtttattcaaaactaataattatcaaattaagataggattttaaacaaagttcgagtttgaagtttaagtccaaaggctggagtccagggttgagacctgaatccaggccaaggttcgagttagggctatagggctgcaacatgagagtcgggattggggttgtgatccaaatattgggtcaagatccaataatgttgatcaaaaagaaatatacatagagtataattttttttatatataaaaattgtgaattaattttgagagctatgtttttcagaatttttttttttataattaaaaaataataacagaacacacccttagattagttcttataaaaatataattagttattttttcccaatttaagaaaactattaagaagttttatgaggacgtttataattatgtgcacctttaaatagcaagtaatggcatattatggtacttcaaattaatgaataataattaagtagctctatttaattatacaaacttactataaaaaaaaaagtcaacatagtcgaatcaatagtttgacttacattttttcatataataaatataaaatagcttgacatattgacctatttttctttttcttatgtaagttgtatattaaggaaaactataggtactacctttgaaaattaaaaaaaaaaaaaaattatgtatgtatgtaataagctaaattcaaaccatgttgaatgtctcttcaaattttaactgctcaaatcttaccttcaacaataacaaaaaaagccttttaagtaaaaatattatgctcgataatttactaatatacataaatgattcttcatcattgtttcagacataatgaactttatcataatttatgtggttataaatcataacgtttacaaacatataaaaatgaaaatataataataatttttttttgaataaaatgagtaaatatattaaaactagataaagttagatttcatagtcaatacacaataagttatctagtatagattatagatacagtacgagaaaaagtccacttagccacattatagaccacaaaattaaatagtctataaataaatgaaagttaactaattaaaaggtttgaaagattttttacattgaagcacatagttattaatatcccaaacaaaacaagtccccttcagtctgttgatcaccgtcgcaaaatcattctcaattatcacaaacaaatgctttcaaaggatcgctaattttagggctaacaaacataccacaacttcttcaataagtgggttagagaagttgagcgtgttgatagccactcacaaaacggactttttgtaatctctagccaaaaccaccacgcacattgagtcacaaccaattttaatgtcacagttgattttgacccaatctt

SEQ ID NO: 23823 - DNA, 4673 bp, Cannabis sativa
atatatatatcatatcaaaattgagaattattaaaaatacaatcgatgaaatgttgagttaatgtcattgaagtaaaataaaaaatagggaaaaaataaatcattctgtattttaaatatgaaatgttcattaaaattaaaggatgtatatctaagtcctctatcgaaattgaaagaaaaataaaaaaaaatatcataaaaagaagaggcaaaagaaaagtaaaaattctacaatacatcttctcaaaagaggtataccaataaatccttatttgacattcagaagaaatgtgtagtctaatttttttttaagacataatttaacatgccgaaaacaagatttaaacagtctcttccatacgtgactcttttattttataagcatgtgaaataaaatgtttaaacacttttttcatgttgtaaattattttaaatttctaaaaatttcgtaggatgtcttaaaattataacacacgatttgcactaaaaaactttctaaatgtcgaaacaaattttaaaagcacagttacatattgtcaaagttaactttagttagaagccaattaagagaaagttcttttatttttgctggaattttgagacacagcccaaaattctaacctcaattcataatgccaaacaagtttatctctaagatttataagccagcaggcagccgaggtctcaactttgagctcacgtactattaaataggatgtttcatacctagcacacttgtgtaaattgaaatgagaatgtctctgcatagtgaccacgttcattttaagataattatgttttatataactctttaactttagttaaaattttaaaatctttgaggttttttggctttattttcagttttcaaaattgtgtttttaaaagtgagaataaaacacaattttttgtcattttaaaaatttaatggtgtttgacacaagttttttaaaactattttttgattttttcttactaaaaaagaatccaatattttaacaccatactatgacatgaacccatcctactcgggactcgacccgaacttgaaccctaacccaaacccggacccagactcagactcggactcagactcgggcctggacaccggacctcaaaccccgaaccccaaacccagacccagactcgggcccagacaccggacctcaaaccccgaacccccgacccagacccctacctcagacccagaccccagacccaaacccgtccctggaccccgaccccgaaccccgaccctgacatggactcaaaccctaaccccaaaccctaaccacggacctagacccaaacccggacccaaatctaaaccccggggctaggtccaaggtccttggccgggtttgggtttggggtccgggtctgggtcggggtccgagatttgggttggggtcggggtctaaggtcgagttccgggtttggggtttgagttcgggtcctagtctaggtatgaggtctgggtccagggttcggggttcgagtccgggtccaagttcggaatctgagttcgagtctggtttggggtccgggatttgggatccgggtccggatttggggtctggatccggtctgggtctggggtctggattcgggtccgggtatggggtctggatccaagtctgggtctaggtttgggtccgacgtccgaatctgggtctggtgtttgggtccgggtcagggtgtggggtctggggactaggtccgggtctaggtctgagtcagggttaggatcggggtcggggtcggggttggggtcgaggtcggggtcgagggtctgatgtccggatttcggggtccgggttcggatccttgtccacgttcaagtctagtgttcggggtcggggttcgggtttgggtccgaagtctgggctcgggtctagttccaggtctagggtccgagtatgtgagcaaaaatataatatataatatgttagacaaaaaaaatatttttaaaaattgaaaaccacattttgatattttctgttttctagttttttaaaattcaatttttaataattttgaccaaacgactcttactagtttttaaaatttattttctattttttaaaactgaaaacagtttttaagttatgaagtcaaacattcttttaagtttttggggaatctccttattaattagtgtatctagactcgtttcattctgcgatggaagcaacctcatcatctatcaatgatagtaatataatataccacattaacaaaattaattctaatatgatatttgatgatgataatctagtattttgggccaagctaattgcagtattaataattaaaaaaaagagtaataatatcaaatatttatgtaacataaaatttttaataaatgagatccattttcaataaagctgattggttgtgtatatggctagcattagttttaataaaagtttatctaagcttcaaaaatgttttatagattttttaggatactagttggttgtaaatcaactttgagtagtataaatagggaccatggtctctcaaggtgtatcaaattatcagtatatatgtccaaagaaagaatccagtgtaaacagagtgtttcaaagtgttctggaagtgattcttgcaataataaaacaattatgtttttcatgtgaggtggcattaacagatgaatcatcaagaaactcaattaaaatatagatatatatttgtatagtatatatatttatatagattgattgtcttcttcttagtattttctaaacgtattgccttatgattgactagtaatgttttttaaaaattattacattaaattacatgaactacctgatacttagttagactaataataataatattaacacgtaagaaaatactaaacaccgctaatagtactttttagctcttacggtaaaaacaaacaaaataattataaaatcgatgaatgaaattagtaactataataattaaaaagaaaaaatgatgatttggccaataagaaagtggtacctgttagctatagaatcattagagtgaaaaccttagtttggtgtttgccttattataagctgttattactttcagtagcttgtttggctctatattttgtaactacacaattccagattcaatataaattaagctcattctttctctcttctctctttcactttgctctattatgtattctcactcttaagatatgtcttcacaatattattatggaaattaaaccaaagagttatataaaataatataattctttttaactatatatgccatataatttataaaaatatttttgcacttttcatttcatctgctttgctaaattaagttcaataaattggtgataagttttattttgaagcaaatggagagaagcatcacaccccacaaagttattatttcttaataattaattattacgcatgccactaaatttctgaaaaataaattattaataataatgtttacatcacatttgtacagaaaaccaaattaatgttgatgcacacatatgtaagtatgaagcctacttaattatcttttgatatataaaatttaaaaacattgaagtattgacattgaaacagtgttgaagattaattgcattgcgacaaacaagggtccctcaactttctcttaattgattatatgccccttcaattctagaagtgacagctaatacgttagaaatcaattgaaatttaaaatttacactttttttatttttttaaaaatattatttaataatttaatgtttatttaacttatatttgtgtatgttgaagtttttaaggttaatttaaactaaaatcattttaatctttaaattgtatattacgcattttttttcttcaaattaattatttgaacaccaaactaataatcgtagaaaaatgtgcaatagactctttggactttattttcgacgtgataaatattgccaaatttcttaaataactacaacttatacaaccataagaaaattttgactaaatattttttaagatatcgaaacagataaaaaaattttccaatattatttaatggggtaactcaaggtttattataacacacttctagcttttaacaaagtgttaagtttgactaaaataacacacaatagcaacatattggccgaaattttaattcaataattactataaaagttaatttaaagtattttataatattaaataattaactattaacttaatattttatcaaaaatctaaaaattaagttgttgtttgataatatttttgtttttaaattttttaatcacaaaaatataagtaaaatttttgtttctgaaaaacaaaaatgtgttctacaatcacttttatttttcaattttaaaaacaaaaaacaaaagtgtattctgtatatttcattttcatttgttgattttatttaaatcgagtccggggccggggtctgtggtcgagattgagaccgggttcgggacctgcgctggggtctaggttcagcattggggttggggtctgggcatggggtctgattccgacatccgagtcctgcatccgggcctggatccgaggttcgggtctgggtctggtccagcgtcggagccagggtccggggacgggtcagggtctgggttcgggtttggggctggggtctaggttcgagatccgagtctagggtccgagtcc

SEQ ID NO: 23824 - DNA, 3811 bp, Cannabis sativa
tacttataccgctatttacccttaaaaaaattgtttcaagataatttttttctcatgcacattaagttgcttattttgatcagataactttaaagtatagcaattttaaaccacattttgagttgtgacacactccataactaagttgacaaatttcataggaaaattaagagcaattgacatttcttttataaactccaccatatcatatgcttttttcaagtctatattgatcatataagaaggactattatgctgcctcccatactgtttaaccaagtcttgacagattaaactattatgcccaatgtatctcccatgtgcaaaaccactttgattatcagcaatcaaacttggtagcacttgtcttagtatattacataatactttgatgataattttatagatcacattgcagcaaaaaatgagtctaatatcactcacactagatggacatttaatctttggaatgagagttaaactagtaaagtttacctccttaagaagctttcctatggccaaaactaaaaggactgcttccgtaaaatctttgccaatcttatctcaagtttctttataaaaatcactactaaattcatccagacttgacactttgttatttagaattgagaaaagtgctttcttaatttcttatgtagtataaggggccatgagaatttgattatgctcattagtcataattagaccttcttgtacaatcttgataataactttattatgtctctgatcataaaaatttcacagaagattagtatagaaatgaaagaaagcttttttaagcaactctgcttcattcaccaaattcccatcttcatcctttataacataaatggtattttaaattcttctctactatagactaacatgaaacaacttggagttggaatcaccttcattaatttaaccaagaattttcaactttttatcttaaaaaagaaagataagctactgatttttttatatgctcaattcttgcttcctttacagctaccattaactccacattagaaggatctttatgcagagcaatctgaaactcttcaagctgtattttaatcaatctctcctaagcgtctagattgctaaaactcctcttattatttatgctaacatagctataaaaatattagttcccaacaaaatttctttataagctgaaaaggaaaaagttcatcataaggattataaaaatgtcataacgataagtcttgcaaaaccctaaataataaaatcacataatttgatacccaatctcatagatccatagagaattctacgaaaagcctaattaataagacatggcagactttttagtccattcccttgctttcttgtagtaagcttttatgtcttgtcggtataaaacatagatagggttaatagggtcttctggatttggatcattaaggagcaagcatatggctaacaataataccttgatagtgaaccctggggtccaatcattttgcgaaatattaacatggataatcctgtttttagatatgttcggatggaaaatctacatatacacatacaaaatcataaaaataaaagttgaaaagttaatataccaattattacatttataagaccgatgtgatcattattttttgagagatagatgactaaaataaagagaaactaataacccaatacactataataacaaacaaataatagtgaagagtaaaaagtgaagagagatagactgaccttggtaatgaaaataattttgggaggagagaaaggataactgcgagatattttgatagatagtttgaaaatcccgccctcgtatggagtatcagaagggccaatgattgttcctatgaaacgaaacatgtcattcttagccacttgtttgtagttaacaagaattagaaatacattcaaatattctcttttttgttttagtttaagttctcttctcatccttgactctgcattaagctccttcagtttttctaatgaagggttttttgataaggaaaaatatactttcattttcatcttaggaaacatagttgtgataattatgattgggaaataattagtgaagaaagaaatgatatgtatatataatatttgagatatattaaaccctcttaaattttgagtaaacttatttgccctatttggggggaactatacagatagtttgttaagtttataattttttttaatttttaaattttattattaaatttaaaattgaagtttactcgtgaagggtaaagaagtttattaagttttattatttatttaagaaaaagtttttcatttatacatttaaaaatattgaatatgttctttaaaaactattaatgtgaaaaaaaaatattaacaaaattaaataaagcaagtaattgagagaaaaaagatcagaagtgttactgtttgaggtggattgcattctaactattacttatggttcacccatcttgggcttagagtttgtatgcccctcgtcctacgaccatggttatttggtacggaccttcccaggttggtccaagtttatcggtgcttggctcttgagtgttttggacaattctgtggaggacccaatctctttctttgaaattcatagtccttatgctcttgttgaagtgttttgcaatcttcagttggtaggttgctactcttatcggtgcttgatctttgtgttcatcgatcaagtcaaggttatggcacagctggctatcattatggtcatctgttgcatgtatgagtcgagccgttgggaggtcttgttcagctagaatgactacttctgctccataggttagggagaaaggtttttctccagtcgatgttcttgcagttgttcggtaagaccaaaggactcctagaagttcatctgcccatctccctttggctttttctaatcttttcttgagcgttccaatgatggttttgtttgtggattcaacttgaacattagcttgagggtatcttggggtggagaaacttagttgaataccccacctcttgcaaaaatccttgaagtcattgctgatgaattaggatccgttgtttgtcaccatttcctttggtactccgaaccaacaaatgatgtgtttctagacaaaactcttcacttctcggtctcgaacacgctgaaaagagtcagcctctacccattttgtgaagtagtctgttaatgcgagcatgtacattcgttgtctgggagcggtgggtagcttgccaactatatccaccctacatttcataaatggccaaggggatacaataggatttaatctttcaggcggtagatgtgagacttgagtgaattgttggcatttgtcgcagcgacgaacatggttaattgaatcagccctccttgtaggccaatagtggcctgcggtgagcgctccattgttgagactccgtgctctagaatgattatctcattctccttcatgtaggtcagtgagaacatattgtgcctagtaagatgtaacacatctgagaagaggtccgaaaatgatctcttgtatagttgtccatctaccatggtgaatatggcggcctttgcttggagtcaacgagattcgttgcggtcgaccggtaattctccattttgcaaataatcgattattagagtcatccaacacgtagttctcactgggtttgaaatttgaatactggtttccctccacacggcaggccattgcaagtggatgattgggatagctattgttgacttcgtctgcatggctgagccgaggttggctaatgcatctgcttggctattttccaatctaggaatctgcacaatagaaaa

SEQ ID NO: 23825 - DNA, 4698 bp, Cannabis sativa
  modified_base (3294)..(3297): a, c, t, g, unknown or other
ccgccggtatcaagatccagaccccgccgatcgatttcagtgatcctgattggaaatccaagttccagtccgatttcgagaaacgcttcaatctccctcacataactgatactttcccagatgctgaacccattccttccactttttgtctcaagatgaggtctctaattctcaattcctattcattctctgaataccaagtgtttcgtattctgtttctgaaaattttcatttgatttcttttttctactgcagaacgcctgtgacggaggaatttagaggaggttatccttcggatgaagagtggcatggttatataaataacaatgatcgtgtactccttaaggtgaattactgatgacttaattcaaagatttcttatcacaactccataatccatgttttaattcgttttgtttctttatataatctctctctctctcagaccatttactactcttctcctacctcggctggtgctgaatgcattgatcctgactgtacttgggtagaacaatggtgagtcttttttttcactggtttcactatcatattgatgtttcaaattccttgtattgagccgctgaaggcattgtgtttgaagcttttttattggtctctagaacttaaaaagcacagatttttacatataacttaaaaaagaacagatttttgtttgtttaaaacataatgcatgattgaatcttgtaccataaaaaaccatactccataaaatattgcagtttgaaaattaacattatttaactgttattaattcttcaacacatttatagttgagtttgttttgcatgtaatgttaaattagacaaatatatctcttattgatggatgtagtattggattaatgcagggttcaccgtgctggccctcgggaaaaaatatatttcaaaccagaagaagtgaaagcagcgattgtcacatgtggaggcctctgccctggtcttaacgatgtgatcagacaggtcggtttcatcaggcagtaactaaaaatgaaataaatagatctcaatgtttatagtagctacagaatatactgatatttcttaacatgcatatgatttgaaatcattaaagatttattgcgagtctataaaattatctgctgcagattgtgattacacttgaaatttatggagtaaagaagattgtggggattccatatggttatcgtggattttctgacaaagaattagccgaaatgcctgtaagtttttgtttctatcttccagatgtgcatataattgttaatgaagttttacccccaaaaagaaagtgctgaactttttatggtgctctatgtttatgtaaatatattctgttgaattgtgattatcagcttaccagaaaagtggtacaaaacgttcacctgtccggtggaagcttgttaggagtttcacgtggaggaccaggaataagtgaaattgtggacagcatggaggtttgtaatttcagttttcttaagagctaataattttgaggacacacatggttcttggcctgacaacatttattaatctgatatcaggaaagaggaatcaacatgctttttgtgctgggtgggaatggaactcatgctggggcaaacgtaattcacaaagaggttgttatgcgtgtatccgtttactaattttttgtgtttcacgtttcataatttatcatgcattcataagtaaggtcacttttgaagagattactgaaagcagtaacctttaggaatataaattgctttggtacaagttgcttttaaatttcttgatgatgttgatgcattcctgctttacttaaattcattatgctttgagtgtaggattcatcaccataattatttgtccatgttttccatcagcaatggtagaaattagaaagcaatttactgccatatagatgaccatgcctctagaattatcttattggagatgttaaactacttttactaaatttatgatttgaagttgtttctctttatcttgccttgaccttgcctgccatttctatttaagtctcatgtcctacttttctcattttatttcagtgctgcagaagaggggtaaaggtggctgttgttggcgtccccaaaactatagacaatgatattttgctgatggacaaaacttttggttttgatactgctgttgaggaagcacaacgagccataaattcagcatatattgaggtacgagttttcattataatttgtgacttgttcgatttcacttaaattgctcaagccttatgtataataatttcattgttaaataactcagcaggagaaagctaagtttttgttaacttctcaatccttattacaggcacatagtgcattccacggtattggaattgtaaagttgatgggtcgtagcagtggatttatagccatgcatgcatccttggctagtggacaaattgacatatgcttgataccagaggtacttgtccgacttaccaattggtttagttatttttcagaatctgtactgataatggtttaatacatttaaggtacctttccatttacatggccctcatggtgttttgcggcatctgaaatacctcattgagacaaaaggatcagcggtggtctgtgttgctgagggagcagggcaggttagttagtttaatgtcagtttttcactgttgaaacatgatcaactcattgggacaaccttacttgaacaggatctgctcgataggcttgtacctctttttcctttcaaaaaaaaaaagaaaaactcattgggaccagtatatttttgtgttctcagtctaaatattatgaagcctctcccaaaaaaaaaaaaaatgccagacttgtttgagattcaacttgctaaaaagaactaacaaattgatgtttttctttctaaagctctaagttaggtatgttacttttttttccatgcaggattttcttaagcaaactaacgctaaagatgcatctggaaatgctattcttggggatattggtgtacatcttcagcaagaggtacctctaatttcttttgtccagtaatttagtactaaatttttctgataaccaacatagttattctcttcatatttattttggttgtcttgtcgtaattgatgtattaatgttaatttctatccctttgtcagacgaagaagtatttcaaagaaattggtattacagccgacgtgaagtacatcgatcccacatacatgattcgtgcatgccgtgcaaatgcatcagatgggattttatgcaccgttctaggacaaaatgctgtgagtttctctctctctctctctctnnnncacacacacacacacacacagaccttattgttgattcttgactaaaatgagttcatgaaaatttgcaggttcatggggcatttgctggatacagtggcatcactgtagggatatgcaacactcactatgtttaccttcccattcccgaagtcatatcttatccaaggctagtagaccgcaacagtagaatgtggcatcgttgtttgacctccacaggtcagcctgattttgaataagagccaatactccattactttgttatagactgaggttaagataaataagtctccagtttagaataaactgtagaagaaagtagccgctttgaaggttttatatttttggttagtgacatttacttcatcaaccgggaggaggaggaaataatacagaggattaatttagtcgacatttaataatttatcaaatgtataggctatcattgctccagagttatataaaatttgtttttattattgaaatccagacaagtcaccaagcggtatgtgcttggttcatattttttttgtacaaccatattttatcaaatgcattaccattttttcttagagatttactttctatgtggtggttttctatttgcttagtgttgaattactttttccaaaataaattttctcgaggaaagaaacccatatttaccaaggcacggaattgcagattgagttggaaagattaatttggttataagtgagaaggttgggaagacagaggagatcattatcatggtattgtcagttgttgattaaaattgattccatagaatttgttcaaaaaagatggataaattgattccatagaaaaggattttgcatttttatggatctctattactaagtttaattctaaaattgggggtcatttttgtatctctattactaatactaagtttgatattgaaagtgatatgatttccacacttttctttttatatctccaaatccaattcagtatactaaaaaaatattcagttacaaaagtataggaataaaactgatactgtgagaatgactgttgatagttctagataaaattgataccgtgttctataattttcctaagttatgttttggatagttctctctctgaagggtagtactagggttttaatgtttcctcttgtcgtctaccagccattgttgtcgtcgtcaattggcgttcttgtccgtccaaggtcgttactactggtggcagtttctatgtgatgctccctcacaatttcacgacatggattgcagtcaacaaatgatggaaagccttcaatgcctttgtcttccccaaaacatgtaaccttctaatcgccatttactccttgctttgtgtcccatctgatacttattaccagggccgaccctgaaatgtagtgggctatagggaaaa

SEQ ID NO: 23826 - DNA, 2136 bp, Cannabis sativa
ttcttggatagagaaaatggctttatcaaacttcaagaagtcgtcaccagagtcaagggctcaaagggtggtaagaaaaagtcactagacactgaagcccctgcttctgaggcacagtgaaatgggaagtagggaggttcgaatgaaggaaagagagccaacaacggtggcaagcaaggcaactccctccgtggaaagaggcctaagacttagggcaaacccttacgagagtatgaaccttacatcacaacctactccattattttggctctaagagaggatacatatacggtgacacaatccgttgatcttgcgtggatattttagacagtatgtgaagcgtcaaaggaacaagccaaaccaacctaataaacccaacaaccagataaccaatgattgcatcctacccctattgagggcgaggatatattgattatcttgggagggccgcatctcgctggagagagtaataatgcccagataagatatgtcaatgaaataaaaaacgagcaatcaatgtttgctccagaaccactgaaaaatgccaaaatagaagaacatccaatcatattcttagtggaagatacaaagcacgtgaggtatccacatgtcgatcctctcgtcattacagttcagctcaccaacaagagaacaaaaagagtgttggtggataatggaagcttgataaatatcctttagaaggatatgttgaagaaaatgggattacaaaatgcaaagttaaaaccttgcatggtgaacttatgaggatccactagtgatagtatcgcgagcaaaggcatcattagactcccattaattgtaggagagccaccattatctagaacactgatgtaagagtacttagttgttgatctactatcaatttacaagatattgatgggccgccctccatttattggactaggggcagtcagtttaatcaaacactatcattaaaattccaaacaccagcaagaatagttgtagtaggaggcaaccagttgttggctcttgaatgttatcgcgtagaactttaaaatagaagggcaaaccatcaattaatggtggtcataacagaagaaagagagaagaaagaagaagatctagaccctagaatctaagatgagaaaaatagttaaaaccaattgaagaactggaagaggttgttttagatccagacgatcccattaaatgtgtgtttattgtataaaatctagatgaaaaactaaaatagcaggtaattgaatttctgaaggcaaaccaagatcaattttcctagagccattaagatatgatagggattgaccctaaggtgtttagccatcatttgaatatcgacccaaattatccagcaaaaagacaaaaacgacgacccttagactctgagagacaaggggcactaaaagaagaggttgacaaactattggcaaatgactttatacgtgaggatttttatcccacgtggatttcaaatcctattcttgtcttgaaaccaaacgacacctggagaacttgtattgattttttggatttgaataaggcatgtccaaaagattgtttccacttaccaaggattgatgcaactgtaggacatgagctaatgacattcatggatgcatgttctagatataacaagatcaaaatgcatgtccctgattagaacacaaaagttttgtaataaatataagaccttattgttataaagtcatgccttttggtttaaaaaatgttggggcaacgtatcaacgactagtaaatgggatgtttgaaaaacaaattagacaaaatatggaagtctatgtcgatgatatgctggtaaaatcaataaaaaatgaagatcacccaagagaccttgaagaatgctttgggatacttagaagatacaatatgaagcttaaccaaaagaaatgctcttttggggtctcctcaggaaaatttcttggtttcatagtaaatgcaagaggaattgaagccagcctagaaaaaatcaaggcctaatcgagatgccttcaccaacgaagctgaatgaggtccacgccttaatagaaagaacgacaacattaaacatattcatttcaaagtcaactgataacatgtcttccattctttaaggttttacgaggcaataagaagttt

SEQ ID NO: 23827 - DNA, 2464 bp, Cannabis sativa
taatatgtagatgagaatcaagtcttataattagtgaaaattaagaatgtatatttttttcatgggaatgggtccggagactcgcctttaatggagcaaagattttttgcctaaacaagaaatgagataggggcggagattatttttattctcgaatattaaacagaacgggaatccgtttaatttattaattatcattttattaatattttatattttataatacgtatttataatttttttagtatattaatgtcatttttataatttattaagttgtgatttttgtataataattagtatattgaattataaccccaaacaactaattccttgtcctcaaagaacaagtttatgttgaaaaattgaaaaaagaagaagttatatgaccatacaacatcaaagtgatattaattctattaatctttttttaaataaataaattaaattaaattaaaaacatgatatatcgatcaaccccacaagtttgacaaaatatatgtaagaaagtgtaaaaaaataggtctagcctaagccctataaagtattaaatcaaagttggttgttcttcaatcatttcaaaatccaatatctttggccaaactctagtgtttttttttctttcttcaatatcaacacaaattattgcaatttaatgtaataagcaattaactttgtgttatcatttcaaaatgaaattgtttttgtttttaagaaaaaagaaaaagtgaatgagattgtaaaataaagctatatattttttgcaccacaaacttattgtgacgtgcaagtcttatataaagacttagcccacataataaaaacatcacttattcatttgagattgactacacttatactttataattatcttcacatgtactaaatatatatagcctattgttatctactttaaaagacatatgattctatgaactacttaattttgacaatatatatgttctaataaatcctttcttttttgttcatgtttataatttatacctcccaaaagtaatcaattaaattttaccaagcaatctttataataataatgattaactagagtattgtacggaaaataatattttgcaaaataataataatatatccaaatactataacaaatttgatattaggcccggctttaagtatatagacgggttaggcatgtgcttcgggtccacttagcttaaggccttcaaaaaaattcttttttaaaaatacacaattttttttattaattttgaaaaatattatattttttttatctaaataaaaactcaaaagtactttgtttttcttttttcaatgatccattaaatttcagagtcggtcatgtttgacctaaggtactctaataaaaaagtacaaaatagagtattctccaaaataaaccttgcgagcgctagtaattcgatcgagaagcttcctagtaaccttaaatttttgagtctagagagattcaaacctcataaaagtcctacattctaatatttctccttattattgctagggatgcaatacccaaaatagaaaatcttaattattagacaaaacataatcaacaaacataattagtatgatacttagttaattaaagtttaaaaacaaaactttgcaataccttttctcaaccctaaatttccttatctaagtgatcaagaaatgacaaaactaaatatattgtcatgttaatttttcactagtacattattataataatgcataatgcaaccaaatatatattattgtcgtttttcaaattgatttgtttattacgtggcaaaagatgacataatatgctccccttaaagggattttattactttatattattggtatgaaaataacatttatcttaaaacgacactaaaatcaacatcctaaactacacgtacatatatgtataagataataaagtaagttaaatatcactctacatctgtcaaataataataataataacaataataatagttgtacggattaattaatgaagtctagtctaatcaatatatatactttcattagaaaaaataacaaaaaacttagccatttcttatatcaacccaaaggaatattaatttattttcagagtgttcaaaaagggttcatgcatatgtttgttgaaaagctttaatatatatttgaaaattttattattattaataccatctccactataattgctccctctatataatattctcaattatattatatcaaatttcatatacatgtaagatgcacatacatacatatatatatatatatataaattgaatctgaaaatttaagtacttagttccctatgggcacctcattcttgtcagttacctaagtatatgacaaatggtattataagaaaataataagaatccaaacagtgtatggatcaaaacacaagatatcaatctatggcataaaatagaatatagcaaagatttttaggatcatacat

SEQ ID NO: 23828 - DNA, 2537 bp, Cannabis sativa
aaaatttgaatcgcaatagaaaaatacaatctcaaccaaaccacacttataccctgggaaggccggcacacctagctggagaaaataaaataactttctgtaacaataaatttagaagccagaagttctaaaagaaaagagtttaattggtcataaatatcactaacgttaacaaacaagaagttttcaatttcaataaatgctaatattttttttacgatgaaatgtttttgtaaggaaatgttaataattttatttacaaatcaaattataaatattttttgcttgaatttgttaaatattttttttttaccaaactagctcattgcattattttgatgatcacattaataatggacttgccatgcaaccgaacctaaattaacgttaaagcaatagtgcattaccataattaagtcaaattaacgtttagaattatagtaagtaagtgaaattctgcttaagtcaaaagataaatttagattaaaactaagtcacatcaactctaagtcttaacacaatcaagaaaagaacttgaaatttgttctcacaaatcaaaagaaaaaataaattttacaaagcattaatagaatcgttacaaattgtagttccacgaaccatttccgcaacaaaagacttgagatttttatccgaagatccatcttttttagtagcctcccttgtcaaatccttccatttcattgcatttcttctaatttccgccccatcttcattttctcccgtgaccaattccaaacacctcttaatctcatcactttcaacaataccattcttgttagggtttactctagctcctgttttccacgcatcctcaatcaacttagcatttgttccttgatctgaccaaatgggaaacgctattactggaacacctgcagctaagctctctagggtcgagttccaaccacaatgactcacaaaacatccgattgattgattacacaaaacctccacttgagaacaccatgtcactatcatcccaagcttcaacaactcttccctataatttattagctcatcattgtcattgtcatcgacatcatcgtcatggtacttgtgatgacttttttctttaatgacccacaaaaatggatgacaaaaatccaacaaccctttagctatttccttcatttgttccttaggcaaatccaaaagactcccaaacgacacataaaccacattcctttcattcttcgagttcaaccattcgatgtaatcatccttcgatctctcgaaaagatctccacgaaacaccttatcatcaccacaacaatctttttcatcgaaataggctaatggaatcaacggtccgattccaatcaacctcacaccgctaatcgctcccaacgcctcaccctccaactcatcaaaactattgacaagtataattctcttctcctttctagattcaatcatttcaaattgctcctcaaaactctccataaccatgtgataagtaccttcatgatccataaacgaaggaaaatccctcctactaaactccaacgacaatccaattattgtcgttttcaaaaaacgacaacaatcccttctctcaaaaacctctcttatcaaatcaccacaaccgtaaaaataacgatagtacaaagcaaaaaccgtcgccggttgaatccacaacatcgccgacggcagaccaacactgtcggcggcgacaccagcccacggcagaagaagcgtgtagaccaagaaactgtacggacgaccgtcgtttcgacccaaaacgacgagatctcttaaggctcgggtcccacaccgcttcatctccgacaagtagcggcgccggtcatcgccgattacggaatcataaccgtcgattgagaacggggcgaaggttatgaccgacccgtttgaggtttctatagttttgttcgggtcggattctgacccgtttgctgtcatgaggcggtaagcgtggagagggatggcgaaggtgacatcggcgccgccgtggacggcggaggtgagacggttggcgaattgaagagttgggtttatgtggccttgagctgggtaggttactaagatgaatctgaggcgtgccattgttgagttgagttgagtgagtcgggtgagtcgagttggacgagttgaactgttattaagttttgatatttatatgaaagtgaaggaaagagagagagaaagtacgttagcaatgacgtagttacgtttttgcatggttttgtgtcgttttgtatcttttaattgtcgttttgttagaagttgtattatattttgcttaaattgtcgtttgtgtagtattattaattattttatatttttaacaaattaattgttgtatttttaattgaattgtttttattatcattatttaatttcttataacgatggatgtggagtatgtagtgatgtaataatgcatgagtttttatgatccttcaagtgagtcgtcgagtcgagttgggcgagttgggcgagttgatctgttagttaataatgcatggtttgttgttttttttatatattttgattaa

SEQ ID NO: 23829 - DNA, 2542 bp, Cannabis sativa
taaaataaaaagtattataattggatgtttttagaaattttttaagtgcaaataaaatttccctaacattaaattataaactatatttattgtttttattagtaaaataataataataaaattattattaatttctattttttagtaaaaatattaattaattaaatatgaaattttataaaaatacaacataaataaaaattaaaagaccgtaatttttgtaaataaaatcataaaaattatacaaatatttaaaattttgtatgaccatatttttgtaatttttttttttgttatttttgtatatttataaaataatttcatcttaaaaattgacataaatataggacaaaattatttgtgattgatatatcattgaacatggtccaactagtttgagtataagattgaggttggatggaaaagcttcacagctatatgttcagtcaaaaccctaagtccaaatcattaaatataacatattaaatatgtcttgtgtcccatgcacatttagaatgagcaacaacttaacattattcataaaatatgttagactagtcttctatatgaccaagaattcatgcattacttgtcccattaaataaagtcaaaaatacagaaatattgaaattatatatggttccttttatttgaacgtaagcctcaaattgtgaccatatatacattaatttaatttactctttcttttaatttataatgttttattgtgatttcaaaaaaaaattataatattctatataattgaatattatttattatgagaagaggtttttagtctttagtagggttggcgatatggtgttaaaaatttatatgaaaatataataaattatatggacaattataaatgcggaattaaattaaacctatatgcttgataattaaaggattaaaatatttctagccaaattaatgttagtatggtatttagatttccaaactctttttaactctcttaattgaatttattattttcagagaatgagtagtgagcttagaaattagtatttaaatgtgagatatttcattagtatttatatcacgttaattgtcataacattttgataattaattcagaaaattaaattaaataactaaaatatttagtaattaaattgtggtcataattagaatattcttaattaattaatttaattaattatattttataaataaaatcattgatctgtacataaaatatatattctaacattctcttggttaacatttaaattaatttagcaattaaagcccaatgattatcattgatgtataacacaaacatattatggtgatatgtcttcactatataacgagtattatcttgcaagtattacgatatattataatatataacaatgtacttaatgtggtaatgtacttaaacgaataaaccctaaattttgtgttcattcctttaaagataattttctcaaatgaaattaaagtgcacgtgaatataagaaaatattgaaattagagtttcatttaataatttatctatacagcgaaagttgttgaagggaaactgaatttcatgtttactttatgatctttgaatttatatggtctgacatgtgtttagttaaggataatacgatcattcaattcatgaaagttgcgtgcttaatgaccacttacacttctttatgctaaatacttaatgttgatttgctagcttcgaccaaaacttttacgcataaatatagctgaatttgttgtaaaaatctcttaatggcctaaaagggtaattctgaactctaggtctagtatcaaactctataaataaatttgactcctatagtagaaataacaattaagattcttcacaattactagtagtaatgacgtcatgccaaatgttgatctacatgaatcaacatatagccagtgaagttggaatttaaatggttaactatatttttaaaatatcagttcatctcaataaaatatatgtacgtatgaatgtaatctttaatatcttaaagacatttcatcactttgtatgtaattataaagttgtctaattaagttaattaatctaataatacttcttaacattcttaaaacaaatgtaatgctaggtcatctgtagacttgcatacattaggcttctaaagatagaagcaaataaaattaaatggggtaactgaaatatttggtaattgaatggtgaccataattaaaatattcgtaattagttatcaaataattgagatataattaattatattttataaatcaaattattgtatataaaatattctaacatatggattacgatacaatgatacaacacgaaatgatacaaaattaaaaggtttagatgacacatttaataaaggatatatgtgtttcagttttgacacgtttaataatcatgtcgtatttgtatttaccttagtcgtaacggatcatagtcgtatcgacgcatttaataatcttgccgtgttataatcatgttgatacgataacacaaattaattttcataggtttattaatatttttttttttttgaaa

SEQ ID NO: 23830 - DNA, 4402 bp, Cannabis sativa
aaaaaaaaatggtgaaagacaggagagtaggagtggctgtggacttttcaaagagcagcaagaacgctctgaaatgggcaatcgataatttggctgataaaggagataccctttatgtcattcatgtttgccataactctgatctcgatgaatctcgaaatcttctctgggttaaatctggttctcgtatgtgatatgtcccactcattcatataatcccttttcaattttagctctcttttctatcatctgttctgagctttttcctgatatttcttttttgttggttgatgatgtagctcttattccattgtctgagttcagagagcctgaagttatgagcaagtacaaccttaaaacagatgttgaagttcttgatttactcgacactggttctaggcagaaagaggttggttcttataaaacatcaattgcttttactcatattatgtttatattgaaatggctcaattgttgtttgggatcgttattaccaggtggctgttgtgtcaaaaatttactggggcgatgctagagagaagcttcttcaatccattgaagatctgaagttggactgtttggttatgggaagcagaggacttggaaccattcaaaggtaatttttgtgaagatcttatattagaaccccttcacttggtattgtgaattattcttaaagaaatgatgaagaaaacaaatattgagtttttatttgctgtgttcttatttgggttttggttattttttattctttttgaaataataaaacaggattataatggggagtgtcagcaaccatgtgattactcatgcttcatgcccagtcaccattgtcaaggattaaatcatcatgagttttatgatgttgcctcctatttcaatttaccgttttggttttatatttggtcggttattaagtcatggagagaactcattcttatttcttgtaatgaatgagcttttacaaacgtatggaataataataataataataataataatgtattgtaatgttttattctatcaataatgtattttgctactgcaatcttattcacatttattatttgagtcatgacaagtggccaggccacatgaccacgttgtttgtcttgaaatatatttgacatcataatacatatccatgtgaacatataatatatatatatatatatatattagtcaaataattatattagatgcattaatatgtcgggtcatgctagaatcatgtgttatcttttattttttgaatcgtatcatgtgtttgctaaataaagtgtaattatttacatgtgtcgagtgcaagtttactttgagtcttgaagtccattaatattaacactacgtaagaagtaaatttatagcttattgggatatcaagtgtcaaaattgagagctaaaattatcttggtttaatgaactggctcaatgacttgttgaggatcgtgtgttattgtgttaatatattagtcccatctatgtgatattgtcatgcaatactaaattatatatatatatatatatatattgaataattagtaattttactctttaaattttcgacaaaattgattctgtccttaaaatatacaacttgttaagaattactcttgaacttttatatctacagaaatttagtctttctgtttggttccatcttattatttcttttaaatattgacgtatttttattatttagcaactttacctcttaaattttgacaactatcaaattgtactctctcaaaataaaaatgagaaagatttaatattttctttttccaaaatcttaaaaatttaatttagatgttgaaaaaataattttaaatattaaaaaaatttaaaaaaaaaaacttgagttagacaagtcaaggggatcaccattcccaccatacattaatgccttgctcttgtctaaattcaagatgtcgacttggaagatgtacacagggaaaaaagatctcctagtacacctgaattgtcgaatttttctgacaactctagctgaaatagcccaacaatggtatctcaagctggtctcaggaagacataactctttgggaagaattctctcgggaattctatattcagttctttgcttcaagacaaatacctacctgattggaggttcttgtcaaaacaaagcaaaaataagatgaaccattgaagggctacattcaacggttcatggctgaggccaccaagcttaagggcctgatagaagaaggccgatatacgaccatactcggaggcatcctaccgttgagtgacttctagaaagatattaggaggatctcaacgaacaacatggaggagttccttgagtgagttgatggcttcataaagttggaagaagttgtttgacaagcccagacaagagggcaggtcatgacggacgaacaaacacagggcctcatagcaccttaagcactgttcgacatgccgaccaacgcaaacgatctatgtcgattctctaacaatgagaatggtagaggcaagtgcaacaacgatggatttgcccaacataatggcaaaaaagggaaattcaacgagtcccttatgccatgaagtccaaggcagaaggaggaaaagtgtgcatgcttcacttttctaccaaaactctcaaagcaaagcatgcccagacgtcccagcaaggtcaagtcaacaacagacagtacaaaggctggcctccatctccgaaggctggcctccatctacaaaggttggcctccatcttttgccaagcgcacaagcaggtgccaacaactctacccaaacctctagtggcagaacacttaggggtcgtcattggcggatcccatattgtaggtgagaccagcatagctagggagtgctatgcttggacactctgttacgaacccaaaagtgacatcctagcaggcgaagaacgagactctaagcaaccaaagcttagagagccacgatttctatctcatgagcagatcctatttaagtcagtttcccgcacaacaaccccctggtcgttactgcacaaattaggaatatgactatagcaagatacattgtggacaatggagcctcattcgacattcttttcaaatcaacatatgaaaagatgagactcccactcgttgacttggtaccctgcagtcaagtgatgtatggcctctttggccaaggcattgcacccatcgggtatataagaatacccctcactgacggagaaaatccaagtacaaaaactctgatggtgcagtttatcgtaatcgacgttcccttagcttttaatgacatgataggctaaccagccctataccacttgaaggtgtaacatccatctactgccttggcttgaaattcccaacaaggcatgaggtagatgtcaagaggagatcaataacttacctgtcactgttacaacttggccttgtccaaagccaaaaaaaaaaataagatgcatccaccagatgaggagcatacaagcttcatgacagacttaggcctgtactgctacaaagtcacgccctttagggctgaagaatacagaggccacatatcagaggcttgtgaacaaaatgttcaatgatcctatcggcaagaacatggaggtgtgtgtggacgacatgcttgtcaagtctgaaaaggttagggggcttatggacgacttagatgaatgctcccaaatcccctgcagctacaacatgaagctcaaacccaaacaagatccaagcctttttggacatgaagtcccccacaatcatcaaggaagtacaaagccaaacaagacacatcactgcactaagtagattttgtgtctaagtctacagacaaatgtgtacccttcttcaacattctcaaaggcaacaaaaaatttgagtggacaaaagaatgtgaaaccgcattccaagagcttaagaaacaattggctcagtcacttgtgttgcccaaacccctagataaagaagagctaggcgtgtacctatcagtcacaaaacatgatgtgagtgttgtcctcacaaagaagaaggcagggtataacaccctgcatactataaagccaaataggatgatctctgcactaagcagatttgtctctaattctacaaacaaatgtgtacccttcgtcaacattctcagaggcaacaaaaaatttgagtggacaaaggaatgtgaaacaacattccaggagctaaagaaaaaattggctcagccacctgtgtcgcccaaacccctagacatagaagagctaggtgtgtacctagcagttacacaacatgttatgagtgttgtcctcacaagagaagaaggcggagtaaaacaccctgtataatacatcaccaagagactgatcaacactgaaagtaggtacccactcatggagaagctgacccacagcttgctcttggcttctagaaag

SEQ ID NO: 23831 - DNA, 1702 bp, Cannabis sativa
caacctgctccactcacttcgcaacatcctatggttactcgtggcaaagctggtatattcaagccacgagttctggtgtcacaaactgtttctcaatcctctcgccctggtttaccactgactgttcaggatgcactccaccatgaggggtggaattcggctatgaatactgaaatggctgctttacttcgcaacaaaacatgggtgcttgtgcctccttcacctcatttcaatgttgttggaaataagtgggtctatactgaaaagtttgatgagaatggggtccttcagaggcttaaggcacggttggtggctaagggctttcatcaacgacctggagtagattttggcgaaacctttagtcccgtcatcaaagcttccacggtccgtgtggtattgactattgatgttgctcataactgggatataaggcagttggatattaataacgccttcttgaatggtacattggatgaagatgtttatatgttgcagccccaaggatttgttgatcctaacaagccacatcatgtttgcaaattgcagaaatcgatctatggcttgaaacaagcaccgcgggtttggtatgagcaactgagaagtacacttctgcagtggcaatttgtgaactctaaggccgattcctccttctttatgttgaagcattctgagtatgtgataatggtcttgatttatgtcgatgatattattgtgacagggagcaagtcgagggagttagagagttttatctcacggctaaacaagactttctcattgaaagatctaggaggactgcattatttcttgggtattgaagtctttcgagatgatacgggcctatacttgtcacagggaaagtatatatctgaacttctacaaagggtgaacatggttaacttgaagccgagtccaacacctatgacagcaggaaagccaatgtctatacacgatggtgaaccaatggttgacccttcacactacagaagtgtcataggtgcattacaatacttgagccacaccagaccggacatttcatttgcggttaataagcttagtcaattcttgaaatgtcctaccaacactcattggaatgccacgaagcgtgtgctacggtatctcaaaggaacaatgcaacatggaatccacataacaccaagtgacagactcactctcacgggtttctctgatgcggattgggcatgctgccctgacgatcgaagatccattgctggctactgtgtattccttggagattcactgatttcttggtcttccaagaagcaaacagttgttgctcgctctagtactgagtcggaatatagagcattagctcaattggcagctgaactcacatggcttcaagaattactcaaggaaatcaagttcaaactccctgcagctcccataatctggtgtgacaacatgagtgcaagcgcactagctgccaacccagtttatcatgccagaactaaacacatcgaacttgatgtgcactttatcagagacaaggttctacagaggcaattggaaatcaggtacataccatcacacgaccaagtcgcagactgcttaacaaaaggactttcacactcaagattccagttccttgtcgacaagctcggagtgactacatcaccctctcgcttgaggggtggtgttacaggataaaactatgcagggtattttcgtcatactgtcatga

SEQ ID NO: 23832 - DNA, 4117 bp, Cannabis sativa
  modified_base (2117)..(2122): a, c, t, g, unknown or other
agtaacatagaattttatgtaggagatcatgtattcctacgattgtctccaatgaaggagattaaacatttcgggaaaaaagggcaagttgtgccctaggtttatagggccttttgagattcttgagaaggtttgactggtatatatcgtctacccttgcctcctgcactttcagcaatccatgacgtatttcatgtctttatgttacgaaaatacgtttcagagcctactcatgtgctgagttatgaaaacatagaactttagccaggcttatcatacgaagagcaacaagttcaaattttagatagaaaagataagttcctttgaaacaagaccatagctttggtcaaggtgctctggagaaacggtaaggtggaggaagccacctaggaattggagttcgacatgagggctcaatatcaagagttgtttagggtagattttgagtatgaaatccttttaatcgggggataattgtaaagactgcttaattttagtatgagaatactagataattagggcttaataccaaaattagattttgaattatcatttatcaacttatggagatatatttgaattctaagtgtgatatttatggtatatatgaaattttatatttttcatattttgtgcccggcaacattggaacgcgacatttggccgatagagtcacattttcttatggtttagtattttagtaatagcggggcaatatagatagacgttgtaaatttctggattattcgaggtattaggtttgaccaaaatacccctaggtggtaaagatgctttttggcttaagcaagggcaaaatggtctttttgtcatatgtttcttctatcctttattaacttataattgaattagtaatctgaatcaagttagtagaatgttggataaacattaggttttatcttcttttgtcaaaaataaaaaaaattagaaagaaaactcattttctctctccattacactctctttctctcgatcccttgaggaaccagcagccaacctagatttttcaggtcctctcttggtgatttagcaaagtttgattgcatctctaagttcccatttaaggtaagcaagctcttctctctttctcttgactttttaaggatttaaagcttgtgtttcatgcaatttaattttgagattagattactataggggtaatttaagtttggttatgatttatgaggttaattataagttatttaagctggtttggagttgatttgagtgttgtttttgtgtttgagcaaagtttaaacgttatagctctaactttgctctctcatggtgattttggtttagggggtatgtattcagttatattgcttgatttaggtttattgtggccatataaggaggtctagaaagtttggagacgtttagggtctatttttttcttattaaggagggtttttgtgtttcctgcattgaatcagtcgaccggttgagttggacttgtgggaaccggtcttccggttcgtccccaggcagaccctcatagaattgattttccggttgggaaccggtctacctgttcaggcatttattggcacccaagtttttcatgtttttgggatttgtagagtattgccatgttatccatcgataggaaaacttttagttttgattttaagttcccgaaaagtgatttagtgcattactcatcaattttacaaatattgtgatttatggacctgtaaatcgtcgagcagttgttccactcaggttgaccggtacacctgaatttagaaacgaggaaagattagtataatgatatgcatatgtatttacatgtttagcgtacatatttattaagcctgttagattacatcgatagcggtatcaatatacgtagagttgtattggataccgatagatgtttgtttgtctcaaatattgatcgacgctatcacatcggtacaactagagtatgactagagcattgagtataagctgatattatggtcgatagtattatcgtatgaacgttccagactcagtaccgccttgggtgcggggatatgataacagttgggtgtatgggaacctcattataattcgggttatatttataattatgattatacttttcttactgnnnnnntcgactcacagatattgtttacatgtgtaggtaagggaaaagctaaagctgagcagctatgagagcgtgcagatgaagattgtacatgtcgaggcggttaggcctggagcatatgatcttggggacagcagactgtatttgtatagtcgctaggcggtgacttttgtatagaacattttgaatcagttgtaaatattttaaactcgggatcctgattatataaaacttatttaatttcattattgataatatttaagcaaaattttaattgctcgcgattttaaataaacgcgttgattactaacaaactgtagagttaatataaaatcacgataacacgcctaaagtagtaggatgttacaataattctttggaaaacttagacaatatgtttaaaataattttttttttattttttattattttttttcacatttttatagatttgtttctttacatttttatagatttttttttactggttttcaattgatttttttttttagagaaaaatgttgctttcattttacttttccatagtaacacttcgtattgttgcaaaattaaaaatcatgttgcttgtgaaaagcagcaacatcaaaacaataattttttttaaaacaacagaaaaataacactctatatttttgtaaaaaataaaataaatccgtaaaaatataaaaataaataataaatctataaaattaaaaacaatgtaccatttttataaataataatgagctggttatttgaaatattaacttttcaaacatttatttaaaatcctttaattctgagggtttttttttaatagaagttttattttgaaaaaaaataattctcactattaatgtctatttttaatatttgtttcatatatatataagaattttttactataaggatgtaaaaaagacctcatgtatgggagtgttttatgacgagtctttgacacgtcattattaagtgaaagttgtgttttgtcacctgcaaaacactacattattatttcttcttgtagttttttaggtttattttttttttgaaaaaaattaggaatgaaattaattgattcccattttagggataaccatttttaacaaagaagaaatattttcatgaggagagattaaagattatttttctttttagggattttgcttagatgggtttctcgcagtgacatgagcagctgtatattgaaccttttgtaggctaactctaatttaatagtaggaaaaaaaaagattataatggtttagatgggtgtaggctgtttctgcttcaaaagtgaatggaatagttcactcatttggtatatagtggttaataagattcgattgcataagagtgagttatggtgggagtctggagaggcttcgtggatttttgggtttagggagatgcaaatcgtgcaatttttagcttaggaatttttggagtaaagtaattttttgttctatatttcttctctttctttgatttttgagaataagataaactttcattgagaaaaaaaaaaagctattcccaaaatagaggagtacagtccgattttgggttaggaaactcttggagtgattaatttttcgttctagtttatttatttatttcttaagatggagagaaaaagaaaaataaaactacaacaagagatgggcactgataatcctcaataaaacaaaaaataaccaaatcacaattatagttccattagtttgagaaaaaaaataaaacgagatcaatatcgttgatgaggttgaacaagatcttgttcgttgaagagatcgtacatcttattggtcaatagaagctagatctgagagaaagggacgtgaggatccacggttgatggaatgccagatttggattaaaatgtcataactgttttttgatatagtgtaaaaagggattttttttgatatatttttttaattaagtagttaaattaagtatagaaatccaaatttgtgattttattattcgttattagat

SEQ ID NO: 23833 - DNA, 1408 bp, Cannabis sativa
cagggtgaggattctgaccctgaggtgctggacctgttaaatccatcttcatcggatttgatagttgggaagatttatatttcatgctctgttgaggtgcaagactagtaaccagttttgttaatggttttcttttgttctatattttattttaatacaataatggggactttatcctatttttattgttgtcacattattttgataaaaattaacaggatccagttgaaacagaaaagagttttgcaagacgcatcttatctatagtggtatgttctgaattatgtactgagaattgtcaatttttgttgttgctgattttattgacttgttcttgagtaagctggtaagtatggtgtggatagttgaaactcctcacatagagattaattggaaaaaaaatctgagcctttatatttcttacaggactataatcaggatgggatgctgtcattgtctgagttttctgatttaattaatgcttttgggaatcgactggcagctgaaaaggtctgaatttaaattcttgtttctaccttgtatgtcacagaaattgtcttttatagaaattacaagattacatgatggggttactagactgaaccatctcgtccttctctccatcccagatttatcaattggggtttttgaagtactgggatttacaattctattgcataggtttacttccagcccggcttacccggctctcattcataacttgaaaagaaaaataaaactggatttctaaattagattttatttacacattgttttgttgttaagtatggtgaatacagatcttaaattaaagtgttagccttcaatgctacatatttttgtatttatttatactgtaacaacctgaaggaaaaatgctatggttagatgaaattgacaccccaagccaatcctaagacatctgttggtagcaaagcttcaaaatgagttttagtaatatgcattaccttaacatccagtttctcattttaaagtgattcaatcagctacagcacttacctatatttaaatctataaggtttaactacttgttaattctgagcttgaacgtcctttggttcccttattatttcatcatattttcgttgtcaaatttttatgatgaagttgtgtttactaattttttttccatccttattagaaagaggaattgtttaaagcagctgacaagaacggggatggtgttgttagcatggatgagttagctacccttcttgcttctcaacaagaaaagtaattaatgcaaataacttttaaaccagaagagtttagatagtgttgtagggtaggccttgtaatactagaaaaataatgtttggaagctatggaatttcctttattgttttagaattagatatgttcatatatgtctatttgtcaatagacg

SEQ ID NO: 23834 - DNA, 4864 bp, Cannabis sativa
  modified_base (4827)..(4827): a, c, t, g, unknown or other
tatattaataagtaaatttgattatattgaactgagctttatttagggcataaaacccaacatttttatccttcattgactatgttgacgcgatttttcgtcaactaatctaagaagattgtaaaataaaagaggaccacggtgaattaatctgactattaaaaccgcaaaaaaattaaatggacaccagggatttatagtagttcaccctcatgtcgcgatggtaatgggactacgtctacttgtagttttattaattagatccgacacactagagttatgttctcaagagtgtgtggataaaagtacagcaatggatctaggtgaaatcttaatcgagatttattaatataaggttcatgggagacttgatattcataaatctgatctgaattaaaggttgtaaatttcttgggagcaataaattaataatttgtggaaaaaacagtgtatcaagggtgttttgaagtttggcgtcgcctaagtatggtggacttaatgacaaagatgaaggaggcaatgtggtgttcttggtttccttttagtaattttctaggagaagattttcggaatagaagatccaaaagagaaaaaggtctcaaaaagaaaaagccaaaaagaaggtccctttcttagcctctacttgatgtatatataggctagagggtttgttagagatccctcatacatcgggatatctcattaataaatcacgtaaaccactcttttttatgaataaaatattacaaataaacaaatatcaataaccttacatctaggcaaatatcccaccaatatttgacaattggttattttcggttggggatgcactaatttgaaatagagtgttgaatacatgcatttcgaactgccgatgcttgcacacaacaccacatgggttgtggcggtgtgctccaccaaccctcacttaaccgcatttcccaattcttgagtaaaatggactagcgataacttcagaattgagtcatggttttaacacaatttgatccatctcaaaattatctttccaaaacatgttgaaccaggtcatttggataacagctgagagagttatgcctattttactgaaggtagtttatgctgtcttgtaccagttgcgagcactgccatggccaaatggtagaggtcggctaggcatgttctcagacccctcagggtgtgttttgacttgttttttcatggtgagtcatattttggaggctcgggacccaaaaacctcatttcgacgtccgaaaccctaaaaagtgaccattgccactagttgggccagataatggcacaggtcacccatgacttgtgggaagccatgggtggtgtctctcacttgtatttggtacatggatgttgaaaataaaatttagtcaataaattcctcttcctggtgtggtaattgacctgtgccacttcactatggcactggtctccaatttggagagcattgccattctcttatggcacaggttccctaagtcgactcctaggccaaaaatgactttcctcacttgtttcttactccttgatgtcgtgggaacccactcgaacaattttcctcccacaatttgtgaggagtgacctaagctattctcttatggcacaggtcacctaaggtgactcctaggccagaaatgaattttcttaattgtcccttactccttgatgtcgagggaccccgttcggacaattttcctccaatagttttcgaggagtgacctgtgccattctaccatggcagaggtctccaaaactggagagcactgccatttccttatggcacgggtcatttaaagcgactcctaggccaaaaatgacttttctcaattgtcctgtactccttgatgtcgagggaaccagttcaaacacatttccttccatggttcgcgaggagtgacctgcaccattctcatctggcacgggtctccaaaattagagagcactgccatttccttttggcagtggtcatttattcctgttttcttatggttttagtgctaatttgactttatacataatcccaagtcattttcatgcctaaacaagtcaagtccttattggttttcttggcggattgaggtctttacggcaaaaacgctcgggcaggcccatgaaccctagtttggacacacttgggtgtgtgagtctcagagccaaatggttgtttgacatttttgagcccttcagaagtgccatggcaccctcaagaattgggtataacttttgcccccaaaaagtatttgcttgtaagccttcaagtaatgctttcgcacttttcccaaggcttgcacaaaaaaatacttctttgtagagtgcatgaatgtaacttctcttctgaagatgtgtgcatgggcacaaccaatgtccttgattgttgtgaaaatgtgtgcatggccacaaccaatatctgtaattgttgtgaaggggtgtgcatgggcacgatcaatgtctgtaattgttgtgaagaggtgtgcatgggcacggccaattttcatggacttgtatgtgtggagttattaaagcatgtggcttctccttagaatgtgagctgagttatatctcatgtctcatgtggtagtcgagtagagttatttctcttgcttaattttaggacttttgcagggtttaaaactttttgcttaaggtttttgattcaaagtagagttatatctcttgcttgaatttaaaacttttacggagttttaaaatctctttcttaagttttgagcgttgagtagagttgtatcccattctcaagctcatccttaagtagagttaaatctcttgctcaagttggttggcaagtaaggtctgccatgaatagagttaaattctcttgttcttcttatacactttttggttgtgcatttatgttgtgaccctcatgtgtaggtttgtatatgtccacttgtcgtggagtgcttattagttaagactaacaagtctttttcgcatctttggaattttttaagcatatataacttagttcattccatatcttggtgactttggaattttaaattgaatatattttttggtgcttattttattccgatgcttattatctttgtaacacggggttttaaagataacattaattgttgccaatggtagcttgcattttgctagtccgagaaagttgttggcatgggccgtaactatttgggtactcgattttagcatgcaacccacttttcaaagtctcaaatgtaggccattcaagatatctttgttaagcagaattttttgagttatggctccttggagcgccctcacttgtcttttatctcgtctatataccgactttgccccctgtctgaggtgaaattttgaaaacatattcatgacaaaaaagcttaaaatctcacgcacttaaagtggtgtatcagtaacgactttgagatttattattaatattttttatgcgagcacagttatatctattctcttttgcccccgagtgtttataggttaagtattatcctattttactctttggtgggtttggcataatagtaaaagatctagttattgtagcactcttataaatgtgagtttaactacttacattccagaaaataaacgtaatagtttaataactaaaaattgaaaagagagtgtctttgcaaaaaccttgagaaatattatatgccttctcgctccattggtggagtttcaactagttgacatctcctccttgaaaattgtgttgtgcataatgggtaagtgtcccattaaggactagagtctcaatttcatctttgaggttttggcactcattagttgtgtggtcgatgtccttatggtattgacaatatcttgaggcatctctcttggctcgatcatgcttcatgggtttaggaactcggaatggtactcggtgctcactctccacatagatggtcacttgggcttctataaactcggtgtagattaaatatatagggcgtttagggccatcactcctactcttcttgggactttgatcctcgccatctatgctttctcttttgttgttctttaaagagttagaagccttagtagcattcgtaagttctggcggcactaatgcagcttgagtgagctgcaaggattggagagggaggttgtttgctatccttgcctcttcagtgttcatgtatttttctgcccgcttcatgaattcgtcaatggtgtgtgtgctcttgccttgaaggctattccaaaatatggaaccatgggcaatacctgcccccagtgccatcagtcttgcactatcgtcaacgccatgggttttggtaacttcaatgttgaagtggctgatgtaggccattaaactttctcctggaaattgtctcacattggccacggaggaacattaaagcttacaagttctcgcagcctgaaactcctttttgaaagcatctaagagttggtcccatgacactatggagtgtcttttaaactttttgaaccacgaggatgcgactcgagataaggtagaagggaataacacacatttcaaatctccaaccacttggtgtgctagaatcagagtattgaagtcacttatgtggatcccagggtcagtggtcccatcatacttggttgtagttggcatttcaaactctcgatggtaaggttatgcaaagatataaggcacgaaaggctttgtctcttcattagattcatactccattttattgttattcaaaggttgttggagttgttccttaagcattgttaagcgaggattgccatttgatataccacaattaactccaatagggagaggaggattgttggaatggttacctgttgggttttgtgccctanataaaacccatttcattataatcagatttactaataa

SEQ ID NO: 23835 - DNA, 7346 bp, Cannabis sativa
  modified_base (5882)..(5885): a, c, t, g, unknown or other
tcttttgtccttcaaggttttgttaacaacatccactcatccattcgctttaggcctggatactgaagagaagctcttaattatcttgttccttttgtagaactcaatgaatatgtcaccatcgagctgagttccgttatcacatactatgttcattggagttccaaacctacaaacaatgtttttgacaacaaagtcgaggactttcttacaggttatggaatctagaggttcagcctcggtccacttagtgaagagatcgactgccaccactgcagacttggctcctcctcgctctgtgggaagtgccccagttaggtcaatcccccatatagcaaattggtaagccaaggtcatcattcttagttccattggttgtatgcgaggtatatgtaagaatatttgatagttaccacactttttgacaaattcatgggtgtccttgttgatggttggcaagtaatatctctgactaataatattttttgatagacttgccaacccgcatgatccccataaaagccttcatgaatctctataatgatctcattttcttttgagggaagaacacaccgaaggagaggcatggaatagcctcttctatacaattttccatccattatcgtgtagcgaggcactaaatataggagtttttgtgcctcattcttgtaaattggaagttttccgtcgagtagatagttaattatgagagtcatgcacgtgggcgagctctctatcatcttgccatcttcctatttgcatgtactcaactcgtttagcatttccacctaaactaagtttagttcatctaagtcgttctgtaaggccaatttttctacgacacaagcgttacagttttgttctcttggatttgctcgattttgaaatagtcaaacttttccaagttcttccgaactttctctagataatttgccatttttgaccttcaatgtttcagctatccttaaaccagcaatcaaggcttcatattcaacctcgttgtttaacacgtcaaattagaatctcaaagaataatgaaacttgaaaccttctagtgaaattaatatcacccctgtacttgagccgtgctcgttgtatgcaccatccatgaaaaacgtccaagtatccacgtctcgctgaacaagaaaattttcctctggagttattccttttattaggaaatctaccaaagcttggcccttgatggatgtttgtgggtgataagttatgccaaagtgtcccagttcaattgaccattttatcaatcttccagaaacgcctggttttgataaaacttgtctcaagggttgatcaattaacactttaattgggtgtatctggaagtaaggccataaattgcgagatgcgtggattaagcatagggaaagttttctatgagatggatatctcgattcttcccccactaaccttttagtgacatagtaaacaggttgttggtgctttccctcttctcgcactattgctacactaatcgtgttttctgagacaactaaatagaggagtaatgtctctccaattactggttttgccaaaacctgaggtgtcgacatatgccttttaatgctcttaaaggcctcctcgcattcctctgtccatttgaatttcttgttgcctcacaatacattgaaaatttatagacacttatcagttcacttcgaaatgaatctgttaagtgcagcatccttcctattaaggcctggacttccttaggcttggttggtgatggcatatctatcaaagcctttattttcttaaggtttgcttcaatgcctctcgttaattatgaatcccagaaactttcctaaggaaactctaaaggaacacttttttcgggttaatcttcatattgtacttccctaatattttgaagcactccgcaaggtctatagtatgacttccactctttagcgatttaaccaacatatcatcgacgtaaacctccatgttctgcccaatttgattcgcgaacatttcactcaccagtcattgatatgtgaccccagcattcttcaacccaaatggcatggccttatagcaataaagtcccattttagttacaaagcatgtatgttcctcatctgcgacatgcatttttatcttgttatacccagagtatgcatccatgaatgacataagctcatgccaagctgtctcatccaccaactggtaaatccttaccagtgataagcattcctttgggcacgccttattcagatcagagaaatacatacaagctctccaagttctattgggttttgggacgagaacaggattggctatccacgatggataaaacacctcgcgtataaagtcgttgaccaacaacttatccacttcctatttgagtgccctttgtctctcaaaatccaagggcctcctcttctacctctttactgggtagttttgatcgacatttaattgatggtagataatcttagggtcaatccttatcatatctccatggctccaggcgaactaatcctggtttgccctgaaaaaacttattagctgctatttcaattgttcatccaggttcttcccaatgtacacacacgttgtggggttttctagatctagaacaacctcttccagctcctcaattggtttcaataaatttctttcatcttgaatctgaaggtcaagatcttcatccttcttttcaccttcttcagctaagactgccattagctggtgactagcttttttgtgctgcagctctatgagatagcatttgcgagccagcatttgatcacctcgcactactaacacacccagtagtgtttaaaacttcagggataagtgcttaatcaaactaactacccctagtctaattaatgctagtcgacccagaagtatattgtaagccgatggtaggtcgacagccaaaaagtcttgcattattgtggtagataaaggtgattcgcccaaagttaatgggatctcaattattccttgactggcaacactgtcaccagtaaatccgtaaagatttactatgcaaggtcttaatttggctttttcaagccacatcttctttagtgtttcctataaaggatgttcattgaacttccgttgtccaccaacaccctttttactctcttattggcgagttagatggtgattaacaatgggtcgacgtgaggatatctcacctctttttcatcttcctttgaaaatataatcggaggttcttcagcctttactttcttggaagattctggagcaaaggaagactgcttgttcttcacttccttcacgtacctcttttgggaattattgctctctcctgcaatatgtggtgctcctgagataaccatgatatcctctccttcaataggaggaggttgtaatccttggttttgcctaggttgttgggcagatattaggctggttatgtccattgcccctgtcttttcacatattgcttgaagtggcctcgtgcgattagactctctatctcatccttcaagtgacgacacacgtctatcatatgcccaatgtctttgtgatacttgcagtatctggttcgatttctgtgatgcctcatgtgcctcataggcccaggtttactaaatgcgaccttgtgctcatgcacgagatagatgttttcctgagtttcattaggctcagtataagcggtttagatgggcaagtacttgtcgtgcttctttttctttttcttgtctttagctgatcccttagagtcctctttcctctttgaagggttaccagcttgggtcgagacagtacttgttgagacgttactggatttggctcttgaataaacacctgagccctttcatttaactcgctgatgcttttgattggatgaccttgtaagtcatcccatagttcacctgcagtagtggagacattagtaggatccctacctgaaaggtagtaagctgggtactatcatccaaatttctcactctcacagcagccgtgctaaaatgacttaagtatgccttaagtgtctcactaggctgttgcttgatgttgataagtggggacgcttcgggtcgcctatcccttgcagcctggaactattttttgaagtccttaaccaattgttcccaggaagtaattgaatgatgggtaaatttttttaacctactgctgcctcctccaactagtgaattaggaaactaaataaaacgcagattgtttttaacattggtggctcgcattatagttctgaaattattgaaatgcaagaccagatatgtggtcccatcatacgatgagacgtgagggtttttgaatccctgggggaatggagtattcatgatgtctcgatggaaggcctcgagttcttcatccgagtcatatccaaactgcttcccttgttgcccgacttaacagctcctgaacttatcccccaattcatctattcgtaattggataggatcctcttgctttggatcgagttgttggcaaagatcaggttttttcttgttcaagtgatcacgaagatccagttggttataattgctagcggacctcgtcctactcacggactttgtcctactcatggacctcgtcctttagtaactttcagttttactcgggcatgtgctttctcgatcattgttgcaacgagtactttctcctcttcccattgattgactatgagttctcgtgcaccccgagctaatgcttgcctcttcacgtcccgtccttctcccttgggtatgatttgttgtgtgccccctgctagggtttatacgtgcctctttcctgttggtttgagtcccaggatttccctcgttccaaaaagggattttctgttcattggtttttggtcgctttgtgttctcatttctatgagaagacgtgggctgatcatttggttgttcgttttcagggggacccttagttttcccagattgttcttcctgagcgttctgaaggtgctcctgagttgtctcttatctccttgttcatgagccacgaggtctgcctcgtggtcttcttacccaaggatcaggttgatttggtgcattattctccagtgatgccctgggtgcggttgcctcattttccaactcagcgttccgtcaatttgcctccttcaggcaacatctgagatgacagttttctaactctacgattggcacgtatcttgtaggatcgtaggctccatcctcaccagtcagccttggttcagcaccaccaacattcatttcaggttcttcataccttgtttctggatgctgagtcctccttgaacgtgtggtctgtgtacttggaccaccgtcaggtttggtcttcctagaacgagtggtctgtgtagtgggaccaacttcaggttgggtcctccttgaacgagtggtccatgtagatcgtgagatgggaggcctccggaagcccatatattggctcttttccaagacaatgagtggtttctttaggatgagtatcaacgttttctccgttgtttgccatggagaaagtttttttttatatcaggagggttttttctgagcttttttcatgaaggctctcaatgaaagcaccaaacatttaacgtagattttcgttaactagattaaagcctatatcgtgatggacttgcactaaacataataacagtaaaagaaaaataaagaatacaaagcttttttacgttgttttgtagttaaaattcttcatagtccacgagtctatcttattagatatttctcatacaaactacagcttttttctcatatcaatttttcgtccctttttcgatgtatccccctcctatttatagttacataggagggcagttaattacatatcagactgatatcttataagaataatctcctgaaattgtgggatttgattacgtcccacgtaaaataaatgcggtnnnnatttgaaaatcacacagctgtgatggatctgtttttaccgggtcgatgcatacgtgtattaaatacattgtaaggcatatcgttctgtgacatctcgctgggaacatagcaataataaccatggtagcgagctagagcttttcccatgtctttccgaggttgataatgtatatctcgatgcttctgcgattgaagacaaacaatcgcagttcttggtgccaagatgaactttagcagtcaacatcatttgagtgtaggcttctatctaagagagctgacacgaaagagcagtgaatctcaatgagatatctgaagtcgagagtatgccttcttatagcgagatggatgcctcttcattcgttgttcaagttcattcatctgttatgcttagtttgtataacgtacattatacgctaagtgttaaaacagtcaagatgcctcgtttacttttcttcatacgtagtgaggatggcgcctcgttttgtacttatgacgtagaatggtttctcgtcaacgcgcgagacaatagtttgtatattcttatctcgcttaagactttatagttagcaagttgtaaatatgctctatcagctctccatttaatgagttattccattttaatatcttcaaatgtaattaatattatatttgttgattcgtattctaccaagttaacacgtgtccttctcttaagtgccagccgaatttcaggtataacatatacatattttaatagtgatatatataattctgttaacatgatatatatatattttgagaattaatttagtattattataattttcttgtggtatgtaattttattagtacggtatattaatttttagtgatgtgatatatcaaatcttgttgtatatatttaattatctaatatatttattcgtttttgttacaatataataatatgcaatactaaaaaaatttatgtaactcaatttagttattattatatatgagtgcactcttaatgggtattacccatgaatgagtagtattagaaaaatttaaatttttatacttaatttttttatttaattaaaaaaaattctcatttttatattatatgggctgggattatgcaatcggttgaaaaaaagaaaattaaaaagaaagttttttaacaagaaaataaataaaaaaaatgttaatatgacttaagtattttgtatataaatatttttttgatataatttaaaaagaggtattttttaattttttttttaattaagtagctaaattaagcataaaaattaaaatttatcttttattatttattatgggattaaaatctaatgttataatatttttaaaattaatttttatagttaaatttaaatgttatttataatacctggagatatatagatttggtataataatttcaagggttatttgcggcaaaacccgctacagtagggaagtttttgcaactaaccccca

SEQ ID NO: 23836 - DNA, 2275 bp, Cannabis sativa
ctcatttgcaccctaccaaactaacttatgagcacatcttactattttaaaaaataaatttaaattaattttaaaaaattactttttatatatttttaaaattttattttacacattttatattaatttctataattattataatttttcttatacttattttaaatcatgtataattttttatattttttcctatataattcatataatttctttgacatatatttaaagtatattttatttttatttaatatgtacattttaaataatgtaagaagaaagaaaaaaatagtataagttaaagaatattttatgtatataataagtttttttttataataaagtatgttggtaagtttttcaacttaaaataaaaagacaatttttaatgaattggataaattgttatctaaaacttctaacatgtccaaacacgggatttaataaattagtctgtttaattcaatcttgtgctgcgtatcaaatgggcccaatatcaactattatcttcaaagttttactatcacgtatatacatgtgtacacagtagttatctatttgatatatttaacaatgatattaaactcacacttcaaatttacaaaaaaaaaaaaataaacttaaaagaattttgccacaaaaaaagtaagagattaaatgtataaaaattaaaacataagccggtttgaccgtcaattactctaaataaaaatataaaaaattattaattacattaatgaagggtaaacaagtaaataaaaaaaatgaaatttattgtggtgtaaaatttaattcatactatattttgtaacaaatttagaataatttttagctcaaatttaaatcatattatatacactaccattagagttcaattttatagacatgaactaaaaaaattcgtttatattatttttaaaatactctattagagatgtagcatatgttaaaatataacaatatgctcaaaagaataaaattaaataataaaatattgtggctaagtagaaataagagtaaaatatgaaaatccagatgaatacgtataaataagagaaaataaagtggctaaaaggaaataaagtaaaatatgaagatcttggctctagctcaataaatataaatacgaacaaataaagtggctaaaatgaaataaagtaaaatataaagatcgaactcaataagtaaataagaaaaaataaagtgggtaaaatgaaataaagtaaaatatgaagatcgagctcaataagtaaataagagaaaaaagtggctaaaatgaaataaagtaaaatatgaagatctacatctgagtcgtttcttaaatttcccctttcttccattgtttggagaaaggagagctatatcttgttcatttctcctaatcttttttctttgtcttcttcttccttagtctactagatctgaggattcagacaaggaatcaatggaggattctctcaagttcctcgttcttgcgcttcttatctcttcttgtgccatccatgttacatctgatggctcagatcaccgctacaaggataatgacgtagtccctctttacgccaacaaggtcggccctttccacaaccccaggtatgatgatttcatattcctcgatctgaattccgatctgacctcttcgcggttcggatctcgtttttatcttttgagcgattttttttcttctgtaaaattcacctgatttttggactctgtgggttagaaactggttcgagattataatggcggagctaaaattgaatttggggaaaaaaaattctttcacttagttttttttttttgcttgcaatgtgcaccgacgttgatgcgaggtagttttggaggtcgaaaggggggtttttcagaacgagtctttagattttgatttatattgagtatatttgattgaaattgtaattgatttattgtttgatatggcattatgctaaattgctaattttgatgtatctgatattattggttcagtgagacgtatcgctacttcgatctgcccttctgttctggaggtttgtgctttactattatttcttttgttactatttatatcttgtgattgtgtttatgtcttcagacttattaattggtaaagattaattcttggatcccttttcgggtcagtgaacaaatgaatataactcttcttgagctgtcttgtcatttgtgtttagtatttgctatggtgttttggtgaatagtatggctgtcgatttaagttcctcaaatttacattagttccttcctattgatgtttata

SEQ ID NO: 23837 - DNA, 4412 bp, Cannabis sativa
agctggtgggtaattacactatccaacttaatgggatgtggtattaccaaaatggcccatacaaacttattttggaccataagaaggaaggaagtgctatcttaaatgataagataatggaatatcattctgaagcacaacaggggagatataacaaggaaagtacagctcgaaaagtgtcttctattgataaaatggcagtgtgcaataagaaaaatcctgtacaagtgatcaacgatttctttgaaggtattttgagaagtgtaaggccaaagaaaaaggaagctttcacggctgctataataaatttctgggcagatatcgaagagcaaatgaaagatccttggaagtcggtactacacaattcgaaagaaacagaatatgcagaaaataataaatcgggaaaagagctgaaaacatatagaaggaaaagaagatcaagaggtatggtgggaaaggaagctattaacaagaaccacgataatttccagttggaggaattgggagatgatgtcgatctaatagaggaggagattggtgaatactcttctgagagtgaagcctccgaagatgactgcgaggactgcctagaagcccctagtgaagaaaatgaagacttcttgtgtgatatcaaagagttatggtgtgagaatgaaattatagcaagcaaggagtgtggggaactaggtggaaaagagttaagtaaagaagaatcttccacagcaccatgggtagagattatggatactatggctgagatgggaatgaatatcattcctaacgagggtgaaggatcagttggtggggcaaaaaagggtacagcaacaagaaaatgcagggagttgaagaagttggcttttaacattaactatgacaaaagctataaaaaatcggggctggataaacaaacataatgaagttactaacttggaatgttagaggaagtggagataaggagaaaagaagggctataaaggcaacaatatgcaaactcaatccggacatagcaattctacaagaagtaaaaaaggaaatggtagacagaaattttgtgggaagtatttggaggtcaagattcaaagcatggatacttatcccatccattgggagatcgggtggcacactattgatatgggacactaggcgtattacagttcttgactctttggtgggagtgttctcgatttcagttttaatcaaagcagaaggaaaagaaccttggtggttctcgggtctttatggtccgtgctcctataaagcaagaaccgagttttgggatgagatggctggcctcagttccctttgtggggagaattggtgccttggaggggattttaacgtagttagaagagttcaagagaagttgaatagtaattcatgcacgaggagtatgaaggtgtttgatgaactagttaaggaattgagattgattgaccctaaactcaccaatggtagattcacgtggtcaaatttcagagaaaaaccaatctgcagcagactcgatagattccttttcactaacaaatggaacatggcttttccttatgtgcgtcaagaaatggcagtcagattggtttccgatcatagcccagtaatattagactcagaaccaccaaaatggggtccttgtccattcagatttgacaatcaatggatggaacacaagtctttctccaagctctttggacaatggtggtcagaggcagaggtggcaggttggcctggtacacaattcatgagcaaactaaagaaggtacaagagaagatcaagacctggagcaaatctacttttggaaacaatcgtatggcaaaaattgagttagaaagaaggctatcggctttagaggagttagaagagagaaatgagtggaatgaaaacttggctgaagaaaggagaaatataaaaagacaatggaaacaactcgcctttgaggaggaaagaagtgtatggctgaagtcaaaatgcaaatgggctaaggaaggagatgcgaactcgagatattttcataatatgctgagtgcaaggaaggcccggaacacaatatcccgaattgagagagaagatggatctgtgattgataaggaagaagagatagtgaaagaactgattggcttctatactaaactttatacctccgaaaggaggaaggggctagatgtggaaggaatcaattgggggaaaatttcgaattggtcagctacagatctagagaaaccttttgaagaagaagaaattaaaagagttgtttttgattgtgaaggcaataaagcaccgggacctgatggctacagtttagcagttttccaatccaattgggatgttgtaaaagatgatttatttaaagttttcaaagcctttcaagaggaaggaagaatcccagggagcattaacgagactttcttatgcttaatcccaaaaaagattgacagttgtaagatcaaggattataggccaataagtcttatcactagtgtttataaaatagtagctaaagttttggctactagacttcgattagtgatggaagacacgatttcagagactcaatcagcttttgtacttggaagacaaatattggattcagtactagtagcaaatgaagcagtagaagagtacagaagcaggaataaaaagggattagtattcaaaattgactttgaaaaggcctatgatagagttgagtgggaattcctcgatttagtactcgaacacaaaggttttggtgagacttggcggaagtggattatgggatgtatctcgtctacttctttctccatttttgttaacggaaaacctaggggaagaatccggggtcttaggggacttaggcaaggtgatcctctttcgcctttcctatttaccttagtggcagatatacttggaagaatgatagacaaagcattagattcaaggaaggtttctggtttcctcatagggaaggagaaagtgcaagttagtcatctacagtatgcatatgacacaatactttttgcggatgatgagatgtcattgagaaatatggttgtggtggtcaatgctttttgctccatctcgggtttgaaagtcaacatgagcaagagtcaattgctaggtatctgcatggaggagtctgtggttgttagttgcgcctcgtctattgggtgtgggataggagaatggccaatgaaatatcttggtatgcctctggggggatccccgaatagaattgatttttggagaccagttttggaaaagtgtgctaaaaggatggatggatggaaatgctccttcctttcgagggggggaagactaactttaatccaatcagttctctcatcattacccatttattatctttccatatttaaagcaccaaaggtggtggtgcattcgattgagaagatgatgagggatcttttctgggaaggaggtgacctctcgggaggggaacatttggttgattggaaggaagtttgtagaccaagaaaggacgggggtttgggaattggcaacttagatatgaggaataagagcctgttgatgaaatggttgtggagattcccgttggaaacagaatcgctctggcatagagttgttaaaagccgttatggaatgtcggagaatctttgggatactagaacgggtgagagaatgacttctcgaggaccttggaaaggaattgcatcattttacggtgaatatttaaacttggtgaccttcaagttgggaaatgggaaacaaattcgtttttgggaagatgtgtggattggacagaatacattacttaattcctacccggagttagccaacctggttagaacaaagaatatgtgcatcaaagatatggcaattgtggaggaaggtggattcagggtggtaaattgggacttcaaattcagaagaaacctattggacagggaagtttcgagtctgatggatctgttacaacaagtggaacatgtgaacttggctgacttatcaattgacagtaggggatggaatccagaatatggtggctctttctcttgtaagtccgctttctcttgcttcacttcagataatagctcaaggaacctagaatggactaaaaccttgtggaagagttgtgtaccagcaaaagtcaaagtgtttggatggttagtattcttgaggaaagcaagtgtgcatgaagtattgcaaaaaagaagaccatacatggcaatctctccgggctggtgtgtgtgttgcaagtctagttacgaatcaattgaacatttattcttagaatgcacatatacgcggaaaatttggtcgttattgttcaaagaattttgcttggattgggtcttacctggcttagtctctgctgtcctaataagcaaaccaatggggaataaaaggaaagttaaattgtggaggactgccattttggcactattatgggcggtgtgga

SEQ ID NO: 23838 - DNA, 2739 bp, Cannabis sativa
  modified_base (1529)..(1530): a, c, t, g, unknown or other
tcacaccccttcttctattgcccctgtccctcaacctatgcttaattattagtacttgactacataataaccaaatagtttctatttatataacttgcatgatcatgagatggttgatattcatcaaatgtacctagttatttaccacggtactaataatttaagatatgtttatttttagtttacctacaactaatatggcattatgtattattaagctatgaaaactataaaaaaaattcaaatctgttttagacattgaaaattaactataatcaatggaatacaaaactaatgatccgttacatttgagagataattgaagatatccttctactgtaccaaaccaaatagacctaaacaaattactacataatatcaaacaatagtaatatactcggttactaattctcgtgttctactaagtatttactttttacataattgaaaggaggaaattgcaatctcacttctaagaaatcaaacaaccagttgacacaagttgaatacctcatcattagaatctattcttcatgatacaagtacaggccgaggccaaaccgagcacatgctctgcagaaagctatctcctctgctgcagcaacgggatccacaatatggctatcactagacgatattgtaccagatgactcccggaatgcctgtatttaagtatgagatgaagttaaatacttgagaaatattattagacattaatgtcatttgagtagtacaagcataatttaaaagcaatcgttcaggcttgtgggctaaacttgtaagtcatagaacaggaacagggttgatgaaaggatcttaacagtgtgtttaacaaatagaaacctagaatgaattaatcgaatcatgtcatcgcatgatccaaagtaataaattgctttagattattatagctgaaatgtatcccaaattcccaatcacataagtgcaaaccaaaacaacccattcctcattgttgaatttttacagtagcatccaaatcaaccaaacacttacttttccaatagccaagagttaaaaggctactggataatcaacaaactaagaaatgcatgtaatgaatacaaactaaataataaagggatatatgaacttcccttaactacatttatctaatcctatttcctttcctatagaaactggaaaataagttacgagtacaagctcaagtaccaactttattgctttttcacaaggataatacctccgtttacattggatcttatgttacaattatcttcaaattattgccaggattgtcttgatgatgtttcaatttgcaattttgtaggtggtttactattctattctgttttgttgataaaagatcttgaaaaaggaaaaggaaagaaagaaatacctctccgtcagatccccttacagtgagacgatacacaacagtgacagagccgttgtcagagaatataacatcacgtatttctccacaccaacctgcaaagccatcatcaaagaaagatgatatcaatttgaaaacacacacacacacacanncacacacatatatatatatattaatataatacaatgacgaaccaggagcatagaagctcaacatcctgtttgcgtggtacctacacaccagaaaacgaaggtgaaattgattagatcaatccatttgaaaatgatatgattagaaggagaagaagaagaagaaacaaagattgcggtggttaccaggggataaagggggtggaagaagcgagagctggaacattagaagtagatggggttttgacgatgatgttatcaggaattcttttgttgaggtccctcaggatctcagccaaaggacgagtaatacaagaagaatttgccggtgagaatgacttatccagtggaaccacgtaatttgaattgggaactccgcttccacccttcttcgcatcgctgctgccactgctgtttcctccgccgccgccgcccgtgctgctgctgctgctgctggtgttgcggctcaaagcgcgaacacaaacaagacctgttttcttccacttctcagaattaaaactagaattaggaatggtcaagagagatcttccctggtttaaattgaacgaagacaaagacaccgatgatggcgatgctgatttatgcatcataggattgctgcaactgctttgcaacgccatttttcttggctcaatttgcttccgatgatcacccactcacgaacgaaggaagaaagaaagtaaacgcctccttcaaactctgactatctacacctttctctcgattactggtagatgaacctccccatcttcgcttctacttcttatttttatattactttattttactaccatttttggcttttgttttattattaattaatattattcacactactaccaacccaaaaccaaatgtgaatgcaaattattaatatttacttttttttttctttcacaatattagttctttttttatttttggaaaataatgttagttcttttttttcgagcataaaattaaaggtttatataaatgaaaatgatataaataataaatagcagtacacccctgttgcactcccacctaccccctcctaattcctagttccacgttcgtaaattataatcaatggttgtgaatttcagcccagcccaagtaaccgattacccgctcagcccaatattccacctttgtcttttttgactttgactgattggtaggtataggggttgatgcctttcccaaaat

SEQ ID NO: 23839 - DNA, 2116 bp, Cannabis sativa
aaaatggttaccgaacaagcccataattaatcataattaaaaaaaaaaaaaaaaaaaactctcccattaatgaccacgtctccacgataagatttcctattagcacgtcttttatgataacatggcctttaaaaccttgagaagaggatactttttttttatggttttgctaagattatttgaggtaatgattcaatatatgccataatactctgttattaaacaagaacacataataaaagacttggctttggtcaaaaaaaagttgtcttggaccgaccacacatatatatgcggaaaatcatttttacagctcaccgttgaattttgtaacacatgtcagtctggctaaactaaaatcaaaccataaaaataaaagaaagtcccacacgatttggggtagtagttgttagatgctctctctctctcatttgattggtatattggtaccctcttaaaattgaaggcttaataatcttgtcacaattggatcactgactgtgactgacagtattacgtgaagtggggacccttttgaactcaaatgcatagcttaacttggcataaacaaacaaacaaactagctcacagttcattgtcatgaggaacttaagagaagagagcatagtaatatgttagctttcgatgttgggttgtttggtccaattttgagtgattggtcactatgttgatatgatttccatcagagaaaattcacgacaagacgacaaccttaggaactgagcaaaacccttttcaatatattcattcatttgccttcggttttagatatatagtacaaattttttaaatcctttctttttgtttttggatttggctccaaaacaaaagaagtcaaaaaagaccaaaaacaatattgaacaatgaatactaactttgctttgagtctttgacttctcgtattgcttcttcagtggttggtcatatattttttcgagctctctttcggctaatttaagggtaaaaactaaatttgcatgcttatgttttaaatcatagatatataagtcatggacaaattttcttatgacatacttcgacaactttcttttttaacctcaaaacagactaagagtacactagactcgacaatcacttttagcacaagaccaaaaaataaccatgttccctgctactgatgatatcagtttattgtcattttgtgctgctttgcattatcataaaatcttaaatgtgacatcaccatattctattctgtcacattcagtttcaacatgtctatgactatgagggtacttgacttctaattttgttattggattttttcacttttagattgaattgaatgaatggtttgaattttggttgaactaattgtttccaagaaacattgtggaggcccaatcaacatcagcccccaccaaaccaaatataagcaaaaaattacatgcagataattacaaaacatgatgatttaagtattagattctaccaaacattccccagacagtcttattaattaaatctaaccacttcacaacattggaaggaataaaagtcactataaacgaattagaaagaaagaaaaaaaatctagttggcaacatccaagaactagagatgtttaacttagtattaactgttggacaggtgtagttgcatcaaatcgtttgactatgttcttttgattaggttatgattgtcagaaacagctttatccttgatgaaggaaggtgaaacatcttcactttaatagaaagagcttactagtgaatggggcattctccatcagaatgcatgaatttattatctacttaagaaaacttagagataatggaagaaaaatcactcagcacatattactcaaacaacttcttactggctttctacacttgtcctccccggagaagcattaagtccttattaatgattcaaacatctctacttctattaggaaagttattggacctatctcacaaaccaattttgttgggttaagctgaacaacttttctaatatgctatcagagcaggccgagttttgtaatgtttggtgcctctaatattgatttgttcgtagttttttggcatggcccatgctacgcatgaggagccgtattagagtcttacattgg

SEQ ID NO: 23840 - DNA, 3893 bp, Cannabis sativa
  modified_base (3656)..(3658): a, c, t, g, unknown or other
cactctttccctacacgacgctcttccgatcttatttagggcataaaacccaacacaaacttccctagcttgattgaccattttatcaatcttcctgaagcatcaagttttgataaaacttgtcttaatggttgatccgtcaagacttttattggatgtgcttggaaataaggtcgtagttttcgagatgcatgaatcagtcacaaggaaagtttttcaagagggggatacctcgatttttcccccagtaacctcttactgacatagtaaatgaattgttggtgctttccatcttctcgcaccaaggtcgcactgatttcacttttcgagacagctaagtaaaggtataaagtctctccagttattggtttggccaaaaaaggaggtgttgacaaatgtttctttatgcctttaaaagcttcctcgcattcttttgtccattcaaattttttgttgccttgtaaaacattaaagaatggtagacacttatcagttgattttaaaataaatctgcttagtgctgccattcttcctatcaaggcttagaattcttttggcttcgtgagtgatggcatctctattaaggccttaattttttcaggatttgcttcaatgccccttgcattacctatgaaacctagaaacttccttgaggagactccaaaagaacacttctttggattgagcttcatattttactttctaagtatttcaaagcattatgtaaggtcttttgtatggtcttcacactttactggctttaccaacataacattgacatagacttccatgtttcttctaatttgtttttgaacattccattcactagtcgttgatatattgccctagcattcttcaaaccaaaaggcatgactttataacaataaagtcccatgttggttacaaaattgtatgttcttgattagggacatgcattttaatctggttatatccaaaatatgcgtccacgaacgtcatcagctcgtaccctgcagttgcatccgccaactggtcgatccttggcagtggaaaacaatcttttggacatgccttttttaagtctgaaaaatcaatacaagttctccaagtgtcgtttggctccaggacaagaacaggatttgatatccacgaggggtagaaggcctcgcgtatgagatcattgattaataacttatccacttcctctttaagtgccccttgtctctcagaatccaagggtcttcttttctgtctttttgctgtgtaattagggtcgatattaaaatgatggcaaatcactttagggtcaatccctatcatatctaaatggctccaggaaaatttgtcctggtttgccttcagaaaataaaatttgttttgttaactgctattttagtttttcatccatttttttcccaataaacacacatctagtgggattttctgaatctaaaacaacttcttccaattctttaattggctttaactagtttttctcatcttggattttagggtctagattttattctttctttttgccttcttttgttatgaccgccattaattgatggttgcctcttctattttgaagctccacacgatagcattcgcaagccaacaactggtcacctcaaactacaactactcctgttggtgtttggaatttcaaggataggtgtttgattgaactggctgcccctagtctaatcaatgcggggcaacccatcaaaatgttataaacggatggtagatcaacaactaagaaatcttacattaatgttgtagataatggtggctcacttatagttaatgggagttcaatgatgccttgactagcgatactatctccggtgaatccacataagttcaccatgcaaggttttaactttgcattttatagtcccattttcttcagcgtatccctataaaggatgtttacagagcttccattatccaccaacactctttttattcttttgttggcgagttgaactgtaatcactagaggatcgacgtgtggatacctcacgtgttttgtatcttcctcgaatacaattggaggttcttctattttggctttctttagtggtttcggagcaaacactgattgattatttttaacttcaatgacatatcgcttctaggcattactactctctccagcgagatgtggccctcccgagataaccaatatatcttctccctcaatagggggaggttgcattccttggttatctgggttgttgggctgaacaagttagttttgttcatttccttggcgcttcacatattgtccaaaatattcatgagcaatcaagctttctatctcgtcttttagttgtcgacactcttatgttgtatgccctatgtctatatgaaatcaacaaaatctattcgggtcgcgtttatgtctcgcatgcctcattggctcaggtttgcggaatgcaatcctgtgctcacttgcaagacagatgttttttcgagtttcattaagctcggtataaacagtgtaaatcggcagagatttatcgtgcttttttttatttcttcttatttttagatgattctctcgagtcatcttttcttttggtgtttgaaccactttgattgtcagcctttgtcgagatggtacttgctgtggcagtgctgggtttatttcccgagccagtcttcaacaacttaatctaatttcttacttcctcattaagcacaaaaacttgtgctctttcgttgaattcattaatatttctcactggacggccttgtaggttattccacagctcgcccctagctgttgagaggtcagttgtgatccctgcttgaagagcagtaagttgaatactgtcattcaagtttttaactttagcagcgacagtactgaagtgacttaggtaagccttagggactcgtctggttgctgctttatgttagttggggaggatgattcaggttgcctgtctcttgctacctgaaattgtttcttaaaatcattggacatttgttcccaagaagttatcgaatgatgagtgaatttatcgaaccagctacttgtttccctagtcagcgaggcgggcaataaaatacaaagattattcgagacgttgctggctcgcgttatggtactaaagttgtaaaggtgagtgacttggtctaaagtcctatcatactgcaacacgtgagggtttttggatccgtaggggaattcagagttcataatatcaggatggaaagactcgggctcctcgtgcgagtcataaccaggtaacttcccatattccccatcttggtatctcctcaacttatcctctaactcaatgattcgcaattggattggatcctcttgctgtcggttagcattaagctgttggcgtaagtcaagtttattctgatttaggcacttgcgtaaattgggttacctttgattcaaatgttcacgaagatctagttgtcttcgttcatagttgttcacggacctcgtatctaagtaactctcagattgataactcctcctcgtattgctcatactctcttgatcagcataatgtcgaggtctgcttccttctcgcatttgccttcctgatcgactttgcccccgggaccttgaatgtcccgagctagaacatgcctcatattgcacaggccttctccttcgaaaaaggttagatacacgccctctnnntaggtatgtgtatgcctcctccctctcaaatcgagaaggatgatgggggtgtcacaatggtaacccacttattctaggttgagtcccaggatttctctcattattacgagggacttcctgttccctagttctgggttgccttatattctaatttctaggagaagtttctgttgggttttatgcccaaaataaaactccatttcaatgtaatccattttatttaacatcaataaag

SEQ ID NO: 23841 - DNA, 2220 bp, Cannabis sativa
ttgcttgggactacctatgttagcaagaagcatcttgttttggtagcccaccatgatggaactacatggttaagagtccttgacctggggtgatttaatttaggaaattttcccatgaagcgtgcaaaccagaacaaagcacgttagaaatacttagattggtctctagggccaatcatctttccagtaattagatagagtgatgcactcgtgtataggggccattattctttgactataagggtcggcttgaagtaggtaaagagattactaaggtaaagagattacttggattacttataatgatgcggtaataatggaaagtgcttttataattgactggataatcaatatggcatataaggagaccattgaaattctaggaaaattttattcttattaagcaatgatggaaggacatattcacccaggatggggaaaagctaataaattgaggtgcaatttaatggacatgtattcgagtgattaaccaagtataaagatagtgatgattgcaaggaagcaatagtagcatacgaatcagtaaaaccttagtggtaataacgacaaaagaatataagagtcttagatgttaatgaatcaacaccatcaacgtgggactcgctacaagttggagtggtagttcacaccaagggattgtcaataaaataaagaatatacttgaaatatgtatacttttgggtgtgttaataagggaattttaggatttttacctaacactaatacagagctttgagatcaaggaatgttctttgatcaattgttattagctaagaactcagaaaatggatgcaagttaaaatttatggagatggataagattcaagttgacaataagatgaaaattcttcaaccataagtgaacaaaattgatgaggaattgtaagaggataatgaagatggaagttggatttaaataacggacggaccaaaataagaaattcaagtaggaacgacaaagaagcatctaatttttgataacccaccatgcgcttaccttagagtcaagcatacttaacttggggtattctcaagatgagaaatctttcggggagtcatctcgaaaagcatacgagtgaggaccaagtacgctagaaagattcattttaggacgttgaataaatagttgttctaaaaattaccaagaggaaaggatgtgttaataagtaaagatttataaggtatcaagataagcaaatgttaataagtacaaataagaagtgctttaattgaatatctatcaaaacgaatacttaacttgttaataagttaagtcagtagaccagttgaggaggtcccattggagaaacagaaagacgcaattataaactatgtattgtgggatcttatggttttgaccgagtaataatattttgacataccgagttaatatactgtctacccgtgtagacaatttatacaataaatgaggatcaatggaatattagaaatatgttgtgatcataattgataaaagttagattatcttagaataatcatttccactgacgaagtgtttgtctaaaagtgatgattatatgtccattagttaggtactttaataagtgtggtatgagaaaaatgttggacacttgttcactggagtaacacagagatgataaaaggacacgatgaatcaaaaagttccaaggaacttataatattatagagtgagttcaagatatatactcacttcattacactgaattaaagcgtagggatattaaatttcaagtgggagactcagtatctctttgagtatcacctatgaaaggagtgcgtagatttcgaaaaaaaaattgaagattaagccctagatacattgatcctttttagatattggagcggataggccaagtggcataatgattagctttacaacccgtattgtctagggtgcataatgtcttccacatctctatgttgaggaagtatgtgtcagatccaacacgtattttgagttacgatgatattgaacttcagacaacttattttatgaggaagcgacttgaaaaatatagtcaaagatgcaagagttgtatacctaaattatccaagtatatttcgaggacgaaattcttatgaggggatggttgtaatatcgtgataagcctaatggtaaataattagggtttatatttatattatgggttaatcaagtaataagtgagattatgatcctactaatctagttcaaca

SEQ ID NO: 23842 - DNA, 4839 bp, Cannabis sativa
tttgggtagcccctccgatatggggtcctccagagatcatagctactcttccgttgggtcttggtggcaggccaagaattcgctgaggttcccctgggggagtgactggtgccaatgctccgggcgcaccccctggtgctccttggggcgaaggtcctgctgcctgaaccgggttgagatgaggcaagtggttcttaatccactcatatagatggcccaaacgaatcaagttttcgatctcatctttatggtttttgcattcattggtgttgtgtccaatgtcattatgatactcgaaccttttgttgcgatccctgtacagaggaagcggtctccggtagtgcgtatttttgggagtccgtcagttctgtctacttggtgtattggggagtgtacccccttttctaccgcttatcctccgtctggttgcttcctttcgaggacctcttactccgagagccttgaggagggcctgctaggcttgaagtaggagcggagtgagacgggacttttccacttatccccgaaggattcccataatgagaagatgcaggagccaatgcctgattctagttatatcctgggttggcgaaaaattttatgccgctcattagtggagtagctgttggtaaggttcccaggagctgggctccgggtacataccctgctattccggtcgggtagtatcccccataagccactatttggatctcttctaagttgatgtatttttggactcttttttggaagtcatgaaggttggaggctccttcttgctgtaactcgttccagaacagagtccctgcatgaatccttgcttgaagaagcgtaagatgttgtccgtcatcaactttcttagtctttgaggcttcttccttaaacctctttatgaaatttttcagcgtctccgtggggagctgcttgatgttagttaagtcactgacctcaagattgacctttcttgcggcgacaaactggctccggaagctgacttgcagcttgttccagcagtccacagatcctggttccaatttcttgaaccattcctcatcggacccacttaatgttagcgagaagcataaacatttagcgtcattgctgactctcatgaccgtcattactgggttgaaccgtgacaagtgatcgctagggtccgagttccgggtgtaagctgccatttcgggcatcttaaaattttttgggagctccacctccaggatgtgcctggcacatggttccagatcttcacagtcagagtcagagtcatcacctttttgtctccaggagactcgagcaatgtctttccgtagtatggcaagctcagccatgattcgttcattcagcgttcccgtggtgaccgcgggcgcgtgtttcttgattgagttgcagctttggattggttagagtcgggtcggccataccctgcgagagggtatgctgaaggctgaccaacccagagtctggcagctatccatggccaaccagccccagggcctgtccgtccactcttccttgactggctggtggagcttgtacgctgacatggggtagatcacactaattgctagagtttgatggatctaaatgtctcaagtgattgtatttactttttaggttattgttgtcttgggtgtttccacacgttctcgagcctcgctgattaaagattggcctttgattgccacactcccctcagggaaggagtgtactcctttggcgtacaagaggtaatctcgcaggtggctgaccgaccaaaggtttgtagatgggggctgttgttaagcttgagatccctagccagcctccagactgctagctgttggggtttggctgttctcgtcattagaccttcgtggcaaggcctgtcctccttcaggcaagggaaggtctgtcctggttccaaaagaacctagttggttagcttgctgatacaccctccaaaggggaaggtctgtcctggttccaaaagaacctagttggttagcttactgatacaccctccctagtctataaactagtcttccttggagtggaactctgatgagatcctgacctcttccattggttctctgactaaactgctttagaaagtcgttggcttctctattgcagcgatccggacctgcctggtgatatcgaaggatctactcttaatcatccatccatctcaagaattcgcgtctccactaagcgaatacatcacaatcagcaggctagccaattcctaatcctatctttctagcatagtactgcagacgagatccaattgttgttcctaggggctgttccccaagggtacttccttcaatgggaggtttcagtggagggtcctccctttgaggcaagggcctactattcaaatctacagagatgttagtgccactctggtcagctgtagtggccggactcgaggtgcctaccgtggtggaaagattgaccacatcttcagtgttcatgggaattctaattgtggctggaacgtggacatcaggatctgcaatcaaaggatcttgaggaagaccttacgatgtcgatggttcaacctgagttctccttgtgttaaccatggcgtttgatcagatatgatatcaagtcactctgaatgaaagcacacctttaaaagtaggcaaccgacaacagagtcacattaacattaatgctttctacgtgttacacaattagaactagaaagtaaaagaacacaagtatttttatagaggttcgatccccttagttagcaggtaataacctactcctcttttagctgtattgatacctagagataagactattcagattactataggtaggatcctatatagctttcttaagattacaatgtatgaaatagtagacaaatctctaatgagagagatagagccttggaggcgtgtgagagagaggaataaagaaagccctttgggcttgtagaaaaagagaagagtagaatagggtttcaaacttagagctttatggttaaatgagatttagggttttagggttgagttaaggctctttatataggagagcttaaaccctaattagtagataaaataatatatatttacatatttaattaataaatacaaatgactaaattgtcccttaaaagtagatattttcgtagcatcttagtgggctattaaggcccaattcgtagctgtcctcggatgaaggctacgcatcaatgtcatgcaaaggaaaaaattggtcagccatgcacctacaggttgaggtctggccggccgtgttccagccaggatctggtaggtcatgtgtctgccgaaattctacaactcataatattcttgttagccttaccgagaggaggccaaccattggagatggaggtcgacaattggagattgatgccagcctttggatggaggctagcctttgtacaccttttccttgtagaggccagactttcttggtcaaacggacgtttgggcaaaaggaatatgattctttttgaaatcagaaatattgtatatatataattcaaacaaatgtgaatagaattagtagtgaagttagtttaatcttttcccatttacatgtaaggaaaataattacatcacatagtaattttagttaaccaatcaagatctactataccatgttttctccttacaaatttaagttttgagtatataatacatatccataatatataattatgatggttatattagttttcactactataaaaaagactattcccgacggttatattagttttcactactataaaaaagactattcccgacggttaataagagggtaaattatgaaaactgttggaaaatgggaagttttttccatcagtttagcaccgatagaaaaaaaccgttgggatagctattgccaacggtggagaaccgtggccaatgctaaatagaatttttttttttaaaaaaaaacaataaatccgaacaatttatagctgttggaaatagtaaatataccaaacggtttataaccgtgggaaataccacacttataagcattgttgggaaagattcattatatatataatgtatatgttaaaaaattaaaataaccctctcccattcatcgctctcgctcacactctcattcagccccaaaccctattcgaagctcaactgcattcctcccaaacccaaccctctcgacgaccgtcattccaaaatcaaaccctctcttgtcatcccaaacccaacctccattgccggggatttggaggtcgtcccatcctttcacccctattgaggtattttactttcttcttttctttaattattgttatttatccacttcaagtttcaatcttgttaatgaattttcgtagtttattcattttctgtgagctttatattgagattatgatttttttaaaaaatatttgtgcattgatatatatattatatatatgagtgggatgtatacattttatattgctcattgattttgatttgtctatttgattagggttcggatttgtttatttattttaaaataactagaactccatttgtgggtttaagagttttggagcttgttattcattgtatttgctgaatttaagtgattcacattaatttttgaagatgtctccctgatgagcttttttttatatagtatagtttgttgaatctctcccctcacaatgccacaccgtcaccccatcatggtcaggctgttactgcacttggattgctcaaggtttgctaacatgtttgtttttatgtattaactagggaatagatccgcgcttcgcgcggttttaataatttttttaaaattttacatgaaagaaattaatttttagttacgaataaaatctcaattcagtct

SEQ ID NO: 23843 - DNA, 1555 bp, Cannabis sativa
ggaaagtcgtcttactctaagatatttgttaatatttgtgttatgagttgaatagaatcaattcttaacaataaatccttgattaagtgtaccttagttctcttaaacatatggtagtggatcactactataaacctccactaaaatatagtccaatgcttgtctctatatgctctttgagatctttcactcacacactcttactttctgtaagtcacagaacacacactcaacaattagataattttcataactaaacttcacacttttactcatactatataaggtcacagtatctactctctcgttcagtgctacacactaattccaaaacatttatctcacaacatacatataaatatctcctcatatcttttatttgaattggaaagacttaaactgtaacttcactaaaatcactacaaaattagtcaacaacacacctaattaaacaaaagtataaaaacttaggacctatatacacgtgttacaccccaaaattctataaataaaatcttataaaaattaattatgtatatttatctttttgcaaggatgtatatatatcttattcactcttatataatcaattatgtattatcttcattataattaaggtaatatatataatctaattataataataaatcttataatacacttccttaagattagaatatagttactatatattcacgtaagatattgaactttactatcctaattttactcctatcactttaattagattcaaatttagtctatttactccaactcacatgattattgtagcccccaagaaaccttgcataccataagtacccatacttaaggataatatcaccaactgactcttaaatataacccaagtcaatttaaatggctcagttctagtcgtccgataggctagttccgactcattctacctcgataggctagttccgactcattctacctcattgcgctaatgagtcttaaattatatttcaggtcttaactaattaaataattttcttaacggtaaagaataccaaaatctcttattttagcaactaacacaactttatacttattttaaaataaatagcgactataataattttctccactcacactatctatagaaataaattagaataatttttataaaattgttatttcagtaaattttaaatgctattcttaatttgaatattatagtaacactatatcataccctttaataatatattgtactcacatacacttggttggtacctcaaccgtactaatattagtaggatataatttatacactactacgaaaatagtttttcttgacgtttttaaacaatcgtttaaaatatttctatcggtttctataacagtcgcttatacgaccgtcataaaacgggaaaaataggcgatggttaaaaaccgtcactaatgtggatttctcgacggttttaaactgtcaggaatgttaaaaaaaaaaagagaaataaaaaatacagatttttcggttaaaaaaatatgattgtaagaataatgtcctccttattaattttgtattagc

SEQ ID NO: 23844 - DNA, 3024 bp, Cannabis sativa
tatatatatatgacatgtgataaggccacagtccattcaattaacccttgggagacagtgtgtactgttggtgttggagatgagaattttaattattaattaataaatcataaatagaaaattatccataaaaaccaacatcccaaaaacgatgtcgtttattaataaacagtgtgtttttcaatatattggagccaagatccaaattgtcccaaagattaacctatgtacatgaccaattaattaataatagtctataatgtaatttatgtttgtttaatgtatattttaaggcttcaaattaaacaagtttaataaccaatcaataagtactattaattgcatggatgataatttgttaaggtaaatgcaaatttataagaagacaaaagtttacttctaattatcaagattgataatatattagagcttgggcatcagtgataggggttcacgggtcgtatttgtatcgtgtcaagattcaattataataaatatatatgcttgattcgaatatgaccagtttaatagtcgtgtcggaaaataattcctaaacacgactcatatatttataaatgaattgacacgacacaactagtttaatctgttataaacatatcaactaataaaacgtttatgacatattcaacacgtttatgactcatttataacttgttaaaatactaaaataactttaaataggtcattataacaggtcactttcgtgttagcagtatcaatccaaacgcgacttatatatttattaaatgggttagatgatcgtgtcagaccgaacacgacccaaacccatttaaagcaaatccaaaaccctctaactctcgtgtgaattttgagtcgtgttatcgtatttgacccattttgtcagcactacctaaaagtcataccttacaattaattaacaatattctttaaaattaattattttattgtaaattatttaaattctaatacttaattatattaattagtgacacgacaccaaaaaaaaatactagtccctaataatgatatgagagctgggaatatatacttaattgcaaatctactacaagagtgaacgaaactagtcatcttcacttagtttagtttaataaatattatagataatcgctaactaattagaagatgatatatcgtaaaggtgttagatattttagtgtatcataataatgctcacaattaagtgatgaaattaagtattattggtatacccaatactaatactttaaaaggcatagtacctagcacttttctcgatattatactaatgtatcgctaattaatcgcagtgccatctataaaaagtgttgtacatcactaaagatctaatagcaaatgctatataattaattaatgagcggtatactctattattattttaattattattttaaaatacatatatttatatatataactagggatgcacatgcatgggccgaaaattggcggggagtgcgccccccgtccccatccccacttagtttccatcgaggataggacgggaaatcccttaatggggacggggttggggcaggaaatcccctaataaaaaaatagaatttacaataaagatttaaatatataaaaatattaaactacataaaaattacaatattacacattaattattattcaataaattaattattatccaaaacacaactttaaattcacaaaaagaatactaatatacttaaaaaaaaatacaaacatacattataaattacaaaatattattaaaaatatacaataaaataccaaactagtttctgtcgtggtcgggagtgtaattctcgtccctgtttcgtttctcatttagacagagaaaccctgtcctattaaagatgaatccccgaccacaggatcatgtctatcggaaaaatgtgcatccctatatatgacacatatgtcaaggagatctatagctaaaagagtaggtaggggatttatgtatatctttcatgatgcatgcatgccttaaactttggagctatatatatacctctcctatatatagctaagctaggttaattttgaaattattaatattcattactcaatatttatataatacgtaccttggatcttacatcgaagtaatcgttagttaattggtgtttcttttcctcgtttagtgctaaaaaactacttttacagaaatttagactatacccttaatataataataatacgacaacaatatataataatcaactttttcatgacaaaatatattttttttaaaaaaaataaaaaaaaataattaaaattaataaaattatgttctaaaattatgttcatattaccattttgttgtttgtgcattaattaatcaatgactcttacttttctatattttttgggaaagagaatattgctttgttttttttttaatttctttttttaaatatgttatatctttttcaatgtatgtatttaatgtagtaaatactatttttgtttacaagaagaaaacactctttttcacaatactactagagtgacgtcatcaattttgaaattataaaaaaaaaaaaatatttattaaaaattataagacactctttcaacacttttccaagttattctagagaatattcttatctcttaaaaggtagctatattaatatagctagatatatacatatactatggaacacatatatatggttatctgcctcaaaatggagttgtagcaatagtagtatgtatatactttataataatgtacacatatttaatttttagtattattatatttttatattatatgatcaaaagagataatgtttaaactttggtaaacccttttgcttcatttggaaatttttaattaaggtcaatggtgggcaaccttattaggattttattcccaaaaaaaataaattaagactctaaccttacgattgaaagtagggttttaagtaggaaaaaaatgtaaggaaaatgtaagaaaataaaaaataaattcgcatgtttagtatgaaaattaagactaat

SEQ ID NO: 23845 - DNA, 2546 bp, Cannabis sativa
aaagtcaacgcaaagtcaacatacaaaaaccctaacattctaaacttcgtatcaatatatccgatatgatcacccgtaaaaacatcaagctagctagcgttatatttttaaagttgagccaatttgcgtagtgactatatttattctagaacagtagtactgtttttagtctcgactgtagtatgaatatgtcggtgtcatcgttgattgtcgtgactaatgttgtgactgagacggtaggcaaatataccatattttgtgccgacgttaacatgtaaatgccccatatcaccaatattgttgcaaaaattatgccaaaaatgacggtaaaaaactttacaatactacattgtacaagattatcaaatttgaaatattgtgaaataatactactaatgtggaggaacaagatcatatcatcatgatattttttttttttcctattcctactaatattaaaattgaaattggccttattaattcacacaacagattttaagttttattattttgaaattaattttattaataatattttaaaataatctttttttagggaattttaaattaatgtgattaaaagaaaatgattttctaactttcaaatttaaaatctttttatctcaaaaagaaattaaaatctttacttatataggcaaaaagtttaagttggtatttgaatttcgatttaacctgcttaaaaaaataatcaatttaacgtattcagcagttattcaattacattaaaaaaaatcctttcaaaataaaaatcaattaaaaaatacaataaaattataattaatttagcaagtaagactttttctaaaattctattgcgtagcaattaaatctttttgcattgaatttttaaactaaataaaaatatatttttttaaatgattaaaaataaaatcctaattcctttcaaaataaataaataaataaaatcctaataaatctaaaattacaacaactatatatatttagtaatatcaaaatcttaatatatataattatataccacagttgaaagtgaaaaaacaaaactggcatcgatattaagcttctttttcttatttggaaaaaatttatccatagcttagtttttaatttatttttacagtttataatatatatataaaagccatattttgatttctttttttaataaaagctagatttgggtgacataggaacttaacaagctccaaagtttttggagatcaatttatttgagtaacactaacgttgaagatggatcaacgagcacatgattattacaccgcgacatatgccatgacatatgcgcaacaacaacaacaacaacaacaacaacaacaacaacaacggtttcaataccctcctcagcagcaacatttaccacttctcattcccccgcacccgccaatacaacaattcccttaccaagttcatccccacacaccatcacaacatccccacataggtcttccacttgttgctccgcctcatccaccttcaaaccccgagcttcacaagcgaattgataaattggttgagtatgtcgcaaaaaatgggcctacatttgaagacatgatacgagaaaagcaacaatttaatcctgattatgcgtttttgtttggtggcgatggccacggctactatcgttataagctttggctatggacaagaggaacagctttggcgactaattcttttgttggaccattaagttgccaaaacatgccatcatcggttgcatctaagcaatttcttccaaattcggtccatttattaccatgtcaaactattaatgacggtaaaaaagtgccaccatatccttcattcccacctggtctaattccgggaatggtcaaaaagacacaaattggtagtggagtgccctactcttccatgagtccttcggacatcccaactgtcatacctccatcatgtataatacaagaagaactttttgaaagagtgtcgaaattctttaacgatattagacaagttaacacttctcaagaaccccttaaatttgatgctcgagatttcgatgatgataatgagagagattataaaagagaaacttcttcacgtaaagaaggggtttgcattcccctaccaccaaacattagcggtttagggtaaaatttgaaataagcttttttttcattttttttttataaactaataatttgatattgaaagaagagacaatgtgtttctctttctcaatatcatcaccatcaagatcagtagtagaacaagggatatagtcatgtttttgataaactaataattgtcacatgtatttgagatagaacattgctattagttatcatatagtgtctaacactatattgatgtggcacgttgcgattgattagcagttttttatattttttattaaattaaattgtgtgggatccaatattaatttatactaataaactaataataacaatatgccacatgttatggtgtttggcaccataaggtgccccttaacttttctcattaattttacaaaaatcacaaactgattttaatataataacttt

SEQ ID NO: 23846 - DNA, 6627 bp, Cannabis sativa
  modified_base (6250)..(6265): a, c, t, g, unknown or other
ttgcttgatccacgtgtccttgtctggttggtcaacgtacattgggcaaaatcaggggcaacaactatgcagtctgcaagttataaatatatcctattgactctacattcaacgagttatttcattcaatatttattaatataattgtcattatatttgtttgttcatattctctgagattaacacgtgtcaccttctgaagtaccagccgaatttcgggtataacaattgccccttaaaaagtcatttttaatgaaaagtactttttaaatgattacagagggtgtatttgtcataatccatttggaaaaaatacatgccttttattttggcagttttgtggttatgaggcacatcatgagcattaaataatcatcttttccacttctctcttatttctatttgttggatcctttgtatttcaatctaacgaagtccaaacccaatggtataaaactgaaaaaggaaccaccttttcaccatctttaccatttcaaaaaatttcttgagcctttctgcgaaaaactctaccccagttttacgaagctttgcatgccctcactatcactcactttctttctgtgaatctcctcggacttgcttttcgacaagtgttctgaaagatcatcacgccgtttgcttcatccccagttgtagaatcgttcatcgcatcacaacccgatttcaaatagtaagtaacccatcctcctctgcatttttttttacattcctgggtttgatcattatttttatagtctacatttttgccatttcatttggttttagtgatttcggtttaaaattgtctgggtaattttttagggtttaggcaaagtacaggtttttaggtttctcatatttgtaaatttctggtttgataaactttaatccaggaattaggattacctttttttttttttgtaaaaatgtcccaatttggttcaaaagtttatcccagagaatctttagaaatcgagtgtcctaatgaactttccatcccatacaaacccagaacttcaaaacccaagtccaaattagaaataaaagatgcaaaaattagagaccatttaataaaaaccgatcaggatgatattgttagtcaccataggcatttcttacaagaaataacagagggtaaacgttgtttcttgcgagatgctgcttggcctgaacctcccaatttatcagctattactttgactaagcccttgtttttacccagagtcacaattgctttttcgccaggtgacctggacttcaaaattatgtcttccaagcctcgtaaatcaaagactccctaagaccccaaccttaccttcgaggctgaacttatcaagttgagggtacgagccatcagggactatgtaggtagcatcctaaggacttgtggcattgaccaaaaatggaaatgccaggtaagatctgtagcccctggtgagtttagttgttacccactagaacggcttactcgcaaggcactcgagtggactagtggcaaggcaagtacgagtggctcgacagggataggcgcttggagcctcgagcatatcaggggtggaccaattctccccctacgagattactttaaggacttcctttaccatctcagaatcgccccattccaattggttcctatttcttacagaatccttgcaagcttaagggttttgtaaaaaaaaattaggatgagagtgccccactcccttggaaatagtctacctttacttggttaaggcagtccctgcgaggaagaatgttgtaggggcttttattatcttaggactcacacaaacgattgtaagatcattgttgggttgccaaataagaccgctttcaaagaagatttcttctaggcaagtggtctctccccaatcaacacaaccacctttcgtataatatgtaagtaaatatgctccaaacatggttttagattattccatgtccttaattttggcctcactgacttgtaattttactttttttgatagttgtctcgaaaagaccagcccctactcccgagatggccaagcgacgcaggcttctgctaggtcttccattcggtctccgatcagctgagtttctcctgaacgaggccaatctgagatctgttggactactcgccgaaaacaagtatacttgcgattataagtatcccaagtatgcatcatggcagcaggtcccactcccaactgacgaggagactcaagactatgtggctcgggcgcattacctttagaatgcagtccctcaagaagctaaagaaggagcatcctgaggtaatcaatgtggatggtcgcccatagtgtttagggccgagcgtaccactctagtgtctttttgatagttggtacccagaattctacgttcagcttagctgttctaactcctactatgggattgccgagcagtatggtacccaaaataagtaaggttacaacctcttcaagccaagtgcatttttgtttatttgtttttagcaaaccctaaaaaatacttgtacatttttgtttatttgtttttagcaaacctttatttcttttgtcacccaacatcggggtctcgataggatgagacaactggagagcgagctttagaagaccattgggaagcgttaggccgtggctagggaatggaatgaggctcagtcagagatttcatgcctaaacaaagaggctgaggaggtgaagagggctaacaaagctgaacttgaggcacctcagaaggaggccaaggacaacttcgatctgtgccaaaaactctaggaagaactcagtgcagccagcgcaaagctcgagggggttgaggccaacaccaaagaatgatgcaacaccattaccaagcactccatctactgagtttggatggtgaatccagaaatggatttgagtttcctgtgaaaatgaaggaagtccttgcctactacgagcaagtcaagaaggcagaggaggaggctgaggcagcgggagaaaaagaagaagaaccatccaagtctcctactatgtaggcttggtttttagttttttttttactttaggaaaatggccatatggccgagacaatggtttgccctttgtggcccttttttgtaaatacatatttgcatagttggatggccaactttgcttttattttatcttttatttattgcctcatatttttgcatgcgaacttaatatgttggcttacttgtgtttttactcacaatttaaacaattatactttgatcaaatttaacatactttaaggctttccatggctcttattttcctttgatattgtttaagtagttagtaatctactatgtgcgcgggcagttattatctactatactttcgatttgcgagcagttatcagttctgcttcacgtaaacaattataatctatttttagacaaacttaaacatactttaaataattcatctcgtgaatcactttgtatatttttgattgcctgtatgaatagttaagccttctattcacaccttagattaagtatttttttaaggcatcttggtgcctcgttttaatacattcctataaaatgaaagtcgttaaacattcagcttcgcatgtagcttatcgttgtttttatgagttaaatctcatttacaactgctacttttgacttcgcatcgtccatagatgacttcaatcaacgacttaaaaaactttgattttttttaaatggggagtttgcaacatattatgtatttccagataattttcagttgatcatacacatatatatatatgcctcgcaagtaattttaaagaataaaactttgtaattacttggaaaataattcaactttattaataattgaagttcaaactattacatcagaaagagagattacaacattagtttattggtagtagggttgcaaatgcttaacattccactggttctttattagcgagccgttaagccgagctaatttataaaccccagttcccactattgcttcgatcacataaagaccttcctagttagggttaaatactcctgcagatgtatctctcgtgtttgcaaatactcgccttagcaccaaatcaccgacattcaagagccttttcttcactttcttattgaaatatctcgtagctcggtgttgataggctgcattagtaatttgcgactcagtatgtttctcttcaagtagatccaaggacaatttcaagagttcttggttttcttcttgattataaaaatctcgtctgtgggtcgcaatattgacttctactggcagcattgcttccgagccaaatgctaacgagaatggagtatgccttgttgctgttttcttagtcattttgtgagcccaaagtacttatggtagttcatctacacatctgccctttccagcgtccaactttttcttgatagtatccttcaaggttttgttaatagcttctacttgcccattttgcctgaggccttgagactgacgagaagctcttgataattttatttctttcgcagaactcagtggataactcaccatcaaattgagttctattatcagatactatcttgatgggtattccaaatctacaaattatgttcttgacaacaaagttgagaactttcttgtaagttatagaaaccagaggttcagcgtctgtccactttgtgaagaaattgacagccacaactgcgtactttgctcctcctcgccctgtggggaatgccccaatcaaatcgattccccatattgcaatgggtatggcgaggtcatcattcttagttccgttggtggtacacgaggtatatgtgaaaacctttgacacttatcgcattttttgacaaattcgtatgtgtctttatttatagttggccaatagtatccttgtcgaattattttctttgacaagctttgccaacctgcatggtctccacaaaagccttcatggatttctttaatgatttcgcttgcttctgcggggagcacacaccgttggagaggcattgaatagcccattcgacacaatttgccttctattatcgtgtagtgaggcactaattacaagagtttttgtgcctcgtttttgtcagttggaagttgcccgtggagaagatagttgactatgggtgtcatccaggtatgcgagttttctatcatctcaacttcttccttttcacatatacttggctcgtccaacacttccaccagtaccaagttcaattcatcaagttcgttttgcgaggccagttttgccagggcatcggcattagagtttttttctcttggaatttgcttgattttaaaataatcaaacttttccaagttcttccgaaccttctctaggtattttgccatttttaaaccccttgcctgctattcacctagaacttgattgacaattaattgcgaatcactatggcatataagatttttgacctttaacgcttcagctatctttaaaccagcgatcaaggcttcaaactcaacctcgttgtttaaagtgtcaaattgaaatcttaaggcatagtgaaacttaaagccttctggcgaaattagtatcacccctacacctgagccatgttcattggatgctctgtccacgtacaacttccaagtatttcgtgtctcgctgaacaagtagattttcatctagagttatcccttctatcaggaaatctgctaaggcttagcccttgatggatgttcttgggtgataagttatgtcaagctgccccagttcaattgaccattttatcaatcttccagaagcatctagttttgacaaaacttatctcgggggttgatcagttaacacctttattggatgtgcctgaaagtaaggccttaatttgcgagatgcatgaattaggcatagggcaagtttttcaagaggtggatacctcgattctgcccccagtaaccttttactaacatagtaaactggttgctggtgctttccctcttctcgcactattgctgcactaatcgcatttttcgagacaaccaagtaaaggagtaaagtttctccagttatcagttttgccaaaattggaggtgttgacaagtgcctctttatgcttttaaaggcctcctcgcactcatctgtccctcgaacttttttttgcctcgcaatacattgaagaattgtaggcatttattagttgatttcgagatgaatctgttaagagctgccattcttcctgttaaggcctagacttcttttggtttcgttggtgatgacatttctatcaaagccttaattttctcaggatttgcttcaatgnnnnnnnnnnnnnnnngaatcccagaaattttcctgaggagactcaaaggaacacttttttgggttaagtttcatattgtactttctcagtatctcaaagcactctgtgaggtcttttgtgtgatctccactttattgacttcaccaacatatcacgacatagacctccatgtttcttcctatctgtttcgcaaacatttcatttactagtcactaatacgttgccccaacatttttcaatcgaaaaggcatgactttataaaataaagtcttatgttggttacgaagcttgtatgctcttgatcagggacatgcattttaatctggttatatctagaatatgcatccatgaacgtcataagtgttgggttttatgcc

SEQ ID NO: 23847 - DNA, 1835 bp, Cannabis sativa
aaaaaaagaggtaaaaatggtagactttaaaaaagaaagtaaaaataaaagaggacaatataaaaatagtatagagtataatgaaaatttggattgagagcgtaaaagaaagttcacatttattattgaagccagaattaaggctgaaattattgaaacaaaaaaacacggcaagaaaagcagcatacaacaaggaacaattaaacagttacaaaacaagaacaaaaacaatggtagaagagagaaaaattaagggaacaacccagaaaatatataaacctcgatcagtatttcttgaaaaattcataaatatgtccactaatctcatctggtttagcttggttggcaaagtgaggcacatcttgaattataaccacttcttcaagtgagggcacatcttttttgaagccaccattaataaatatgtaatctttcatgccttcgaaatggaggggatggtcttcttccccagctatgaactttgctggaacttccacttttgcatctttccaaggtaacaggagcttccatgatctgcatgtaaaatcaaaaagtaattagcagagtgaatatatattttggattttaattactaattaattaattatataagaagggatattatattggtacatgtccatagctcgataatagcccaatcctcctgtgaagccactcttgttgaacaactttgtatagcaatcgagaacatcatctgttagccaagagggtaatgttttgggaattggtaaactctcgaatcctccatctttctctagaggtatcattaaaggattcaatccaaaagatgaataaagaatttttagtacatctgcagtgtccattgaaccgaactcgtcttccatctctcctattgcctataccatgtcataatacacatatattaacaaatcaatatttttgttagtttgataatatgtttataattaaattaaatgatatattaaataataaagtgaatattatatttttagatcatgtatagtgtgtaggtattttttgagatattcgtaaatatttcttaatgataataatttggtacctgaaacctacacatgtagtacaagtccccaaagtaatcccgaaacccttgcacaaatgttttttcagggttcatggcaatgtaaggcacactgaggttgaccacagctctgactttcttaggatggaacaagcaaaagctccaagccatgaaagctccccagtcatggcccaccaagaaaatctggttgatattcagagccttcataagatcaacaatgtcatcggtgatgttctcaacattgtaagaatctggatcttcaggcacttgaatttcagttttgccatagccccggagatctggggctatgcaatagtaacccttggaactcagatagagcatctggttgacccaggattgccaaacttcagggaagccatggaggaacacgatcgggggatcggactccgacccgactgaggccacattcattttgatgttgtttatctcatatatattttcagtaataccacgatccattttgagggcctacttgtttggcttttctatcaaaaatatttgatgacttttgtggtggtgtgtatgttttatgaagaaaagtgttacttatatagtgtgatctcttcaatatcgatcaaattaattagtctatatattcaaaacttagtttaatgttcatcatttgacatgtataattattatttttaattaaaataatatataattgttgagctggccgggcgccgctcggaagacttttttcatgcatataaatggaaagaaattaaaattaataaataaagacttaaga

SEQ ID NO: 23848 - DNA, 1519 bp, Cannabis sativa
cactattaataatggagataatgaacccgaagtgatgcgtaagattcaaacctagtctaattgcaagcagtttcgctacattaacagaaaattcacccaacacacaagatgaccaagccagccaaaccacacttgtagcatcccgcatcgccccacccaattcgacaaaacccctcccaagaaccactgaagcatcagccataagagcaaatgaatcaggaggtggtggcatccaccgagtgggccctggccaactgggttcgaagggcacaaccccatctgaacagcccaccaaacaggctctttgaattctgacatgtgattatgagctaaatttggaacaatatctaatcttgactgtatatcattaaataatattgagtttcgatcatactaaagtcatcaaagggtatccatcatcaattcaaatgcctcaagagatagcttttcaaagagatagaggagaatttctagaattggaccatttacacaccggtggagcaacgaccatacccccaaccggtgccacactagaattaggctagaacagaaaaataaagcatgttctagagtttcagattcttcatagcaccttgagcaacaaagaggtacctaaactttccgagagataagttatgtagctactggtaacaccaaatagaacatacgccaaacaaaaactttcacctttggtggtatagtaaggttcaatactccattccgccaatgaattacctgagatgagtctgctactccctcatcaaactgaaacaaccacgccagtaaatagccacttttaacattttaaaccccatcctaatcatagagccagtaccaaccatcctccgcctctcgcctcgctaatagaatagataaaattatgttaacatccatgtccaaaaatatttgttgaagcttcctaacatcccatgcaccggatggaagaataaattcactcaccttaagcaatcatcatttaccctcctcgtgattggctaaaaagatctcagacgtgggagccatgggtctttgaacgcccatacttacgttccatctccaatatatctataaagaccacatttaagcaaatccaattcccaaatcaaactcgaccaaagatgagatgaactatcctttttaatggcttataggatagagtaatttggaaaatatttgtgtttcagaattctggcaggtaacgactcttagtatagaagtaatctccatacatgtttagccacaagatcttgattaataagttaaaaatcctaaaacccaagtcttctcattgtgttagggtgacacactgtttcccatttcacccaaagaatctgtcatttatcaccattcgaatcccatcagagttgccttacaatagactttaattcttcataagttgccgcatgaagcttaaagacacttatcatataagttggaatagcttgaagaatagatttaataagtaattctctcccactaacaaaaaataaattctgcttccaccatcgaacacacttcc

SEQ ID NO: 23849 - DNA, 2863 bp, Cannabis sativa
ataaaagaggcaggcaactgggaccacctaccatcgattataatcgagtttctgcgtagtgtgtttacctgacgggattcagaaggactatgtatgttttcactatatcgatactcatgtacagactataacttgaacaagattacaagtacaaggaaagtcatgtgtcccatttcaggctcaggggaaattttaggaaaatggaagagtgatcatagaagcagactatcactcgtgtaagatggactaaaatagtctcatccttctaattttcccattctccatgtaaacaagtcccgtatattttcaaacttagtttgacatgctctttgcaatgataaatatgaaatcatgcatcctcagcaatatggtctaagtgtccatgatgcaaaaatatgtcataaattaactaccgaggaataccagacacaagtaattatttctgaagttgagaaacgttaccacatcaactggtgagccaatacagacagcaaagaaacctgcccccagaccagcgaaaagatgtgtaacaacattgtctgtaaaccctggtagtttcaaaatcgactgcattgaaataatataattcagaaacagaacaaacattgtactaaaaaagacaagagaagacatctacagcaaagaaggtacctccttcacttgatcatagctagctagctcagcagcattaataatagcatttcttgctatattgggtccaattccagtccatagagccccaaagccctcctaaaaatcagaaaacaaattggacaaaaaggtctaattagaaaacaaataactctatatggagacaaactgcccgtttgtgaatgaggctcaaatagccaacctgtctaactatagtggaataagcattcaatgctccagaatagcgtcttggcaccccagggggaagctttccttcagattgaagtctaacttttacaagatcagttggatttgcaactgtaattgccagcgcacctattttgaagatgatcatccacatgacaaggttcaaacaaaagaaaaaaaattacaagagagttcaatgtgatgtatactcacatacagttactttcttattcttagttcggaaaagaaaaaatcaacttctgattgaattggaatataaataccaactatagaaaaaactgtaaaatgcagttaaaaagttcagtgcctgtaaaataatttttttataaacgtccaaatctgctcaccagttgtcaatgcagcaagaattttcttagttaaaggaacatctccaacaaagtcttgtcctacatataaggtcttaacctgtcaagcccacagttcacaggatggaatcagatatcaacaagcatttaaataaataaaagttcataaaattgtgaagagaacatcaaaaacctacaggatcatacaatccaactcttaagcccccatatatacattgacgatgcaacccaggtataattcctttccatagtgctaatagaccttcttccctggcaatggtgccaactgttcctagcagacccttgtactttggtaaggccattccatcaacggctttcttttggagctgaagcctaactttagcagtgtccaagggaatactaacaatctgcatcaagttcaaatatagattgaaaactagaaagggtacgaataacagaagttgtgtgaacaatcaaaacatatgtggaagacagttatgtcaatcagatcttaactggttgttcagattttcagcaaggaactaggctaacattagaattaagattttttcttctttttcaagtttacagatttgcaactagtaaactccaacaacaaatagtcattcaatcagaccaaaatacagttttatcttaaacccttataaaaatgcagattttccaaggccattttccttcaaactgaaaagaactgagtttccatttcctaaagaaaaggtcatttacccatcaaaacttcattagttccaagaccaacaaatttgtaagaactgagatatacataaattaacacacagataatctcacagcaggtactaaaaacaaccccagcttatattcatggtaattcataaccgaattctcatacaacatgcttcaatcaattcacaaaattttgacagcccaaaaatcttattccacacacaagttacggaaactgggttcttcacaaataccagtacataaagaagaaagtcgttgactttgaaaattttcccggaaagcacagagccaaaaacaagagcaagtaggaagtagtagatcaaaagaaaagtaatttgaacaaatgaagagaatgcgatcgcaatttctattgagatgatgaaagttgattacctcggccgtacaagctgcgaaagcgctactggcaaaggttccagcgaaagaaatgttggatttgggaccgtgatcagccaccatttttgaaggagagagaatgaggttgttaaactcacaaggatcaaaaatcaatgaaagaagcagtgagagaggaagaaaatgactagggctgtatatatataggcaaattgagtttcgaacaacttgattctcgggaattggcaccctccaaatcgaaggttgcaaaatttgttctcactttttcttataacaaaaaatggtgaatacgttgtaaaaaaacaatggcaaatttttgtcaaaagagaaaaaaaaatgtgggtttattacttttgaatattgttttcggtagttgagaaatgctaattacagtctcttattacaatttcttagtcaactttcactttcgaaattacatgctgaaatattttttttcagttatagttacagtatgatccctgtaaatttttaagaaattccgaatagtttacagtact

SEQ ID NO: 23850 - DNA, 2118 bp, Cannabis sativa
aaaaaaaacaactattaagagcactcaacaaaactgtgaaatgaccaaaatatccagaatttatgaaaagcaaaacgacaaaaaaagtataaccaaaaaatattttggtttcttcaataaaaacctttacccatcttaccatatatttcttctacactccaagatcatagagacacaaagtgaaagagagaaaaagtttagagagagagaaagagagaaaccaacaaacaaaatgaaagattgtgaactttgtgggctacgagctaggatgtactgtgaatcggatcaggcaagcttatgctgggactgtgatgagaaagttcacggagccaatttcttggtggccaaacactccaggagtctcctctgtcatgtttgcaattttccgactccatggatggcctctggtgccgagcttactcccacggtctctgtctgcgaaagctgcgttgattttcacaacagaaaatttgagcaaggtcgcggtgatgaaagtggtggcggaaatgatgaggatgaggatgaagaagatacagagaacgaaaccgatattagtgatgaagatgattacaatgatggtgtgtttagtctaaacgaagatgaatttgatgaggaaggagagaaccaggtggttccatggtcgttttcatcttcgtcaccaccacctatggcggaatcttcatccagtagcgacgaggataggttttccaattcaaaacgacggctagaaaatgctgatctgcattctgatgtaagtgaaatcatctttcactttgtaatttatttttcccctaaaattttcctgagagccaaacagaagttaattttcttttctcaggctaatgatgaggcgacatcttcagttaggccattgaataaacggccaagattgactggtgaagactacagatcatctgcgagacctcttgctagtgatgctgctcatgatgaagacgatggtcgtgatcgtgatcatgatggtcaatcagagtcaagatcaacggcggtcataacatctatccagaggctccaaaatgatgcgatcacagacgttgaaaattcctccaacacaattttagagatttgcaaactaagcagagatcagaaccgttgatgatttaatggtttcaatcacaattttcctaactttagaaaattcataccttcatcacacattacatagatacggttttgctgcttttcccatcggatatttatttaattaatttttattacatgttgctctcaagattaatttgattaagttttttttttttttgcaattaaatttaatttaaaggaaattaatgttgttcccttggtccgaacattatcatagagttttgaccctgaatattattttgttgcaaaaattcttcataattatataattttttgtaaatatatatttttcagttacattttgctcatattttctaaccaatttgctaatgtgatgatgagttatacatataaatgaggattttgcggatgactcgaacaagaacataatgataaaacacaaaacagagtagatcaattagtgtagaactcaatctacatcaaataatatgaactaaaacaatcaaagataaatggacatagattttacgtggttcgaacacgaataacagaatgttatcctgcttactccacgaccagaaagaaccctttaaggctttgatctttattgattgagaatgttcaccaaagatagaaactgtcaagaacagttcatatatgttcaaatgaagcttcgcttaaattacaattagatactcatttctctctttctcactcaatttttgttttttgtcaatttatctctattcccccgcaatagcttgatctggatctctgttgttgaaggtcaaaatttgagggccccttttctaggtcttggacagtgttggtgacataactgtcatagcagaatgttagttaattctgttatgacatgtccaagctgttaagtggtttttatccaaaagtgaggaaaattcaaatgtgtagccaaacataaaaaatcatacacctttggctttatatttgagttacaagcaccttgttgagaaagagttgttctggtcttgaaaaactcagcagtcaagtatgctt

SEQ ID NO: 23851 - DNA, 6139 bp, Cannabis sativa
ctcttcggttgggacaagacaacagaggcagtgggattatcatatgttaaaaaagatgatagaacacttttggactcaaatgtaactatgcacacacactatcttctatataagaattttaaattaagatgtgtaccacttttttacacacttaatattgatgataattgtagaagttactcatagtaacaagtaactctccatatgttacaaaataatcacaactaatatatattatcatatattgcatattattaatttattacacatatttaatttatatattatattattttaggggtgttcacggattggtttgatccgtatttttaatttttttaaaccaaacaagtattagagttttttaaaaattttaaacaaaatcagacaaattaaatgaaaccaaaccactttcgttcgaaccataatttgtatttcgtagttgttctatttttttttcgacaataatttttcattttttttggtttttttacttttaataagtttataatacataaataataataaaaaattattatcatataacaatataaactcattatcaatattttacctaaagttgttcctaaatatcaacatttcgtctacacaaaaatattagttatatatataataattattcggattgatttggtttgaactgctacttaaacttttaaaaccgcgacctaaccagagaatttaaaacgatatttggattgatcaaatcattcacactagaatcatttagtccagtctcaaatagtttggtccaaattagttgaaatttggaaccacagattgcatattatataaatattcctatttataaataatataacatatactactagcaaaacagtatagattggatttgatggagattatatacaaattgaaaagtgaaatatgattacgaggagattgacaataattataaaatgttaatgctaaccattgatattaaatatatatgattatgttatgctaatgtattttagtgataaacaaaaacatgccaaaaaagaaaaataaaataaaaaagttagctaagtgtgaccaagaccagcaaccatgattattattattaattgtaaataaaataagttgatgtggtgttgtgttgtaatgagagctcgtggaagtcgtgtgagttggggatcatagttattagggtgggtcttaccactcttgatttgtaccatcacatcatatgtatctcgtgcttccactttcttcattcctttctctaatttatacctctcttcccttccccccctccacctccctcccgccttctcatttcaactaatattatacttttctatatttcttcctatccgccatggccaggactaccgtcgagctcgatttcttcggcatcgagagggatcagtcctcttccatatctcagttccagaagtttctccatcgccaacgaagctttcgaggtcactcactatctcctcctctcttcatcttcttcaccagttttctctagcccctcttttttttttttttttaactattatttttagaatgatttcaggttttcaaagcgccatttcgaagattaaccctgaggttctgaaatctgtgattgcgaaccggaaattagacattaatggcgttccgtttgaagactcgaagaaatcgttttcggttccttctagccccaaatcggataagacactatttcctgttttgcctgtttttgtgcctaacgcttccaggtattcattcgaccgttcattttctttaaagtctgttatatctattgttcaaacgattaaaaagtgaatgatcctttaacagggcaacttctgagaaccttcctgaaacaactccattaactattttctataacggaagcgtctctgttttcgatgttcctcgagataaggttagtctattttgtatacaagttaactttcgcaaatattcaagatttgaatttatttgtagaacaattcattgattagaatttaataaaacaaaataaaaatgactgaataggctgagaacattctaaagattgccatagaaggaagcaacaatgttattgaatcaaccacagttgatccgaatccaacaccacctctttcaaacgaccagacacacctacttgatcctctcaatggaggtaaaacgattatcattttcacaaattcatatcaatcctaaaattaatatatttttgaatatttatttatttaatggtttacagatctgccgattgcacgtcggaaatcgttgcagagatttttggaaaaacgcaaagaaaggtatgcatcccctcatttatagtaaaatattttcctcgttttttttcctcagggaaataaataggaagaatggtgtaatgttttctaattaccattttaaactgaattatttatttttttttaaaaaaaaattataattatagaatgtagttagattgcgtggtagaactgtatgagatcatgatctgatcagtaagcgaggcagacgattttctttttgagattgttggttacctagttacacgattttttagcaaaacgtgtgactatttttcggggtttttactttttatgataatactctatattttattagtttaataatgtagttttctttttcattttttttttataactcttgattaaaaaaaaaaaaaaaactcaagagtgtaagttttaaaagtaacagcatttaaattcgtatacattttctttgaaggttggatttcaaatgatgaataaaacaaaaaaacaatatgataaatatatacgaaatatgaaatttaaatgtcgtatatttttataaaagaaaacatttacagatatattcaagaagaaaatattttcattgacaaatgtttttctcagtgaaatcagattatttgtttgtttttaataaaagagactagaaaacagtacaaaaacatgggtatttatgttaattataaaattgatttaattgaaaaatatgttttatttacaggttaacatcagtatcaccgtacatgtgcgataattaaagcgtcaaaaacgcgttgtgactcatatgacttcttcacaaaggcaaagaaatcgactaaaataccgaaagaagaagctgataaatatatatatatataatatataacataattcaagacattagcatatatatgactatagctaattgtcttgaaataattagttaattatatatatacataaatagtattttactcgttttcttttttaaaggagttgaagcaggttgcctttttcctccttttcatgaaagagtacagtacctacttattactactagaaattatattgaagggaagtagggacttgcgtagtggttcagtttcacgttttagtaatggctcttctaacgtacctttgtttgcttgtaattttttctctctttttttgggcaattaaattgctgtctgtctactcttatttcctatcatatattattttctttatttatttgtaagagtacattattactaattacaggggagcccacacaatcacatgtatattaactactttatactactaatattattaatatatatatatttttttttattttattcaatttcgtggaagcttgcgttcttgtccttttctttggtcgcttctttagctttgaatcctttttccagtgaattaaaaatttgtattatacacattgaaaaaaaaaaaaaattaatatagtcgtatttaaaattattgtaagtcaaaggcaactttggtgagcaaaatcttagccgacggcagaactaaaatcattttattattggacaaaaatgaacgtggaatgaaattgaaaatgtgtcggctattgggtttttaggtaccggaatctagaaggaaggaaggttgggtatgtggtcagctaattcattattcaggtcggctgacttatagagtcaacattaataaaacgtgattaatattgtattactatattaaggtttaaagattcttttcttacctacattcttatttcttaccctttaattactttattctttttactttattctttgtcactaaatcttttactaaatctttttttttttttttaaaaaaaaaaagcatttatagattaaaattaaagttagatttcatgatcattatgggctgcaaaattacaaactataggaataaatgaaaatttacaacttaacataaaaatagagagatgtttataatgacgcacatagttgccaatcccccgactggagcaggttccctttagcgtcttaactatcttagaattactatcaaccatcacaaaagtgtgttgaaatgaaacgacagtctccatgactaacagacaagccgcttttctccgatgaggaggttagagaagttgagcatgtttgtagccacccacaaaatagattcagtgtgatcgctagccaaagtcactacgcacatggatccacatccaattgtaacatcacagttgatcttgacccaatcatttggttaaagggacaagtatgaggccgaacagccttcgaagaggcaaacaaacaagactcataatctgcgtaacaaatagagacagagtcaatacaatgtttaatgttactcagaaagttattgtgtacctttgcattacatactctccaaattatatccatcacaatagaagcatagaggaacaacttctcaataacaacccccttagatgtcagatttcacaaaaattaaccaacccaattccaaacacgagctctagaatccaaaactggcataactcactagagagaaaaccaccaaaggtgaaaagcaaaattgtaatagaggaacagatgttccatcgtctcctctctctcccacaaagaggataagagacctcctcaatatgcattctcttagcgagaagggcaaggacacacagagcatttgaaagaatgctccaccaaaagactttgtgacattcctaaactttaaagctccatatttgttccatagagctggggaaacgttgcacaaaggggcacgctctagagcttgaataaggtaggcaaacttagtagaaaataaaccatttgactctttagtccatacccacctatctctaccctgaccacacggcttaccacctttgatgatgttattgatcgtctcctgttcaaaaagggtgtgaagcttagaggtgtcccaatccctgctaggtaatagtaaatttgccattttcttcaaaccctcaggtggatgggtattaggcttagggtagaagtccttaccatatataacccacgagtccaaaataagcttgcaagccccattcttgagaaatttttatttcgcacaatattcttccaaaaccacgaatttgagttttttaaggaacgctccaaaaatggctacccctaagatacttggcccttaacaccttacaacacaacaattgttcttcattaaggagtgcccaaccccacttgaccaacaaagcctaattcatttccaaagacttttagaaactaaggcctccccgggatttgggaagacacaagtgattccaagcatttaaatagataccacgatttcctcgctcacaaccccacaaaaaaattcttggccataccatcaatcttagaggcaagtttcttagaaagcttcgttctctgcagtgtacacaggcaaggcaagccccaaagatttgatcaaagtagctcgtcctgccttgcacaacattttcaacttccatcagtggagttttgaaactaggttatccaagtttggacatgagaactcccatttctttcatgctagccttaagaaaagaagatctaagaatcgtattactacttttgttaaaaatgggcaggttattaatgattatgatcgagtagtagctcattacctcaatcattttagagattacacgggaaagaaaagctctacctcttagccattggaaccttcctacatgaatttttttcctaagcttaactttcagtaaaaattgaggctcattagacctttcgtcatcattatcgatcttttgctttttttgatttctagttttagctactttaaacagttcgttatgaagtgcaaatggttcgtctggtcttagaacataaaacccttgtttcatggatgcaacacaaatttgaatgtca

SEQ ID NO: 23852 - DNA, 6334 bp, Cannabis sativa
  modified_base (6236)..(6241): a, c, t, g, unknown or other
ttaatgatttttttattctaaaaataaccaaaaaaaaaaatatttttcacattttaaaatattcacattaaagagtagattatgcaatgatgtgactagaaattttttttaaagttaaagataagagcgaaaaaaaagaaaagataaaaagataaaaaaatgagaagagtaaactatatattcttacaaaatataaaataaataaataaataaaaataatatttttctttcactttaaataattgaacaaatttttaaaaaagtaaaaaatatggtagtataaatatctcatcaattgttgatgtcatacatgtactttttttataagtaaactgaatttatttaaagcaaagaaactaggtgattgtcacaaggggaccaacctccctcagaatagtcctcttacaacagcgtaaaactctggcacaacgagccaaactgttcgccacagagtttttactccgaggcacaaacacaacactacaacacacaaacttagaaaacaaagataaatattcataaaaaaactggatcagaccccacacataagggagttctttgcaagccaaagtcgagtatgattctattagtactacaccatatcccggttgagaagcaaaattcatagccgaatggatagctaaaagctcagccttcagcacactgactcccttgaaaaattgaagtaaaaccaccgctatctcgtcatcgacatcacactgcaaagccccgatgctagcctccccatcctttatcgaggcatcaaccttgaaatgtatgtcccaaccatctcttagggggtggtcattgccagcctccgaaatatcaatgtgtggcacccacgaatctagcagcagcactgcactaaactccacaactcttttcaaaatcaaagaagatgccttagttacatccggcttttgtcccttaatcgccatctcatttctacagttctagacaacttcaaagagggaggcaacatgcatcataagaccttcgtcgtgacgattgtataaccaaataaagaattcctcgtgatacaactactactgtacctaaactaactgtttagttagttagttagttaaaaaacagttacaactatttctttgtaacaacttttctgttgctttaattcttgtttcctctctgtattctcccctatataaatgaaatcatttcataagactacttagcttttgctagtcttgaattgcaatctcatagattggattctgttagatttttagcatagataagctctttcatggtattagattgcccctgactaccgtctcctatggatccccgtaatcctgaaaatccatctcgttcttcaactcaaacactcgccaccgctgctcaagctccggccaatcctccatgaaatccgttccaaaattcacttcactcttctctcaccgtaaaattggatcgatgaaatttcttagcatgaaaatcacaagttataccaactataattggtcacggtgtcgatgatatacttcttggaggtatttccccacctgaacgattggttaatggccaaaccaatcccgaaatcacaacatgaaagagaaaggattagcttctgcttagttggcttcgatcgtccatgtccgaatctgttcttggctctctagctcaattccaaagctcctactttgcctggcgcgctctggaacagagatacgccagtcaattaaaaacacgtattttatagatcaagtctcaactatctacaattcagaaaggtaatctttccatttctgactaccttaacaaggtaaagattcttgctgattctctttcagttgctggtactcctatggacaaaaatgacttaatcatgcacttgcttaatggattcgaccctgaattcgaccctgttgttgttcatgttactagtcttgttgatgatctttcctttgaatctttcaatctttattactaactcatcggggcagattagaaagacattacactattgctgactccagcaacaagatttcagtaaatcttgctgttggtcctgctagatctgcaactgggacccaaaatcgctacaatacatcaggaagaggatcaaattcactgtataaccaatgtgtccctcccagaaactttggccgaggtgcctccaccacaccaagattaatttgtcaagtttgtcacaaacttgggcaaacggctactgtgtgtcattacaggtttgataaagggtttgttacccgaaaaattggtgattctcgtgctttcctgacagagattgatgactctaaagaacatcagtcttcctcatcctcgatgctccctaactatgctattgatcaagaatggtatgctgataccggtgctacaaattacattgctcttggcatggaaaatcttgaccatgaacaaccctattcttgacatgagtctctcacagttggtaatggtaacaaactcactatctctcatcttggcactcactcaattcctactgtttctcaacctctaaagcttaattctattcttaaagtccttgaaataaagaaaaaccttgttagtgttttaaaactaaccaatgataataatgtttttcttgaattccattccaaatcttgctttgttaaggacaaactcacagggaatgtcctactcaaagggagagttaaaaatggtctctacatgcttccccaacaacccacttcagaatctgatctggagcttcaatgtcacatggccactactatggcttctgcctcagacattactaagttacatgttcctagtttagagtctaagagttttctttcccattgtacttcagctgtttcaccagctgcaacatcttgtaatactattggtattaataaaaatgtttttccagtttgcctatacactagttctgatatgaactctgatgttaatatatggcactccaaactatgtcacccatcacctaaaattttggccaagatcttgtctaaaatcaatatatcacacaacttaaaaactcttagattctgtgaaccatgtaaaatgggaaaaggccataaactaccttattctatgtcaaattctcgagcttctcagccacttgagttgtttcacactaatctttggggcccctcccatattacttcacttgaaggacacaagtattacatcatctttgttgatgatttcagtaggttcacctggatttttcctttcatagtaaaatcccaagctttttccatattcctagagttcaaaaagcttgttgagaaacagtttaatctccccataaaaactgtccaatcagactggggaggtgagtacaggatctttgctaagtttcttactcagcatggaattgcttttcaacacccctgtccccatgaccatgagcaaaatggaggggtcgaaagaaagcatcaacatatcacagaaaccggactcactttgcttgctgaatctggtcttgacttagaatactggtggctagcctttcaacatactgtctttgttatcaacaagcttcctacacctattcctggtgatctctcaccatatgaatgcctctttcacaagcatcttgattacagctttctcaagccttttggatgctcttgctatcctcatttatggccatatcaatctcacaaactagagattcgatcagacaaatgcacatttgtgggatattctatgcagcacaaaggctatttgtgcagaagccaaacagggagagcatatattgctcgaaatgtcatctttaatgagcaagaatttccagcaaaatgtacatcaccacatcaacaggtacaatcctcaccctctacactatttccaacaactacactctttactactcctatggaaaatattttatctaactcaaatcctactattgttgacacacctgctgctggtgctatttctacaagcccaacatctctccctactgatccccagcctgttgaacatccaccagatgcaccaacccgtgagccagtaattccacccatgattgccaccacaaatcctatatctcatgcaccagtaccatcaccagacaccaatcaaaacacaaataccaatcaaactaccccaatcctaacccctggtcagttaccagttagtcaaccacctagaaattcccttccaatgacaacaagatccaaaaatggagtccataaaccaaaggcatacttttccaccaatcaccctttacccgaatctttaaccccaactgaacccaaaacacttaaacaagccttggccgatcctaaatggtttaaagccatgcaagatagcactaaaaaaatggaacatggaccctggttccatatgattcatcaatgactttagtagacaacaaatgggtgcatcggataaagctaaattctgatggttcagtaaataagctcaagtctaggcttgtagcaaaaggctatcttcatactccagggatagatttcacagacacattcagtctggttatcaaaccagcaacaattcgattgctactcaccattgctgtaacaaaaaattggcccataaaccagcatgatgtctcgaatgcattcttaaatggctcactccaagaaactgtgtacatgcctcagccccctggctttatagatgctgagaaaccagctcatgtatgcaaacttcacaaagccttgtctggtctaaagcaagcaccacgtgcttggaatgatacactgaaacagacattatttaaaaagatttttctgcatctcgatcagatacatctttgtttatccgaggctctgcaaatgacttagttatgcttctcgtatatgtagatgatatcataatcacagggccaaacaacacaatcatcaacagtcttattgatgaattgaatcaagttttttccatcaataatcttggaccattacactattttttaggggtggaaattgctcgaaatgccactggaatgtacttgtcacagaccaaatatgtctctgacttgctggtcaaactccatatggagggtgctaagccttctccaaatcccacaagctctacacacgaactatcactatccgagggagaaccacttatgtatcaaacactgtacataagcacattgggggccttacaatacttgactttaactaggccagatgttgcattcattatcaacaagttaagtcaattcattcaagctccaacgacagtccattgggaggcatgtaaaaggttattcaggtaccttaaaggcacaattcatgagggacttctcatcaaaccagcaccacaactctgtctttaagcatactcagatgcagattgggcaagttgcccagatgaccgacgatccacaggtggctaagtaattttatttaaggtaaacctagtgtgttggtctgcaaaaaagcaatctgttgttgctagatcgagtacagaaagtgaatttagggccctcacaaacgcagcagcagaattaaggtggctctgctctgttctaagtgaactcaaagtccctcttcccacaacaccaatgatctgggtcgacaactttcacgctcttccctaactgcaaatcctatctttcaagctctatcaaagcatatcgaaatggacctacacttcatttgagaccaaatcttagcaaaacaggtcgaagttcgatatgttccctcctgtgaccaaactgcagatattctaacgaagccattgtccactgatcgatttcatcatctcaaacaaaagcttcaagtgtgtccaaacccctttcgcttgaggggggatgatacaactactactctacctaaactaactgtttaattagttagttagttaaaaacagttacaactgtttctttgtaacaacttttctgttgctttaattcttgtttcttctctgtattctctcctatataaatgaaatcatttcataagactagttagcttttgctagtcttgaagtgcaatctcatagattggattctgttagatttttagcatagataagctctttcacctcgaaagaaagacttgcaatggcgtcaactcttataccccacgggctgttaaaccacaaacttctggtaaagtgatagtcctcaaagagatgagtaaccgtttccaactcctcccacacaaccagcattgttgatccattctaggcgagaaacatcgccattggagcggtaagcatcaagatagtatcttccaaattagcagagtttgtctaggatggattctctgttgggttttataccctaaannnnnntccatttcaatgtaatctttattattcaactatcaataaagagacagaagtattttcatgtgtgatttggttcatgttatcatttatatgttt

SEQ ID NO: 23853 - DNA, 1911 bp, Cannabis sativa
  modified_base (1066)..(1070): a, c, t, g, unknown or other
  modified_base (1693)..(1700): a, c, t, g, unknown or other
acttgtcctggtaaaatatatccaacagagtgatattgaaaatggattgagattcaatggttgagatgctcaattatgacctcagatgatgatcgtgaatgttcggagaacgaatcacgtaggttggattgctttcgggttagttatgaaaaaaaattgcccttcagcttgggagcaatttttcaacttgaaaacttaagaattgagatatgggtgttaggtgtgcatagaaagatcttaaaattatattttcaatgcacttagaatcacattaattggagcaatattgagcaatttatggccagtttactgaagctagttcaacacccaaagatcaggttaatcatcatgtgattgagaagttattagacgtcaacctgggcgccaattacttggaatagtgtgttgaagtcatattttatgaagtataagtgatatgtttgcatcacttagctaatttcttagctttgtgaagttcttcaacagttcttggagatttttctctttcacggaattgggtaattcgtgacttttcgatttgcgaataatttttcgatatttcactttttcaaagaaaaagtgaaatatcaatgtgtgaatttgactttctaatgtcgtagatctcatttattatagaaaaatagccagatgctcaaaatggaactgaaatcagataagcaaaatcaaacgcgtcatgcaatacgttaacctgggcgctaggtgcttattctcaggccttttcgagtgtcgttttggtacttccatgatatttgaatcttctagtgagggaccttcccctattttggaccaagataagaggaatgcctagaacaaattttcatctaagtaacaaaaccatgcccactaggttaattgtcaatttgggcactgggaccagtgcctaggtcaacctgggccctggtcaagtcttttggcccccaaattgtctcgtttgctccttgagaacacttgtttctttgttgttgatgaaaacggagagaattccaggaagactttgttgggttttgtgccctaaataaaactcaattcaatataatcagatttnnnnnttaataaagattagaaatcattttatattgcataattcacatgatttatttcatgattatgtttaatgtataaattctattaagttcagatcgtatatatgtattggttcatgattatagtgtcgtcaacacagtagaatataatcatgattacatgttcaaaagtttaagtcccatgatttgtcagtaaacttgatttagactaacatgataattgccaataaggtatgcttacacctcggatttagactaacatgataattgccaataaggtatgcttacaccttggataagtgttatgtcctttctagggtattggcgaagtttacaagtatcagatgtatagagtatacatttgattggaccaatgttgatcttagataagatatcataaacttactgttatatctttatgttcttcaagttgttcatgaaagttaacacattgttctggtagatacttaatcttgagaatatggtagttcaattgagtgggagcgctaatcataaatatagaatctatagtttttataattatttagaagtgaaatgatgatttccttcgagcttgactggaaagaaataaattattgagatcatattttagtaattatattagtttnnnnnnnnatcatttataggtagctaagttttttatggataaataacattgaagggtagaacggtaaatttaacccgtttaaggtagatcatctctagaggattttttactattagattgtaaagataatcataatgtatctatatcttcgtacatatagtgttttatatcattgagtgtgcgattccaaatctatggtggtgcaaggcaaaattaata

SEQ ID NO: 23854 - DNA, 3115 bp, Cannabis sativa
tctctctctctctctcttggaaagaccggcgttggtagcttttgagacaaactcaggtatagcttcactatctctctctctctctctttgtgacggtctctctttatctatctccctcgatgatgttctctttctctctctttctcccttttctctgtagatcttcaacggagaggcttgctttggggttcgcggagttggccggagtttgggttacagaagcagttggaggggagatcgggcttcactgtcgatctcaaaggctttactgtcggccactatgagcggctcccgatttaggtggtgccagatctgaaggataacgaggaagacgacgtcgtttggctgaggccgattttgcgcatcgaagctttggggatgaattgaagggaaaggatatgtgttgagagaggacagggtaggccatggccggaccattctcgacgaccatcgcctttttttgggtttatccgattgacactgaaaacgggatcgacatgtattattatatgttttttttgtttttctaaaaattaataatgtaaatatatacactgatatagtataggatttttctgtaaaatatttttacttttttctatagtcacttttgacaataatttttcttttcaataataattgtaattatcttttttatctgaataataattgtaaatatcaatatatgtttttcaaggagaatgagaagtatttattattatttttcattaattattatcatttttcagttccatataccaaattggcttttgtttcctttctagttatcaatttccaattataaaaatataattaattaaattatcattataatataattggaatttccaaaaatattaatcaaaataaaaaaaaaagaaaagaaaaaaaagatacagtgacactccatgcgtgttgctgttacctttttaacctgactcaatacacttatagtgacgcgcagaaagtgaatgtaaaagggttcagtgacacgtgtgaagtgtcactaaaaaatatcttttgagtcagcctcattagtgacgcgcgttgaagtgtcactaaatagttttaaagttactcaatgtgtgtcactaaaacccatttttctagtagtgggtcttcgtcttcatgtggtggagtcagattgcttagccttggtttcagctctcccaaagcgtttttccttttgtaatgaactaggttccttattggatgatattgctagtttgctttccagttttgatgaggcatccctaattcatgtttgacgtccagccaaaaatgctgctcatgaattacctatgaatgcacttagggtggatgatgaattggctttgattaaggattttccttctattctcattgatgtattaaactctgattgttgttaacaagattttaatttaaaaaaaaaacgttggttagttttaagctctttctcatgtatttaagttttataattaaaaaatataaaagataaaatatcttaactaactattcttaaatcttgatttatatgtttttaattagtttttgtctaatttagtatattttgattgatttatgtttttttactcaataatttaatttagtgactgaattgttttaatttccatttataaatttccttctataatggtcaatgagtttttttttaagaaatagtgaattacagtgactgacatcaattttggatatagaaataacacatttttttataaatcattgactgttattacaaattaactattttgtacaacctaaaagcaccatgacaatcatgccatagcctttaattttctatacagttcacagagaataaaaccacttttcctttgttttactaaccttctaaggccacactaatacaactctttgctttacattttcttttatacaattcactatactattccaattaggctctttaccttagcatagggcctcgtttctgatcctccatagattgtacactaagctagcaaaacaatcagccatgatctttttcttaaacttacctgcctttgatctttgtatcattctgatgacacgggtaagtgtagtatcaattgttttccatcccatccaagtagcaatctcatcaaaacaccctctaattttgctgcaattaaagaacatgtgttcatgtttttcatcgtgcatgttgcagagaacacaacaaacattttcactgattccaaacttgtataacctgtcttttttcctcaatcttccctgcacagcaatccacaaaataaagcaatgcttgggggtattaaacctcccccaaacttgctcactccacctttgcttttgcagaacaggacacaacagtttgtagccatatgctatttttctgttacaaaactgtgtgcatcaataagaggccaaatctagttttttagagctacaagctgcctccaataccagctaccttgagtagtgatattgtagctccaccagatctcttccttgatatagacactatgtatccactatacccacatgttttcctctttgttagccactgcccatatgtatttgatcattgcagcttggttccattctctaacttttttgaatctaatgccccctgctatctttgtttcgcaaacattgtcccatgaaatagctcctgctccttgaaacatggattgtcccttccacaaataagccctacagatagcttcaatttctttaattactttcttaggcaatagcataacttggctccaataggtatggattgttagcaaaacagagtttattagcactgctctgccagcaaaagagatatgcctagaactccaagttcttatgcgtgcaatcatctttacagcaagtatgcaacactccttgctagaaatctttttagcacagattggaacacctaggtaagtgaaaggcagcggttgttgagggaatccagatgcatcaagtactctagtaacatcctgtcttggcatgttactacagtacatagaagactttgatgcattaggaaacagtccagatgtttgagagaagaccttcagaccctgaagaagataaattacacttttatagtcaccgttgcagaacaataaaacatcatcaccaaagctgagatggttta

SEQ ID NO: 23855 - DNA, 2351 bp, Cannabis sativa
  modified_base (687)..(696): a, c, t, g, unknown or other
agtaaaaaagattaatgagaattaatcaattattatttattgtaaaataaataataaattttagttaagacaaaattgagaaattaattttgagttttaaaacatggcctacacgtgtagtgctataacccacatgtgtaggttgacatataaaagcccatgaatttatttaagttattttattatttaataaaataaattaaaataaataataattatctttttaattatttaattagatattttattggataagatatttaaaatttaaaaaagttattaaaataaagatataattgaaatcagttatagatattattatatttgaatttaaatttcaaataaagaataataatagtagaggtgtacgtcggttggtttgatcggtttatgctacactttattcaacccaatttaaagattagattacaaaatctaagtgcaatccatttaattaagtaaaataaaatagtaacccgcccaatgaaattgattggattggttgagttaactcgtccaaatcgaccattaatatttttttttataattttttatttttacattcaattattatattttagttgattgtaataatgagacaaatatatatagattgaatcccaagttcaaatcaatcaccataaaaaaaacatattagtttaaactttatattttttaaatagtcannnnnnnnnnatgatatataaatatatataataaaaatatatatttatatatataaaacctcttaatcgggttggttggattagttcgggttgattgggtgtattggcattatttttaacctgcctaatataaagattgagcggtttatatttttgttagatttttttatttgcatttttcgtcgacttatctcggtttagtttgggcagaatattcgggttggatggtttacaaaagtttatgtacaaccctaaataatatatatttattttattagattaatttaaagacttatgtatatatgatatatacataatataatacgaataaataacttttttagggtcattatatatgatataacttagaaagaaaattaaacgaaagaactttcctaaaaccctaaaaagagtcgcacgaacattatctttcgctctatttctacctcacgcatctctctctctctagagattggtgttatctctcatctcaagtcacattgtctcatgagttaaatacacactataacagaaaattcaatcatcatattaatcttataagcccaatcttatcctaagtgttgaggttgatttagaagatcttagtatgaagtcttcatcaagttcatatggcttttggattggatgcttgataatatatacgaaaagaattgagaataccctgttaggcatcaaaaggtagaattgtttttctcatagtttagatttaatttatgtaatcatgttgaaatcttagggattatggttcatattagattcatctaaaatatttttataaccaccgcttctacattctactttgatatggaccataataaccaataaatggtatcaaaaccatctccataattatataaattaaatacaatgttgggtgactatgcatttatatatatatatgttgatatattatgaatggatggatgttttatgcaagatgtgaatcgttaattgatgagtgcacatttcttcactcatccttagtcaattattagatggattagtatttatttttgtatagatttgatgtgttttttccaagtatgtaggtctgtgctaaaaagacaattttatgatagattgagatctttgaacctatttttgacaatgatttcatccttttcttgaagagcttatgaaatccaaaatgatagaaattgtttccagctttccaaaacatgttaaataatctgatttggagtccgaacgcgaaagttatgcatgatttattgagcaatgtcgaagcagtaaaatagcaatgaaaaatggcatgtggcgctatagcgcccaaattgctacgctatagcaccgattctgaaaaaaaaaaattgctaaaacaaagcctcgagaagtaccacatggcgctacagccccgggtcttctgcgctatagcgcaacacttatcttttttatgaaaaaaaatcttaattctaatggaattcatctatcttttctaggcctatataaagaaggaggtaaatcaaatttagggacgactggagagataaaaacaagcaactttgagattagaaaacacattgaaaagcaagagagaagagattcaaatcgatcatcatcaactttcatcattagagttcttttcttcttcttcttctttattcttttgattatttatttaattat

SEQ ID NO: 23856 - DNA, 2650 bp, Cannabis sativa
ttttataaaaatactgtatttttgtaaactttttcgtgtgacagtatttttgtaaaagtgactccaaattttagtatttttgtaaatttcctatttttataagtagtatattaatattagttagtgatattatttaaaaattattttgtttaattatatgatgatacttaatgcaccaatatcaataggcaccataatgtcttttaataatattctaaaatttattattttttttttgtttgcctgtgtcattgccactcccactgccacacattaatttcttttatttattattatctttttaatttctgtcttaagatatgggcatttgggaagctaggaagttggagaggaaagtgagtgtgtcattttcttgtcacactttttcgattcaattaattataagaaagtatatgctacctacttacgtatatggctaactgatcggtgacaaacatgcatgaaacaaaaaaagggaaaaaaacaaaaaaaaaaaagttgaaacggtcaagtgcatgtcgtatcctagcttaaagagctcgattaattggtcaactttctaaatcatcctcttatatgatttatacgtatactgtatacatatatatatttatatatgcgtggcattaattgtagcttgcttttcattgtgaactgaacactgtacgtatcttagtactagtagatagtaggaggaatatagagacaaagtattcgtcgaagggatctaaaagaatcttctattttgtgtgtgtgtgcagtatatgctagctagtatgactcagtcaaacgtaatgaaataatgtttttttccctgataacataatgagataatgttaagaattttccttttcattcgattatttatgaagagttcacattcggtatacgtatgtgagtcaagacaattaaacatttgtggaaggatctaaatggatttttgacaaggtcataggtttatttaattttaataattaaattcatcagcatcatcgttcgtaagcacgtaggttgagctatattgttagtaataaattcagaggctaacttactgtatatacaatgagtaacaaactcaaagtaaaaatattacgcgcacacctccttattaatttatacaccagcattcttgtgggcactaacactacttttatactttaatgatatgacgtacgtatcataattgattagcagttctttataatttttatgctgtgggatggccatagcacttcatgggggtgccggcgacatgcatccctctttctctctcttccaacagagcgtcgacagccacgtgaggatgcccttcattactgcctccagattggcattgaaactatcaaagcaggaaagccggtcttggacattgttgaccttgtgctatacatatataaattccctaacctcaacctctttttggtctttattttgggttttcttcttctcaactcatactcaattatttcaatacgaaaaatagttatttttagtcacaacaatataaattttttgtgactaaatgtaatttttagtcacaacaaaaagttacttgtgaataaaacatagtatttaaatacaagttgtcactaatttagttttagtcacaacaaatattgtgactagaaacacatttagtcataacaaaattgtaatttttgtgactaatgtacttttagtcacagaccttttaatcacaacataagaaagataatttataattagtcgcaatttttttacttttaatcacaaaaaatattttttgtagtgcttccccaattttcaaatttagactatgctttgatttggtccttttatataggcataccatggtataattcctttaaaagtattagatggtaaaaagggatctttcagtatgtttaatatatactctcaaaattgagacctcttatctccttaagaatatgatctatgtacgtaggttcatgaataggaaaacaattcacactttaatattgctagtagaggctttgttctaacttgcaatggggatgttgaaatggaagcaagtattagggacggaaacacaaagaactgtgaagttgtttctggcctcaaaactgttgttaatgccctgtcggtaataaaatattgttattaattattgatagttgccaattgacacgccactgctattaataattaatactagcgagtcaatagcggtaagaaccgtaggactatgtttcgtcagatgtgtaatctttttaaaggtgctttagacaatgttaaatttaaattgcgttttgattctagtttggaatttcttaagttaggaagaggacttttcttactttggaacaatgatgtgttcttatctttattatctcaatccgtgaactattttgactgttatgtttcgtccactgctaatattttcatttctttctatcttacttgttttcaattacgactctcccaatgagaacatgtcaaggagaaccaactgtcaaaggagttagttaattctgttactgattagttaggactataactgattcttgttgttgttatagtcgattatgattgttatataaaagccatgtactgtagtattcttctcaattaacactactacaaaaactagtttttacgtcggtcaacgctactgttcatatggttgacc

SEQ ID NO: 23857 - DNA, 4922 bp, Cannabis sativa
  modified_base (164)..(168): a, c, t, g, unknown or other
  modified_base (240)..(241): a, c, t, g, unknown or other
acacgaggcggacctacatgtaggtgaggcagagcagtcgcctcccctgaaaaaagaaatcgggaaaaaaatttatatgcaatttagttagttgtgacatatatttgtaacactacaaataattttacttttataaagataaaaaaattatggctaattataannnnncattattgtgttgtgactaaaaaaggtccgtgactaaaaattttagacacaaaaattacaatttgttgtgannaaatgtatttttagtcacaatattcattgtgattaaaactaaattagtcacaacttgtaactaaatactatgttttagtcacaagtaactttttgttgtgactaatagtcttatttagtcacaacaaatctatgttgtaattaaaaagttgtcactaatagcagttttttgtaatgtaataaaatttatagacataatattacttttaggggaatggttaaattagattatacataagatagagatcaatggttgaattctcataaagagtgttattttttttcctttctaactttatttttggccctttaccttacaaaaaaaaaattatgctctccctctttaaaaggtctaccactgttagtattaaaggtttgaagcttttggagtggccattggagcaatctttgaacaaactatgaagaagacctagtgtgaaagcagaaaaataggaagaaaaaaaaaagactctgatatactacgttgagagaaatttgaaaactactataaatgaagagtgatatattgaaattgattctcaatgactgaatgaatctgagcatatatatatatacaagctgacaagttagttagggtagttataagagagaataaatatctatgtacaataacagaaatgtaacaaacttagctataacaagagtatgttatttctttcatcttctttttatttgtgttctttattttttatgttattactttgttgtaacatactcttcatcttcatttaatatttattaaatatatgttggtctttataatttaattgaaatagagttatattttcttgggcatttatttcattaattgtaaataacatctctattcaaagagtaataataataagttcgtaaaacgtatgtaatattatgaatgtattaatatgtataataataatatgtattaacagtaataataatatgtatgtataatctactccaaaaggaccccaactatcaattctaaatctcttgtatgtttcctatttgctttattttgtttggctttgtgtaacaatacattttgacattggaatcttttgttgtggatgaaaaagtcaggcatacatatatatagctagctaaccggttttttatttttcaatttattttgcatgaatattatgggtccaccatatatatcacacagctagctagggttaattactatcttcatgttatcaagggtcctacgtatatggcagataataatttattaggttttactgtttcgacctttttccttccacttcttctcatacataataattatatatgtgcaaagacaaatgatttattcgacatttttagaaaaactatatatatggcctcaatcatctgaaaacaagtgaacccaagcaaaaggaacactgacgaggaccagatctgaagagataatactaatgaatggcttaattaatatgaatatgatcataattatattgtctcccacttctctatggtcttctcatcaatgctctataatattattaattagcataatttttttttatttcagacagtaatattaataaacaatgtaataagtgtttgaaatttatatacagttgttcatcattcataacacaaattggcagtataggcttcgtaataattattacgcgacttttaggtgcttatcttttttataagttttttgaaacaaataatcacccatatccatcatagtacacgtggctatacagtttttttttttcttcataggaaatggattatagttttacagaagagcggttacaaacaacatatgaacaattacaatcaatccaaaagtacaatatatgatatagcccaactctaaaataatttttttcttttaaataaaatcatcaatttattaattacaatctatagtgattacatgactaaaatttagagtgacacgattagcaactaaataggatgctcgagctaagaagtgagcaacactatttacagaacgtctaataaaattgacagaaacatttctcaaatcatttaacatcatcttacaatcagaaatattgtaaaacattgtcccacatggattaaatgtaaaagtattaagccatatataagaacatgggctactctacttattgccaattagttttgagataaaactccataattctcaacatggtataagactatcagtttcaataacaaatttatgagaattttgtatagtttttcaaagagatttatgagaattttgtgcatttttctattaaaaataaaaattgggataggccaatgccctccttaccgtttggcaatgaattcgtagctagctcatcgcctcatccaaatgcatcgccgacaatgtgaaatttgagtaagcgaagtatataacaaaaatgcccaaccaaaattctcataattaacgcaaggtgatcttaagtataacagcattattacataaatacacccaaaagggttaaaaaccatacacccagataaaataagactagaaaactaaaacatgacaccgtgcgctggcgcactaaatgattttaacatttatattatagtgcaagaaggaggctaaactatacgtgcattttgattattaattattaactaaatcatatgttaattttgttttaaaaaaaaaatcatatgttattttttctctgccacgcagtaatcaataaggatatgtactataacaaatatcaaactagaattattagattgataaaataaagagaaaatcattactttcttcctctcttcacaacaaaaatcaagaaaatcgttgtctcctctcagatagacactttcccatctttatttcctatacgaataagtgaaattgaaatcagtaaaattttacccctataaaatccattgatatatgattttctgtctataaaatatattctttttttttttggtactgcattgcctgtgaatagtgcagtacaaaacctgttgtaactattaatcgcagattaatagggaaaaaaacttgttgtcgttaaagaagaaaaaactgacacgtactaaattactaatacgtgcttatcaatcgagcacatttgtcattgttactccttttgacgcacttgttacaaattaatcttatattacaataattaataagacttaaaaaaaattgcagaaataataagcgatccttgttgagttgatgttgctgtatatgcatgtattaaaaaaaaaaaaaacttatttttgtttatgtatcattttgtagtttattttatgaaaaaacataacacccattataaataatgagaaatttgtttgaatgtaaaatatgattttttaaatataccacacaattagaaagagcatatgtatatgtatttttaataaattttcctactaaaaatatttttatatttcagaaaagtatctctaactcaatctcactttaattaagtctcaccgtcttccatctaagaccccgaattaacatactttttaaatatgaatgccaaatttcccatgttaatctcagagattatttcacaaatacataaaaataacaaaaaattataaacaactaaattttaaatatcttttaatatatttttatgttgtatttttattaatttttgttatttttattatttgatattatttggatgttatttttttatgtaattattttattatttttgtattatttttatatgataatgtaaaaatataaaaagaaaatctttgaaagttaaaaaaaatagtaacccctaatcatatggttatactcgtggactttgttaggaaagttgtaaaaggccgagaacgtgggccgccaatctgtgggctatgtagttatttctctttttttcatttttcatttttcttttcttttttaaggaaaaaaaaaaagaatttatcggtcgaggtgggagtgtcactgtgtcaaagtgtggcacattgttttgtttttacattttattttatttgttgattagtttattttattaaagcatctttattttatttttttgatctaaattcaaatatctttgtttatattaattcatgcaattggttggtaaaccaaaattatatgtgagcactgaccagtgaccagttaccactcgacaaatatagatattaatgtaaaaatattataattaagtgttagaaatatgtatgtaatattgcttaaaaataataaaaaaataaacataagcatatgttataagaggtaaagatgaaaataatacaattatataattaattgaaataataatcaaaataaggtaatttcatttttgtatatcatcatattatagtatgtccttaagataattaggaccggtaatggaagattactaacggtgtttgtcttccaagataaaacggtctatgagcatcatcatctgaacatcttgcttctattcccattgaactcgatataaatgcctaaaagataactcacaaatttgattacaaaatgaaaaaactctttaaacaattctaccaagaacaagagaattttgcaaagcttgagaggaacaaagaatttaaaaatcattagaatgatcgtgtctaaaaaaaattataattataatctcattaatcaagtactgatatatttaatcccttgtcgatgtaaaaatgcatctaaaaaaaatattttatcagcacaatacttaaaatctcatttagtgatggtaata

SEQ ID NO: 23858 - DNA, 2143 bp, Cannabis sativa
agatatgtagttagttagtatggttacttagcagccttcttaactattggcttgcattcaatatactgggacaaaaaagggaaatataaccttgctcaatacctcataagttactttatcaattttatcttctttttgttttcttgtactttttttggtcttgatatatatatatccactttttgtaggtttcaagacatggacccttcaataagtggccgaggtgcagagcctgtatatcgtgataggataaaaggtcagaaaacatttaattattagttcattctcctgcatttatacttcgcccatgtctcatttagatattttgcaggggtacgtataacaaaagaggaattcttgaaatcgaaacaaaaagtagaagacaaaccgaaggtacttgccaaagttgatataatatttgactaataggtctttttctcaccaacctttgattatggtaataagaaaagggtgtagatagtatctgctaatttgcagtattacatgtggggctatgatctatctcttcattatcccccatttgtttcggtataactgtctagatgtttttcttatattatagctctgtaagacaactaacagtatagatatcttcaattgactttgcaactttattgtttctctggttttgatggtcatttttttcacatgtcaggagataaagttggaatggggcaaggggttggctcaaaagcgggaggctgaggctaatcttcaagaattagaacttgagaagaataaaccatttgcacggactaggtagattctaaaatacttgctgccaaaagttatttgtggttttgttttgtgttcataatggtcataacatcatctttatttgcagggatgatccagatattgacaaaatgatgaaagaaacattgagatggggcgatccgatgttacatttggtaaaggtaagtcgataatgaagtaactatagactgtttagtgatggaatctaccgatttttaaatgctcactcattaccattttcacacaatgcagaaaaagcaatcccaacctgctctctctaacttcggggataatgaaaagatgaaagaatcagggtttattattcctcaggagatccctaatcatagctggttgaaaagaggattagatgctgcaccaaatcgatatggtataagaccaggaagacattgggatggtgttgatcgtagtaccggttagttgaaaaaataaaataaaatcagtctagtgggaacaatatcatggacttagcagcatttctaatatttcaatttgtgtttgtaggatatgagaaagaactattcaaaaggaagaatgagaaacaagctaccgaaagagaagcttatctttggtctgtagctgatatgtgattgaatcaggcatcatccattggcaatttgtattctttgggggattgtggatgcctttcgttagtgaacagccgaagcttgcctcgaacaatgacgatccagactagaatttccagcaaacaaattggactcatggtcacaagtgttgttttttctagttattttctattggttggaacttaattgggaggcaaaaattacagagtatttctttatcttaccttttaggtgcagtttgtgctctcatatcaaagtaatatgtatactatttggtattagtttcaaaacagaattagagaaaaatgtccctttcaaaattagagaaaaatagccatttttcattcttcctagttcattatattcttttggctattttttcctcctaatttactcttcgttattatatacaaatgtaattatctttcaccttagttgcctaatgtactccataaatttctttaaacaaccatactacttttgactagtgctggaaatacaggctcgactatttgacacagtacgaaattgacacgatcagacatgcaaaagtttgagcttggatacaacacaacacaaaaatgtgtatagacatgacacaacacgaaaagcttaaaaaatgcacgacacttacatacaaattcactaactcgaaaaacacaacacacattaagcttgaaaagtatgtcacgtgacattaaaaaacccctataataataataaatagaataattatcttttttaccccctgtacttatgac

SEQ ID NO: 23859 - DNA, 2084 bp, Cannabis sativa
  modified_base (1876)..(1880): a, c, t, g, unknown or other
gaaataagttaagggtgcatcaatacatccattttaagggggtgcattgtagaatcacccctgtttctatatatttatatatatatataaatcttctggccacttcccacaaattcacatgtacagccaacaactagcaccaaaatataatcttattataaattgatctaaccataatttactcgattcttttctttttcccaatttttttaattaaataacacatgacttatgattattaagaaagttagaattaaaaagccaagttcggtttggattctttctcttattcgaaaatcaaaacaatacccacttatacgtttgttgtttcaatagtaatatatattaattcctcctatattttattattaagtatagtacaatgtatctcatcaataatcaacacaattttcaattttgttttaagcagaaattaatgcataaagaagggaaacttcttagttactactcattttcatattggttacgtgccaaattaaatgtagcttaagatataatttcatattggactaatttctttggattatataagtactaagatggggagagacatattcatctatgtacctttacaacaagaggattgttagtagacacaactaagtaattgaaatcttccataatatgtttcttttaatcaattatattaattataaaacaattaaccaccaatcactacaaaaaaaataaaaaaaaaattatctttagtgcaacgttttagtcacaacataaattttttgtgattaaatataattttgtcacaacaaaaaattacctatgactaaatataatatttagatacaagttgtcaattatttaattttagtcacaacaaatattgtgattaaaaatacatttagtcacaacaaatatgattttttgtgactaataactttagctacggactttttaatcccaacataaaaattattatttataattcgcaacttttttatttatagtcacaagttttgttgtaaataaaagtaagattttttgtaataaatcaaagtacatgtttttcttttattgattgagagaaaaacgattatttacattaataggtaaaacagacaaattagtcatagaggggaattaacaaaaatatgctaaccgtgtcatttataataacaaggaagaaaatcctaacaacaccttcaattaaaagctatatcaataaactaccagcggtaaagcatcaaaggagtctgaagaatactagacttacaactattggatgaacaaatcatatctatcaatgactatcatccaaaaatctttcaataataattaagtaatgacaacatgattattcaaacttgaataaaaggaattagaataatcaaccatcactactaaaaaattgggctatctcgacaccccaatctcggcggttgttcatgtaactgccgagattggtatctatctcgacgattttttataataaccgtcaagaatggtgatattttttaaaaaataaataaaaatatattcttaggggaccaatgtcagcagttcacccgtgaaccgtcgagactggattgtgatatataaaatagagaaaattgtgcaagaaaataaagatgaaacttcaagcctgaattcgactatgttctgtttatcttggaaaaagtcaaaacataacggttctagatctctcttttatcttttcggaatatcttgaatcgtccaattccgagcaatatcgagagagttatggcaaaaatactatcagtcaacgcaacaaaaacctcacctcctcttctaatcctaaccagaataggttttctaatcctaaggagaatagatttttttcttcagcgatttttattttattttatcattttttggctannnnngaagtggacttcaatagttttggtacaaagcaatttaggaagcaattcagagggaaataaacatcaaaatatagaacacgaatttcaaagatcaactgcgatactggaggcattcttcaaagggttttcaacattcttttcttctctattttcttctcttttcttaaattaatatgtgtgattttgctttcataaacatgagta

SEQ ID NO: 23860 - DNA, 4885 bp, Cannabis sativa
attgtcaccatcctcaagttgggtttcaggagtgttgcccccaagtatgggcttcatccccaaaggtggtcaacgaccgtgtcacacccttaggagaccctcgtcattagtgactatttcaaatattcaaatcccatgaaaggctcaaagacaattataaacccacgaaaataggggatattattataaaaatcagacttcaaccacctccgaaaatcaaggaaaacggctgagatagcttcgcattggtcgcgtctcctgaagcgagaagcactgaccctttcccctatataaggggtcatccatgacctgggaaagggatccgcaattttgagcacttaaaaaataaacacttcttcattctttgcaatcatgagtttgttcttgacttttgcaactcagcttaataaaacacaaaaagagtaggctattaccgatatctggagctgaacctctttaaattttggtctcttatctttatatttattgtaaattctggtgtcattaattgcatttattactgaaattttggtttaaatctcatttattatgacaccgcgtcggttggctaaaaatacagtcaatattttggtgctttcattgagagcttaaaccaaaatctggaagttttttaccaaaaaaaatggtgttaacctgaagatctcaagaatgacttgatgaggagacgaacaatgcctaacaatttccatcatcaagcaatctcgctgaaaacaatagagaacgaccctcgcgtccggggaacggtggtgcagccaccacccacaccactgctcagactgctgccagtcatgggaaaactggccaaactgttgccacaaggtagacaattgctgggcgtaccaccaacgccactaccgcagtaggcagtgctactgacggtgccaccaaaaggggtaatactggaaatttttccccacctattgatggcacaggccaagctcaaactagtcgaggccttggcgtctttaggctacgaaatgaaccccatattgatattgagggaattaaccccgagatggattagttacaagatgcaataggccgaatgcaaggccagttccagactgtgcaccaagaacaaactcaagctcgagcggccttgaccgaaagtcttgctaagcaaaggagagaattccaatcttgactggaagatcatgctcgtgaagtgaggagacgccaagacgaccaagaccgtcgcacccaagaggctgccgatttaatacaaagctactttaaccaaaacacttaaggtttgggtactgacgcccacattcaatagatacctcaaacctatccataggaagtccctgcctcgagaaaccagcgggagagggtggtctatggacctaaagagcacccaaggaaccaagaaagggctaggagtcacccctccaacagggttgcccgcaacaataatcgaccactccctgtcgatgaacaagtcctacccggtcattatatgggacgtgatgactcccataatatccgtataaggtggagtagtggaggcaactctaggaacaacaatggtgagcgtggtacaaatggtggaaagacaccccaacatagggagtggcaaccccgcgaccaaccaagaaagggtaatgatcgcccgagaaatagtaagtccaaggggagaagggaagaccctaaagtcaatagtgattattgtccaaactaccctgacggtcatggcgatgatgaagctgaaattcgggccaacaaccaactaaatcctaagctggggggttatcaagccggagggccgtatgcccctaataggcaacaacaacctgagaatcccctcaaaggggtagagatgaccaagtaccacccccgatcgatggaagggatgacattcaaaatgcaggaggaaggccaagaaccaagtcagtttttgaacatgtaggccctcgagggggtagagacctttaggatgccctcaatagaaatagggataatcacagttccaacatagtaaatctacctgagtcgattcaaagaaaccaaacaaatgttggtgttaatgttgcttaaccccaagcagtcataaatctggtgatccaggctcggttggatgagttaacccgatttgtcaaggatcttactacaccgaaactcattgacttagaacaagaaatgaggaaagggtttgctttctcccaaacgatcaatgacctccctattccagcaaaattcaaaatgcctacttgccaagtacacgggtagtgaagatccattgactcatgttgaaaacttcaaaatccaaatggaccctcaagggatcagggatgacctttgatgttgaatcttccttgcaaccctcatagacacggcacaatagtggtttaccaaactaccctagggaggatcacttcttgagacgagttcgaaggtaattctatacccatttttcttcagcctggcagatactggcagaattgggtgacttagtttccatcaagcaaaagcctgatgagccgctaaaagactacatctagcactttatgcgtgaagcctacaaggtaaagaacctaagtgacaacaacaagcgagctgccataatgggggcatcatggtgggaggtcaactatggaaagatacaaggaggaagccaactcattctataaaaggcttccttaacagagctgatgaatttattaaactggaagaggctgagcggaatgccaaaggcctcaacccagctaagggaaacaagaacggagcaaacactagtggccaaggctcctagggttaggggagcaacaataaaagtggctttaacaatggaaagagggccaacaataataatggtggaaataactttattaacaacaaaaagccaaacaaagaatcctcattaatgactatgtcctcctaattgatacaatctttagccacgcgtgacattccccttgtccttgcctatgggtatgataacccatcatcctaccaaatgatgacttaccactgagtacagaatagttgaggtcatcccacctagaatatacaagttagcacgttacgtgccaacacaaagttagtactagtgtcttgccattgaaacggagagcacctacaaaagtactaccaatataagttgtttttcaacaatgaattaggctggttagtgtacccacaaagtgtattttcatagctggtcttcattcccaccaacaaagtttgataatgtaaaggcacaagtttcccacttttgatgtaaaaaggcatgtttgcccattatattcatcaagaaaaaattgcaagttattttttatataacgacgtagcttgtatgatttttattgaatcaaattgcaagcctaactaaggtcaagagtgtatgaaattatagtggcaaactcgtgacaatgacagttcctatgtgaaagccctgattacttaacaagtgatcaagaggtgaaccacttagtcacttgggggcaaccacgcacatacatggactagtaagcataaaacacactcacttaaatagattttacaatattaaaaatttattttcaagttctaaagtgtttatgcgttgctcaatgtcttgaaaaacctatatctggtacatggttaactataaaaaatgcttacgcatagtgtggtacatgctagacaagttaacacatagtagcatatagtaatagagccatataactccaatgtaaaaaagaaggcatacatctgtgacattcatgatgcacaacaaaggaaaattgtatcaagggaacaccttctcatatagacacccccatatatacatacaagtcccaaacaagtgtgcaagaaaccattgcgatcgtcccccacaatttcatccaaaggtaatacaacctcctattcgagacaatgaaaggctcatcctaacaataaattaatagcctttgcctaaacgctccataccctgaccctcaactctgaccctcaactcaaaaaaaagagctcgaagggggttacagtcgtattatgatctcgaaggggggtcacggtcgtattttggtctacaaggggggtcacagttgtattatgatcttgaaggggggtcacgtttgtatttttgtctcgaaggggggtaacaatcgtattttagtcttgaaagggggtcacagtcgtattatggtcttgaaggggggtcacagttgtagtttggtctcgaaggagggtcacggtcgtagttttgtctcaagtggggtcacgattgtggtcccaccttgggggtgacagcctaccacatggtggtctcagggtggggaacccacaaatcccaatctcggggtaccttgagattgctcaattttggagtataccctaaacctccaaatagtcgggccaaaacgaccatggttccaagtgacaaagtgacccgaagcaacaatgacaactacacacttcaaattttactaagtgtgtaaagccaaaataatacatgaagtgtatatatataagtccccaagagggatgcaaaaaaaaaaaatatctccaacccacgaagccgtgctaagattatcacagagcaatgcaccctaaccccccatgggatggtctcggggtgatacaccttgacccccagatggtggtcatgggggtgatgtaacccccaactttgggccaatcacacattgtcctcattaaagatagtttataaacaacatgctatctacactcatggtaaacttttgacctcggggtggagtaccccgacccctaagtggtggtctcggggtaccactcccaacccactctcagcccaacttcagtccaagaaaaaggggacatgcttctgtggaagttattttaccaggaactgagatctactcacaagtatgttgatttaacaacctaaatatcaacttct

SEQ ID NO: 23861 - DNA, 1933 bp, Cannabis sativa
tcttttttcagtcacttctttcttgacttgatttggttctcattattgtatccccttgttgcagtttcttactgaattagatggtgttgaagttttgacaggggtatttgtttttgcggcaacaaggtcagtctgtgattggtttgatcggtatatcattttagatcttggaagaatatcttgtgtgtatcttagtgaggaatgtgaatgcccatgataatgaaaacatgacctgctgaatgattaaacataagaaagtagccaaataaggtgtattgaggtgtaagcctcttatattaaaattctgtcttttaaatcgtgtaaacttctaaacagtaatacccaaaaattaaagcaattcatagcactaaaatgtaaggcaaattcatgtatatttatatatataaatatatatatatgaaacccttcaattaaatgtttgcccttcaaaataatgtggtattttctaattacttgaaactattattatgcgcaataattagaaaatacacttttgcgtaagaaaccattcactgatgttgtaaaacttgaaaagagtttccttttttttttgtaagtcttatattgtaaagggtgactcattgtgtcgtttttattttgtttaccacggttttcttccgccacaagtgagggcattcaaactgtaacgggggaggttggtctaagacaagcgacctttttctcttttcaaaaaaagataatacacttgctatgctaaacttaatagtgtaattgctattaagctagttttgtagagcacagcacctcaaacaagcccaaaataacaatactatatgatgcattagccttgaggcgccaagggatgcctccaacagggaagcataagtctttcttttccctaaggcgtaaaaaggcaattttttttttttttttaaaaaaaaaacttaaggcaatttttgaaagcctcaagccttatgaaaggcttttttaaacattgagttatttaacgatgctctagtaagtagattcttttgtgagatgctgtactgcgtatttttttcatctcatcattatgtggtacattatctaaagtgtgatcacttcctggtacttatgttaactaacagatattaaatcttgtacagtatcttgtagtctgaatatacttatttcatttttttgtatgtgtacattgttcatagaggtcatctacttttcatgccatcacataaattatataaattatctgatgtgtctgacctcttttttctttttcttttcttgtcaagcagtagaccagatttacttgatgctgcacttttaagacctggtaggctagatcgccttcttttctgtgattttccatctcaaggtgaaaggctggagattctaagtgttctctctagaaaggttagtaagattattttcaataaatgtatctttaattttttttgaacaatggcctcgatgaatgtatctttattagttagttctctatgtcaaaaaatgacttaaaaaaagaggtaaaagactaaactctggtgcaaggagtgaagcttctatttccgttatttgtttgcctgtcataatggctctgtttttaaaattgatgcagctaccactctccagtgatgttgatttagatgccatagctcatatgactgaaggttttagtggagctgaccttcaagcattgctctcagatgcacagcttgaagcggttcatgaccttctgggtggtgaaagcatgcatgaaccaggggaaaagccagtaattactgatgctctcttaaaatccactgcctccagggcaagaccatctgtttcggaagcagaaaagcaacgcctcttcggaatttacagccagtttttggattccaagagatctcttgctgcacaggttctctccggcaaacacatcttcacacctcatctacacaatatgctcgtg

SEQ ID NO: 23862 - DNA, 5341 bp, Cannabis sativa
acgaattcctcagggaccttactgcaatttcccacaacatataacgtaatttttagaagaaatcttttatgttagcacatttattagaaaagacatatatctgcttaactagatcaccttagagcttcagcacctaaaatttgctcacgtggaatccatccatcaatattcattagatctaaccaatgtccaacaatatccatggaaatatgaatatcccatcgcctgctcaatgaggaaatattataaataacagaatcaccaaaatggaaataaaagaataagcaattgacatcttaatattttatatatagaataaagcaacataccatatcaataactgatgaaaaccctcgtcccacaagaatcccctaggaaagaaaggtcgacttggaacagctgtgtaaagctcagctggccaatacgaaataaaattatcacgagttcccacctgaaagagaaaattgtatactgtataaatttgtcaaagaggggcttgcaaaaaaattataactagtcagatacgatcagtggttttcatgcactgttaatcagtcaaactgatgcaaatacatatagatgaacatgatgaatagtaatttggatatttttagattttatcttattttgagttacgagaatttttagtatactgtagcttcctagttgaagcaggctaaggttatttgtctatccattaggttcagttacggttttcttttggcatggtaacaccaacaaaaattaaaatagcaaagctaactacgttacgaaaaaagtagaagattttcttccatctaaaaaagttcattgtctatcctaaaggcatgtatgaataaataaatacattctcttaaaattctccattgattccgttatatctctttagattccgcacttactctattataatttctctcttctatactctacttctctctctcttccctagatcgattctttcttcaatttcctctattttattctacatcgcaaactgccaatgccataagtagacatatttttccttaaatagctcaagcttcgcaaaacatatggagttattacttataaacctaccacagttattaagacttgccggctccacttatccccctaccttttcactgaaaaaatttcacattatcatgattctttttatacatatgatttctgcttctgtttaaagttttctcagaaccatatagcataatcacttggttagcaaaagaacaactagttccctttggacagtcatataactagttgtctcccgcttcacaaatctttattcagaataaacttgaaatagaaaatggacagggtttagaataaactcagacaacttacattcggatctttaggaaatgaaatttttgactggccataaaagtagccaatgccacccaacatatttccaagagcaaactttcccgcagcaacagattctaggtcaacctgaaaaaaaaatgataacatgatttcagagaaagagatatttatatacattaaaatgaaaattgaaggacaataaataaactctcagctttaaaaagaatactgagattggagcttggaaacgagaagaaaagaaaaacatcttggaagcagttttcatcattatggaaatacagctctagcaattctactgtccacatcgcacactttcagaataccttatttcagagagatagctatcgacaaacattaaaatgaaaattaaaggacaatcaaaatgaactctcagctttaaaaagcatatttattttagaattatgaatttagaaacgaaaaagaaaacagctagaacgtgtcagactgttaatcccttggttagagacccatcgaatgattaaaatagaacgtgattgggaaagcatgagaaagagcataaaaaaaattgttcagctatgctaatttgtcaacataacaagtattcttgcaaagccataagtaaatataaaggtctataatactaagcgatgattcgacgatcttctcacaatagctcctaagcttcagccaatagactttcaactcaagtttgggatgaaatctcaatggatttcaatgagagattaccatgattagataaatgcaactaaaatacgcaaatgtatatgtcttgaggttctagtccctcatgggtacctacatggcgattgttataatttcctagtccctaagtattgtaaagttaggtgaggatcctactttcaaaaaaaaaaaaaaaaaccacccttgtacacattcgcagttgccttggcatatattagggaattactaagaagtaagaatacacaaaatgtcgccacttgatgtcacaatcgtgacaaccaccaagcctctgaaaagcttggaaacctattgtgtacttttgtgttgtactatttttcatccaacaaataagtttgatagtgaacaagttccaatcagaaaaaagtttcggtcattatagaagtgtaactagagcaatttagcatccacttcacattaaaatctaccatgatccaagagttagtaaataaaatgtgaaatagaatatttattgttataatataccttgttttccatattaaacttcttctcaaataatgtgtcaaaatattcttgcttctctttcagttgactggtgagtgaggtaccttagattagaatgaataagaaattagattacaaggaataaataaatctttaaaataagaggcactttttggtgggtcacatatacacaccaacacatgttcggcacacataaacttacatataaacttttgaatacataacatctctcaaatagtgtccagtatgggtgcagtgactgtgagatacatatttaaaaggttataaaatgatttattaatatggaggggaaaaaaactttgagattgaattagattacaattcagtgtaaataattcaacatcaaaaacatgattatgaatccccaccatgggccttaactttaattaagaaatcctaattttttgataacataagaaatccctaatttgaaacaccaactacacagatatacttataagatacactccagggtaataaaccctagaccacttccaaaaacacaaaaaactcatacacactcaactatttaagttagcaacaactcacacaccataatttcatttaaaataagaatccatcagtatatatttcatgggaaaacctgtaaggctgctgatccgcttttctacttcagaactctttgaaccaacacccgaaacaaatgcaatatctattttgaatggaatcctagcagaaatctgcataaaatagatattccagtataagagatgacatggtgaagatcagatatgaggttcatgatcctaaattactaaatgcactttgcttattatatttggagaccaaatgcaataccttcgtgaccacatacctgaaaaactgcaatatttggagacaactcagatgtgtcaggtagctccaggcgaccaaactttctagcctgcaggcacgaaaattggatttaccaagatacaagtatattaggggtaaagaaccagaattccattaaattatattaatacttatggttttttctgtcatattaagttatacgtacttgtgttgcaagactttgctgcacaagatcagataaattgtgaatatgaggcgtcctaaaaccagaataatgaacctccaaatcatcctgtaaatatgagaagcataaaaggaaaagttaatttcacaagatattcagctacatacataaagcttggtgattaagaatttagatgatgtgaacggcaagagtcataaataacctttcaacaaactaattctagacaatacttagtcacaggaagaaactacggtttgtaaagcttgggacttttacctaacttaaattgaaaaaacctactcctagaggttggacaaacaggactgttcctttgattgtgttaaggaagcctgtttctcaatttttcatggcaatagcattaaatatagctatactgagtttacaatagtgttcctcagttgaaattacctgtgatttcaaatgcagctgccaacttccaacatccgctcgtgaaccagatgtaagaagagagtcatgaatgtccaaagtatcacgacccaaacttaaaacactaccatcttcgtcagccaaatagaaaaaaagatgtccagcgcctcctgaatcctcactctgcatgcctctgcaatgtgccaatggaacaagttaagataataaggataacaagttcaaagatgctatgctcctgtaaaatttatatatatgcaggggagagttaaaagagttatcaaatgggagagacttgcctgagctcccaactgttaacccaaataccaaagtcacttccagctacttctaatttctattgcagaaaattattaaaagtcaaaccccaaaacatccctctcataccataataaaactaaatgcatttcattcagcagaaatccagacccgaaagaaacaaggccaaaatacttactcatctttttgcacatcaacttgaacagcccaatctccaccatagccacttccctcttgcttcaatttcaagaaactcgtggtcaatgtcatgtccttatcaacgattacttgattcccaaagtcacgtccattatgttgtgtccagccatatttacttaaatcatcagaatcttggcacacatgccgcatgaaataccttccatccttaatcccaatccacattaatccagccaccaatgaccgaggtgtcctgatcagggtcaaaagctaaacacagtaagacaacatgaagcttttcatgaaatgttccaatcacaaatggaaatagcgtctttacaaagcatacctggctcgaattccaagataaacatgaggacgatatgttccccaatacaaactctccttgtgctcaccttgaaactgccaatacccaataatttaaccaaatcacaaaaacacaaaacgcgcacaaaataattccggaaatccatatcttagtcaataatcacctgagggaggtccgtgactttcggagcagggaagggagtgataaccctaggcttatgagattcttcagtggggttaacaagatcatatatgaagaaccacataacaaagaacgcaaccacggtacatcctagcatcatcttgagatcaacattgaaaattcgaatggaatcttgatttctacctctatctctacggagtttaagatcgggcttggtttgacgcaatgaagactcgttgcgatcatcgtcatcatcggcgggagacttgattctgcttcgagcatttcttctacttcccccagtcatgtggggaaagactcggtga

SEQ ID NO: 23863 - DNA, 3448 bp, Cannabis sativa
ttagcacaaccattttaattcaatcaatttcataaagtaataatacttttttcttttttctctgaagcttttccttcttctgcaatatctttatattatcacagtgagaaactagccataacatttgcaccgtggaagactacaaatgaagctactattatcaaacttttaggaaccttagagtttgcgggaattatcattcatggataaagtttgcctccaaagctattggaagagaaatcaatgctcgaaatgacaaaagactttatcattttaaggagggcttatgttcctgtggagattattagtcaaggtgaatccatattaagatgtttttgtgattgagtttcctagtacttgttagtctttgatgtagattgattccacacaactgtttttatagcttaatgtcccatcaacaagctagttcagctaagcaacattttgagttataagaaatctttgatagcatttgagcattcatctatacactaagctatgtaagtaaatgaaaaaaaatccaattctctatgacttggtgttctcctggccatatttttagtgacttttcaattcaatcattaaaagatgcactcaatatgatgcaaattcacaaatctcggctcatacatatatctaaaggtgaatatttatagctgagttatgccttgatcaagttttttctctattgattgaggcaataatgaagtgttgtttgataatatttgataacacaaccatattccaagaaaacatctactgtgtggttatatgaattaagaagccaggaccatgtaattattataacaatgttacagagttacaggtctgcctataggagcttcttcaatttgcttttggcctaatcttcttaaaagaattaaagactactatatgtttcatcttctgtgttttctttggtttaaaattgaaatattttgctacaaaatttcttcctttattatgatcactataatataattagtaatgtatagtacatgtaactattctttaattaatttgttttctctctctctctaagaaatagttccaactcttttctgaagatatggtgtcattggtttaacaagtcttaaatccctgatgacacaagcaactaaagcttttctaagctagatttcaacaacttgctctgatcaggaagctaagtgtgtagatggtattgtagttttagatgttagaaattccatttatgtgtttacatgaactgaagtgcttccttgggcttccccaagagagataagactgttgcagatatatgcctcgaggagagcccggctgtttcagtctgatcttggggtgatccatggtcaatgtatctatcaggaagaaccattgctctcaactgcaaaggaagctccaaagatttagaggcaaaacatgaaaaaaagacaagtatagaaactaggaatattgttacaactatgatgaattttctcttttataagaaggctacctttaaagacccatcaagaagtccacttaagcttagaaagtgtgacacatgagacccaaagcctccaatagaaccttcttcggcagtgattaggatttcatgctcgttggctaaccgtcttatgagatttgtatccaatggtttgcaaaatcttgcatcagctactgtcactgaaatgtcttgtttctttaatatgcttgcagcttccacacattgctgaacaatagaaccataacccaaaatagctactctgctgccttccattaatattctgccttttccaatctatttaagaataaaaattatagagatgaatctcaatatttaagtctgaatattttcttaagacttctataatgatctatgcttacctcaagtatagttcctttattattagctggaagctttgctccaattccattgccccttggaaacctgaagcaactgggtctgtcatctatagctgttgctgtggccaccatgtgcataagttcagcctcatctgatggagccatgacaaccatgttgggcaagcaggccatgtaggtgatatcaaatgcaccgcagtgggtaggcccatctgcgccaaccatgccagctctatccaatgcaaaacggacaggtaatttttgaaggtctacatcatgtgcaacctgaatgagaatacctttagttcttttatccactaggaaatttcatacatagtacacacaaaataggttgaaactagtcctaaatggccacttgtgtttatcaaataatttcaaagattgtgaatatgagtggcaaaaaaaaaaaaactcatcagtgttgaagttgataaacaatattgttgtcatttgttacctgatcatatcctcgttgcaggaatgatgagtatatggcacagaatggtttgagaccctctgcagctaatccagctgcaaacgtgacagcatgttgctcagcaatccccacatcaaagcaacgatcaggaaatttcttctggaaataattgagaccagtgccaccacccattgctgcgtgtatggcaacaatcttgtcatcttcttcagcttcttttattagagattcagcaaagtattgagtatatgaaagtgtcgacgatttggacttaaattgctttcctgttgttgggtcaaactttacaactcctgaaatcattgagggattaatactctgctaattgacaagaactcaaaaagaaaaaaaagtgcataaactaaatatctattgtctcaccatgcattttatcaggtgctacttcagctgggggatagcctttccctttctctgtgacgatgtggatcaagactggtcctggcgctggcattgatttcactttctcaaaaatggtgactaaatctccaacattatgtccatccaccggaccaatataatacaacccaagctcctcaaagagtgttgacccagaagcacttatcattcctctagcatactcatctactttagctgcaacttcatgtgctggccctccaatttgttttgtgatggtctatgaaagataaaaattcgtaaatcagttcttgacacgagatgtaaaataaaataaaagaaaaactcaaaatagaaagtcatataagttggctttaaggtttactttcgcagcttcgcgaagttttctgaacttggtgcttgcttgaagcttagtcaaagcaccacttagagctcccactggggttgcaggaccatcaagagtagcagttggtaaagaaacttgtttattgtcgtttaatacaacaatcaagttggcgtccaagtagccggcattattcatggcttcatatgccattcctgcagtcatggccccatctccaatcacagaaacaacactgttcttctttcccagaagatccctggcaactgccatgcctgtcaccacaattgaacactcttctccatcattgatctttaatttataaggattgaaaattaaataataataataat

SEQ ID NO: 23864 - DNA, 2306 bp, Cannabis sativa
ttgtacctaaaaaatctatccatctggcaaacccgactaacccaacccaaaattcttgaaaaaaattggattcatgttcaacccagtaccaaactgggtcgagttgattcggttctagagatttgacaaatccaaaacccaaacccacctgaaaaatctcaattatataattaaaaaatatatatgtatttttttaaagtttttatttatctaaccctaaaatcaaaaaacctaaaaataaaactaatatttgtaaattgatttgggattgtgtatgtgtgtgtgagaaattgttaatatgattattatatgataatattgtattattgtgtaaatcgattctttttgtgttgatatatacataagtattttttttttgaaaaaaaaaatagtgtaaaatagtgtgagaatatgaatgtgactattattagatgatgatattggattattgtatttaataaattaatttggtcactttactgaaaaaatgatattttcaaaaaaaaaaaaaaaacaaattagcttagtccaacccgaacccggccccatcccacctgcacccacacccgaacccatactctaaaacgagtaggatcggtacacaaaatttacacacctgaacctgaatctgaacctgaacccgaactcgaaaaatccaaaaccccacttgatcatgtgcactctactttttatccaattgatatagatgacgtcatgccttacataaggaatacgaatgcatataagatatatatttcactttttaacatttattgatatgtcacactagagagaaaaaaacatttattgatacaagaaaatgctaaaagtacaaataccacagagatgataactattattggtatattaatattagatttttacatatttttatttaactaggtgatatattttaatccatttttagaattataataaagaaaatattggtaacataaaaaaataattctaatatataatattaataaaatattagtactaataattttatttactaaatattaaaactctagaaaataagattttttaagtttatttaccgtattaattattattattattaggatgatcaaaaaattctttaatgttgtattatttatttatttatttattaagaagtttaaaatttatattattaatatatattaactttaatttactttattaaaaaagttattataaataacataaataagatggtggtgaaaaaaattagattgtcataattattattatttaaataaatatttatcgctataatttattatttgtatataacaattattcaaagtacatgcaatactctaataaacatggtatatgccattactctcataattaattcctccttgatttaaacaagtttaatatattttaacttaattaataattaaactcttaattttaaggttttttttttcctaatattaaaattttattgtgcgatttttctgaaatatctctacatgtacttgagatagacaataaatttttacagattaaaattttcctctaaaaaaacaaattaaattcatagtagaaaattaaaagtagtataatatgccaaaaggaaatattaaaacatatactccaaactccacttttcgatctgaatttgataatcaatacatatccatccttgtctctctagctagcaatatatatatacatatatatatatccagctcaaccaaggttcttctatgttctatatatatagcatatatatatagagagagaaaggtagagtaatatcaaccattagttgaaggagaagtactcttcatcataattatacattttggttttcaccaaaaaaaagtttttagtaattaattcccaaaaggtagccattaacatcaatgtggaacccattcatgagtatatatatatatatacatggcgaatataaagacaccaaaccatagcattgaaaagctattaatagttatatgtgtagtgttaattaatgtgtatttttaaaaaggttaaataagattttttattactttaaaatttaatatgtattgagttatatttttttttaacttttcatgatattaaaagttttctctaaattattgaaattgttagttttaaatttttttttgtcttattttacgaatagaaatctcatgtagataaaagtttaagatacatataatttagtacatattaaagttaggggtacaagctaatacatagacaatcgatacattaattaataaaattcaacataattagatagaaatctttaattcaacaatctcaaattctcaatagtt

SEQ ID NO: 23865 - DNA, 1817 bp, Cannabis sativa
ttcattcctgacgcgtcaaatagtatccaccacaataaaagtatacatatataaagacttcatctgcattgatacccttattttacttaatattattaaaacaaatctatatacacactaataatgacttttcccccacaaaataaaaaatgaaaagaaattacatgacaaaaataaaataaaataaatgatcttcttaaactttattctattctattttatttatatttttatttctcatttccattcttattttacagttttcattactcaaatcacggaatatgtcttaatatataaattataccactataaataatagggtaaatagattggtagaattttttttttctatttttcaaaataggacataacaaagccgctcattgtattgctagaaggtcttgtttaatatcagattgtactttcagtaaacttgatgctcttctcaccttaaagtagtctattatatccattattcactgaaagttattgaataaaattacctaaattcaaaaaaataaaacaaataatattctaatccatcatttaattattagtagtaggaataataacaaatgcattaggactatatatagctagactagtggggagggtgtggagatctcatattttcatttcatcaacgtaggccctatctattattatgtgatgatctcaatattcaacataattactgaatttggtagctgtaatatacaacatattattgtaatgtacatattgtttaataattaatttattttttttgacaaaccatgcataattgcatattgtttaatattaatttacttatttatttggggtcaaattctaaaaacatatataaataaaataatagtacctatctaacacgcgcaagggctaattaatatagtggccaccccaccacaagggctgttttttggtgttaagtttggagtaaggcatatgcctactttgtcgttttggtgaagatatttctttattattaatattattattttcattttttctctctttttttaaagtatattttatgtgctttgcaagttgtacaaagcactaaaaactgtggtgtctactattataaaaaaatatatatatatatattaaaaaaaaacttattacagcagagagacatttttatatataatgttaagtttaagcctttacatttaattattaaattatataatttaaagggaatctttccatttagagacacttcttatgttataagaaatggtcacttgccatttacagaacaaactcttataaaaacaaaagaaaacaaaacacaccaaaaaagagaataataataacattatacatcaaattaatataaaagtatttgttattacataaatttatatattatttaactaaaggagatggacaaagacttctttctctttctttctttttttggggacatttttagtgagtgggaaaagagtcattagagacaaacaaaagaaaacacaagttaatgtaagcataaaagcagctggctaagtatcaatggagagtttatggttcacaaataagttttcttctcttctttatttgccagcctcaaccgaccaaaaccctaactagaccttattctctaaagccaccttatttatatataatgtatacatatatttatatatagttatggttataattaaaaaggtctctctttaaacttgggtatgacatttgtaaaagaaaaatgttattgttttatgttggtgtctaatataggtaacctacctaacccataacctaaaacctatatagttcttttgattaatttagtttatatatat

SEQ ID NO: 23866 - DNA, 1444 bp, Cannabis sativa
aaaaaaaaaaaaaaaaataggttctgattgaaaattgaaaagaaaataaactactgggattgaataagaaaagtttaccttctttttccaacagaaattgtaatcgatctaaaatttcaaaatgtcgatctccaaatctccgaataataaatctatctgatgaattaacttctttatcgatgaaatttcttcgattggatctgaaataaaatgagattatataataaattaccaacaaattttataaatactttcaaatcttcaaatcgtaaatggaaatgaaagagaacctcgctggaaatttttagatatggatagtgtacggttatgaaacggctactaattggtgggttgaagaactgacaaagttgtggtatcctcaacatgcaagacactaggcaaagatacacaccggactactttgtctttctaaatgtcttgctcctaaaaatgacatgaaaaatccaatttcaaaccattgtatacaagccaagaaacatgtatgaacttgtcattttatagggaatgaaaaattaatccaatgctttagaaaaaataatcaaaataaaaaacacatatataaggtaaaatagtatcacatgacaaacaagatggcatacataccatatgttgtaacgcattcaagaataattttatttattgaaaattaactaattatgtaacactactctaatgtaaaattaattaaaaatattaatattaggttatttgttttttcacattatatattatggtaactaagttggaatttgctatagtttctattagaagaatcattaatatttttttgttgacaggttcaacatatagttgcagagtattttttttgttttgttttgttttttttgtttttgtttttgtttttgttttttttttttttgagagaatatagctgtagagtattgatgactatgcttactaatttttttaagtgtctttttagagtatttggtgtacccaaaaatacaaaatgttatgaatgtattctattcaacattttttctattagtataatgccttgaaatgttaagaatgtaaacttttaccttaaatacgtacactttaaatttgtacactataaggtaaaaacaaataatacataatggtcaatttagtgaatggtatcatagaaaatataattctttcatacaaatactcatgaaaatattaattaccaacacaaagatgttagaaaaaaaagtacttgggtttgataactatccactatgttgatgcattttaaaaagaataattagcatttttactttttcaaattttgatattactttttttttttttttgaagaaagctctattatgtcttttaaaataggttaattagtaattttttcccctgaactttgacatgtattaaattgtgccccctgaatttttttggccgttaaaaattctcctcgaactat

SEQ ID NO: 23867 - DNA, 3200 bp, Cannabis sativa
  modified_base (53)..(71): a, c, t, g, unknown or other
aaaatacatgttaacataatcacttcaaaactcttaaattgataactaatcannnnnnnnnnnnnnnnnnntagggcacaaaacccaacaggcttcgcacccataagacagtgaaaaggatgtttcgccagttgtggagcgaggggttgtgttataagaccaaacaccctttttcgctcttcgagcttgcctttgatggtgtgtttgatgactttgttaactgcttcagttcgcccattgctttcagggtatgcattatcggtacgttacttttgacatccttggtaaaagtaaagatagtttgtctagtcatttagaccttgttgagttaggtataagacacgatttgacaactgtggataaaggaaaacccacatatttacctcctaaaactttcatattgcctagagaagataaacaagccgtatacaactcatttactgagataaaagtacccgacgtgtattcatctaatgttcgaagcttaaagtacaacattgtattcattgcatgatgacatagttaaaactctatgcaatcataaaaaaatatttttcccccattctttaacatcatgatatatttcatagtccatctagtaagaaaattgaagttgtgtggaccagtttgggtgacatgaatgtatccatttgaaaggaatatgaaggtgttgaaaggttacatgcgtaatcacaatcagcccgaagcttgcatgattgagagtcatatatcaaaagatgcaatggaattttacatggagtaaatagcaggagttaatccaatcgcacttagcaagccacaaaatcactcaaatggggttgatagaggattacgagagaaatgatcagtggtgactatatctagagcataattagataaagctcatttggttgtgcttgagaataaccttaaagtccaaccatatataacgtaagttatatattattttattcaactttatactttatatttttctcgatcaaatgaaattgtatataacttatactttatcatttcagtgatcacttgaaattattacaatcaataattagaagtaaggttaagaataaatagatatgggtactagaagagcatcctaagtcaattcattggattgttaaagaataccattctagccttcatggtatgtcaaaagagttagaatacatatcatttggaatagatactcaagtaattaataaatcatcattcttacattgtgggtgggagaagatttcatacaaaggcaagagatgatgctcgaacaattcaaaatagtggagtaagtattgttgcagaagcaatgcattttacatcagcaaaggaaagaaactcagtataatccactatgacatattatggagttattgatgaaatatgggagcttgattataggttatttcgaattccacttctaaaatttcttgggtggagaataaagccagagttaaaacagacgaacttggtttcacttgggttaatttaagcaaaaaaagtatcaagaacgatccttttatcatggctacccaagcaaaataagtattttacataactggtcctattgattctaaatggttagttgttttaagcacacttgagcgcgacaatattttgataacgaaaatgatgaaaaaaatgataatttatgtcatgatagttttgttgatcaataacagatacacgatcaagtggaggaaatcaatgatacatatgaagatgataatggtgaatacattagaagcgatgttagtgatgggatatggtcggttgattgtgcatcatctataaaaaagaaaatgttttaagtgagtaagtatggtgtttagttgactaatagtgtgttaatacctaagttgtatatacagatatgtcggatatagattgcattatattttggattattacaaatgtgttaatacttattgtttgttttctactatacaatttaatttgtgtatctcttgcagatgataaatccagaagatgcaaatagaccaaaagggcgagataggacaaaaaagaataatatcaataatttgaaatctcaaggtgtaaaaaaaaaaaaaaaactagagtagaatgagaaaggagaacctattaaaaaagcatatggagatatgcaattatggattggggttaaagagagagacacaattcctctaaattatgacgattggagacatcatgtagattcaaaattgaaggagaaaatatagaaagatacatatgtaagacattaattctatatatatatatgcatgaactttaatgtaatacttttagggaatgttatagaaatagaggaaactctgtcgatatttttaggattcattatttgaatttttttttctttttttaaacatatgcatttggaaaaatttaaatcaaagacaaaaagaggtattcaagttttatgatattgagcttcttagttataataataagcaagacaatgtgatagccatcaatcacttgtcaacatggttaaacgttatgactcaaataggacaatattattttataccatggaccatagggtaagaaccacacatttttttttttactttcactataatattttacttttataataaatatcagtgttactttttcatcaagcattagatgttgattatagcaataatatcgggaagaattgtatacttaaacccgcttaaatctaaagtctcgtcaatcattcttgagatgataaaaaggtaagtttagaactttaagttattcattctaatataatgatcaattaaaaaatttcaatagtttcacttataattttttttgatgtctttaacagtgcatacacaaatattagttcaaatattatcgtatttggcacaaagaaaccgtgaatatatacttttgtttgttcaaaacaaccatacaattatgaatgtaattactatgtactaacttacattcgtgatatgcttcaacattcaaatcctatcaagtcacaaaacaaaaaaaaaaataagtatatactcatctttactataaatacaaacatatataaaaatcctatcaaacccctctctctttcccctctttctctctttctctctttctctctctgtctcgcgaatccccacacttaattttttgggatttcaagttcgggtccgatgcgcccgatgcccgtctgattgcacacaaaaaccacttaattttttgggtttttaagg

SEQ ID NO: 23868 - DNA, 4041 bp, Cannabis sativa
  modified_base (4011)..(4015): a, c, t, g, unknown or other
ctgatcacatggtcgtccagtctgcagaggctatggctggccagctccttggcaatcgagatgctacagctctcagctcgactcctcttgcacttgcacatgagtagacacattttattagtatcttatgtttatgattttatttcatattagtttcatattcatgttcatgtatggcccgttggccctttacttttgaacattacttatttttggccttaaggctttcatgttcttgcttttggcgtatatgccctttgtttcttaacactacgtttgtttagccttaaagccttttactatagacatatgatcgaccaggaagtcttttaatcttggttatcttcttatgcttagacatataagtatccagatttactttttcatgtcaagtaaagtatgccttccctgacttagctttcaatttttttctcatacaaagcttaaatttctctgcataagttctctgtgctagtttgatgcttgtacagtgtgggttccccccaagtgagcatgtagacttacggtctcttggtcacttgtaatttaccaagtttcatagaccttgcctcagaattttctcggagggcttccgggtgtacgcatgtggaactaaaaaaagaataaatttaagaagttatcttgttagcaagtgctttagacacactatttttgaactgaaacatcatttttattcaccaattagtctttaaaatgtgttgatgtgcaacatacaattattagttctataagcttacaaaataaaaagtctacttctataagtcaagtgactacccctgcctgacatgccaagtagaggccatcgttaaaaagtgatggagacttagctctttctaaactaactcttattaatgagttaatagaactactactgaaaagtagcgttcatacaagctggttactggtagtacttttggaggtactcctcattccaatatcttggtaagagaacaaactccatgttctcgttgcatctgccaagcttgtaggctcccttacttgttatttttgtaacttggtaggggccttcccagttaagtctaaatactcttgttgtggggtctttggtgttcatgaacactcttcggagcactaggtctcctatgaaaaatttcctttccttgtcttgtttgttgaagtgccttgctgccttttactagtaggcgtgaagctttaggttggcttggtctcttctttcttctacctcatcaaaggactcatctagcttcttgttcataggttatcctcccatgagatggtggcaccagctctatgggcaacatttctttataaccataagctaaagtgattggagtttgctcgattgtcatcgtctcagtggtcctatgcgaccagagtaccactgggagcaattttagacgatttccttttgcctcttcaagatgctttttcaaagtgtccttgggggtcttgttcacagcttctacctactcattcgtttgagggtgagcaatgacagaaaagcttttgatgatgtcatgtctatagcagaaatcaatgaacttgtcatagtcaaactgcttcccattgtttgacacaatcttttgtggcagtccaaactgacatatgatgttcttgacaacaaagttgaggaattatgtggaagttattgttggtaggggttaagcttctgcccacttggtaaagatcaatagcgtctacgacatactgcactcctctttttccctttggacttgaccaattacgtctattcaccatatggtaaagggccaaggagactgcatcaatgtgagctcgttgggtggagctctcgagatctttgagaatctttgacacttgtcacatttttgacatagtccatcgaatcctctatcatggttgaccaaaagtgcccctctcggagtatctttttggataggctttaccccacggcatgattatcgtagaagtcttcatgcactattatcaataaatgcttggcttttgtcttagtgacacaccttaggagcgacattgagaagcctcatctatacattacttcgtctaggataaaatacctagcagcttttcttctcatcttttttgcctcgtttttattttcaggcaaggctcttgtttggaggtaagttgtaatagggttaatccatgtagcaatgtcgtccacacatgtcaatttcttcaaggatagtaatgttgcattctttcaacaactgtattggcacgaagtttgccttatcggtaatggcgctccttgctagacgagcaagtgcatatactgttgcattctcttcattggggatttaccttattttatagcctttgagatgacttagaaagttttggttctttctcaaataagctatcattattttaccttgagttgtgtattcacacaagacttgatttacgactagctcagagtcgctatattttttcaagtggtcagctcatactttgtgcaccagcttgaggccagtgattagggcttcatatttaggctcattgttagaggctttgaagcaaaatttgatttctccatgcaattgttgccccaaggtgttatgagggaaatccctgcaccagacagtttgtcattgaagcttccatcaacatgtaatttccatgttgattgtttaggttctttttacttctcttgctcttgcttcttctctagctcttacttttctctcaaatctcgattttaggagatatgcttgtacattcagccatgaagtttgcaagagcttggccttatatggccactatcggttgatatgtgatctcaaattggttgagttcaatggcctacttgactagtcggccagatgcttcaggtttttataaaacctaccacaattgctggtcagtgtacacccttattgggtgagcttggaagtacggccttagctttcttgatgctaagagtaagttgtatgttagcttcaccgtgagtgggtatcgactttcaatgtcaaccagtctcttgcggatgtggtatatgagatgttgttaccatcttcttctcttattaagttgtactcgtagcatactctgggacagccatgtacacacccagctcttcattgtccaaatgttttgataagacaggaggttgagccaattctttcttcagctctaggaatgctttttcacactcccttgtccactcaatttttttttatttcttctgagtatgttgaagaagggcacacatttttcaatggatttggacacaaatatgcttaatgtagctatacatcatgtcaagatttgtacttccttgattgttatgggtgacttcatatccaaaagggcttggatcttatctaggtttgcttttattctcctagcattgactatgaagccgatgaattttcccgagcctacttcaaatgaacatttgatggggttgagtttcatgttgtactctcaaaggatcttaaagcattcatctatatcctccacatgcacttagccttttggacttgactagcctgtcgtgcagtacacctccacattgcggcataggtggccccttcattttttagcccaaagggcatgaccttgtagtagtataggcctgggtctatcatgaagttagtctgttcttgatctggcaagagcatctttatttggttgtaatctaaataagcatccatgaaccttaggatctcatggccaactctagcctctaccagctggtcgatccttggaagcggaaagccatcctttggacatgctttatttaggtcggtgaaatctatgcacgccctccacttgttgtttagtttgggttccgacacggggttaaataaccaaagtggataaattgctttcgtgataaattcgttgacactcatcctttggacttcatcttttagtgcttgggcacgctctttgtcaacctccttttctgttgcacaggtcgaaagtttggttcaatgtttagtgcatgggtcatcacagaagggtctattcttaccatgtctctgttgggttttatgcccnnnnnaaaactctatttcaatgtaatccaga

SEQ ID NO: 23869 - DNA, 2983 bp, Cannabis sativa
agatagggttgttgaagaacatcaaattgttggagctttactacaaccagttggagggaccaatacccgaggaactcgggaacctgacggagcttagtgacttggacatgtcggtcaaccatttgactggtcaaattccagtctcagtgtgtcgtttgaccaatcttcgtgtgttgcagctctataacaatagcctcacaggagaaatcccaagtgtgatcgctgaatcaaccacattgaagatcttgtcgctttacgacaattacttgattggtcaagtaccttggaatttgggtcagttgtcgcctatggaagtccttgacttgtctgaaaacaacttgacaggaccactccctgcttacgtttgtcgagctggtaagttacaatattttttggtacttgataacaagttctcaggggagttacctcagagctatggatattgttattcattactgaggtttagagtgagtgctaataacttagtgggatcaatccccgagggactgttggctctccctcatgtttcgattattgatcttggttacaataattttagtggcccaataacagattccattggaagagctcgaaacttgtctgagttgttcatacagaataacaaaatttcaggggtgcttcctgttgagatatctaaagctacaaatttggttaaaattgatctaagtaacaatctactttctggtccaatcccatcccaaattagagatttgaaaaaattgaatttgcttcttttacaaggcaacaagttgaattcttcaatcccagctgatccactctcttcacttaaatctctcaatgttcttgacctttccaacaatcttttgactgggaatatcccagaaagtctatgtgagcttttaccaaactcaatcaatttctccaacaataacctctcaggtccaatcccaccctcattaatcaaaggaggattagtagaaagcttttcaggtaacccaggtctatgcgttgactcatcagtgccggccaaaacctataattcccataagaacataactttccttctctgcccatcacgatcatacaatcaaaagaagctaaattccatacgggcaatatcaatatcagtcgcaatccttataatcggtgttgttttgtttattaagcgtcgttttggcaaagaacaagcctcagtggaaaacgacgagaccttatcttcttacttctcctacgaagtcaagagctttcatcgtgtaacttttaaccaacgtgaaatcatggaagccatggttgataagaatattgtgggtcgtggtgggtctggcacagtgtacaagatcgagctgagcaacaatgaagtggtggcagtcaaacgactatggagtaaaacagagcaaaagtggagttcagaagatgatgatgagcaattgatattgaacaaggagctcaaaacagaggtcgagactttagggagcataaggcataagaatatagttaagttgtattgttatttctcgagcttggattgtaatcttttggtttatgagtacatgcctaatggaaatctttgggatgcacttcataaaaggtggaataataatttccatttggattggccaactaggcaccaaattgctctaggggtagcccaaggattggcttatctccaccatgatcttactcgtcccattattcatagagatattaaatcaactaatattcttcttgatgtgaattatcatccaaaggttgctgattttggtatagctaaggttttgcaagctagaggaggcaaagattccaccactactgttattgccggcacctatggttatttggctccaggtaattattttcttacataccttcaatcttttatatttatgctttgatagttacaaaaaaaataactttaataaaacattttgatgattatctaattttatgatattattatagagtgattatacatgcatgtatatattatacaaacatacaacttttaatatatagacaggtctattattagttgaagttttttgtgtatcaagtattacatatatatattattaggataattataaaaagtatcattttttttttttgtaaaaaaattatatttttaagtttaattttttttaatatatttttccaattttttataaaaacaatacgaaaacaacaaaaaaaattacataaaaataacatgaaaataatatctaaataacatcaaaacaacaattaaaaataacatctagataacaaaatattaacaataaattaacaagagtaaaacataaaaagactgtattttctgtaagtaaaataaaaaaaaatataaaatatttaaaattacgtgaaactgtatttttataattttttttattattttatgtatttgtaaaataattcttatactatttgcgtgcagattttctcatattaaaacatgcaaaatcattttacaatagtgaaaaaacataaaagcatgtcaatataaaattagtgctattttccaagagtcatttcacaagttttgttttgttatgtctcgttgtttaaatttaagtcgtgatattttataatgattaattcgtcccaaaaaagaaaaagaaaaaggaaagaagtggtgatgacgactgattttttaacacagaatatgcatattcatcgaaagcgactacaaagtgtgacgtgtacagttttggagtggtcctaatggagctgataacaggaaaaaagccagtggaagctgagtttggagagaacaagaacataatatattgggtttcgaacaaggtggatacccgagaaggagccatggaagtacttgaccaaactctatcccattcctataagaatgagatgatccaagtccttcgggttgcggttcggtgcacctataagaacccggctctccgaccaactatgaaagaggttgttcagttgctgttggaggctgatccatgcaaatttcattcctccaacaagtataaaacta

SEQ ID NO: 23870 - DNA, 1567 bp, Cannabis sativa
ttatcggcattcatagatatgttgagattaaccaaaaggattagaataacatatacatacttgctaatcgagatgggatgctgtttggtctgcgttcttcaatgtatacttgtcgtccagcaatctgaacagttgctgcctacagttatgaagaacaagcttaattaattgacattcagtcagaagcaaagccagttcaaagtttgagttcatccaaaatgtcaaacatcaagtagatagaaactggctttaaggggggtaaaaaggtactacaagattgtattaagcatttaagctcgataacgaaacaaataatattggaaagaagaaaaacctggactgcattttgaacaccggtaatgtcttcaaactcgacaaatgcataacaaataccaacatcctgcacgaaccaaatatgaatctctcagcttataaacatgcgctacggtattgtggaaacgtgaatgaactcccaagcctataaaatgtcttaaatgttaaaggtcaaggatatagaccttgcgactcctaatgaccacgccctcaggttgctttagtttaccgaaattcttaaattcctcttcaatttcgaaaggagacacagtaggcggcaagtttctcacatacacagatttgatttcacctggaaaaaagatatataaagaaaataagaacctatgttgtatatacgaattcaatcgatagttattaattcataatgcatatcaaatggcatagaaattagcatataaacttaattgatagtactactataagcgtcaaattgatttaaatcttaaaacaaaataaaatgattttgataaaccttcatcttccagtgaggtaacttcatatgtggtctctacaactgatctttcaactgtatttgatgatccaatgggttgctgagcagtggatggtggagactgatcccattctgaagccggtggagcattcttgttaacagaattctgagaagctacagaaggtgtaggctgtcctttagcaacgcgtaacttccagcaagaatatagcggagaaaatcagtatgtgtaaatgaagattacaaaagtgagtctatatcattaggtaatttgtagaggtttagaacatactatagaagcataagtgtgcttatgggtctccccaactggttcctcaacagatgaaggcagttggtcttgtaaagaattcactgcattctgaaccgtaccattcgagtgatctacagagttgtcctccattatgggttcagactcaacaacttgctgtaattgctgctctgcaaagccataattgtcgactggaccattttcattgatatcaggagccacaaactctcttgtgtgtaattctccacccagcatatcataggatactgaaaaatatacatagaaaccatggttttctttaagaattgaagcgggaacaataactatgctgatacgcaaactaggaagttaatttctcagtcgaaaaagaaattataaaagaaaattctcttaccagaccataataagacataaaagtgaaaaagcatacaatttgactaaggttgaaatagaat

SEQ ID NO: 23871 - DNA, 1667 bp, Cannabis sativa
acacacacaaaaaaaaaacaaagtttctgcataccatccaaagagttattttaaaaaagagcttaaaaactagtttacctgaaccccaaaaagaaaatcaaaaaaattatctacaaaacaatgtaacggaagtgaaccccttgcgatcaccccgagccaccgtttcatatagtaaattcactttttcacatcaccatttttacaaatttctcacctaaatacaaatttctttcaaaagtccgaactaatttcagaaaacaggttttagtttaattaggaagcataacatattattttatcttctcttttctttattgatttatgataacaattgttaatgtccattttttaaaataatcatcatcgtagaagaaaacaaaaagaaacttacggtgactttggattcgcaagaatggtcgtcctcaagatgcgaacatagggaagcgatgtcaaagtcttcgtagcaataggggcaagggaactcaggtcggatatcgtcttcaacctccaaatcatccatccccaaccgatctaatccattcattaacaaataaacctcattcaaaactccatagcacaaaatagataaggaatcttacacaagtatgaaatatgtaaatatatatataggcgaacgaacctaagtgagaggtctgattgtggtggtgcaacgtatattggcgtttagcggcagcgagacgagaggtccagaaatcagagtccatttctcagatcaaacgctaaccctttcaatctatcccctcttctctctttgttttcttccgatccctcttcttgttcttttttttattattattattattttctttttatggtcagttaaatttacagaaatttaaataattgaaaccttcaaatatgaggaaatagagagaattgggaaagaagaagacgatgaattataaatttgttttcattgttttttacacttaattattttagatattctctttttatttttatttttgttttccttttctttttttttttttttttttaagaaaaaggaaatttcttttgagtcttataaacttgacattttcctttataatgtgagaaaagtattaagaatagtttcaaaaataaggatccaatcaagtgggttcattaccagtgctgacgtggagcaaacgccagagaacgtgtccgcttcttcattcttcttcttcttcttcttttttattaattttatttttaattaataaagaaataaacaattatttggtggacgaagtttatcaagaaggaaatatttaaatttctatatttatcaataatttacttgagaaaaaaaatatttataacttaattaaacaaaaatggaggacccaatgagaattcgaattatgttttcccaaaataatgaaatttaactgagttgagccaactccccacgaccgcatggtagaacagagttgaataaagtctcacattacacgtagaaccatttcacttgatctttaacttaacaaaaccttatagatgaaagaaaataaatgagagagaaataaaaatctactggaaagaattgcaacatgtattagtagagttgaaaaatcaaaggaaaggaaattcgtatatatttttattagatagatgttacgtgtcaagtcacctatgttaattttattttaatttttaatttt

SEQ ID NO: 23872 - DNA, 3648 bp, Cannabis sativa
tttttcttcacttcttttttgaatttcttttgagtttaatgttcacttaacttctgtcatggtcaataattctttcccatacagaatggtgtccacaaagtgctcacaactctttggcaaggtactcagcagcaagaatcctttatcctcatcttcaattttgactcctatgttgttgagatccaagattatcctattaaactcatcaaaatgcttcctgaagtccttagtttcatccattctcattgtatatagtttcttctttagataaagcttattggctagtgactttttaaggcatattgaagctaatttctcccatagtcccattgtagtttcttcacttgaaacttctttgattacttcatctcttaaactcagtagtatggcactgttctgaacttttttaatcttcttcttgtcttctccaagagtagcaagctcttctcgatcaatggcttatgaaattcaccgatgcacaaggaaagctttcattttgatcctccatagaccaaagtcattggtgccattgaacttgtcaacttcgaatcgtgttgaagccattgcagatcagatcttgattctttcttgatgtcttgattcagttctttgacgttgtccctcgactgagctctgataccatttaatgtgatcaaatgctttatcatgaaacaagaaagattgatcaaaatcaaagtaacttcaaaaacatacagtatactgaaccagtatacgaaaccagtaacaagagcaatttgacaagaagaataatgtaatttgaacacaagagattacgaggttcgaacagtgtgatgatgaatcacctgcctactcctcggccagaacagccccatgctctttagctagaagaaagaattacagttgttgatccccaatgtgtacatgacacaatcactcaataagcacaacttcaattacaaataatctcacttgtggcactatggatcaaacaaaccataggccaatacaacactcatcttttctctctttctttctctcaaaactagctcacaaaaaactctgaaaactctctctcaacttgtgtctgaagtagtagaaggtaatggctataaatagcctttggttgtagagctcgatactaactgtcataattgacagttagttaaaacagttagaagttggtggagctaaaaaaaaatatttcctcacttaaaaaccaatcacaacaatatgtataacagttgatataatttttatgtactgttgtgttggtatcatctttctcaccctcaaacatatgcatgtgattcactttttaatcccgagaagaataagaaaataatgaaagcaccaattgttagtgtaacagccctcgtcgagacaagacaagtctccaaatgaatttcttgcaatttaattcaataggcaaggttttcaaaattacaaaagagtgtttatataattaaccagtaaagaaaagaagaaatgcaattctcttgctaacagaattcacttccctccccaacgtctcacaaccatgataaagtcactgtaatttcctttggttgagaaggctgggtcactgcttgtatcttcgactgaaggagtggtttggtccaacacacttgggtcatttgtaaataggcttttgttttgggctttgtcaaaccagacatgtaaaagatactatatttcaagttccatgtttttatgagaacaaccatttaaaattaataatattatttttttttcgccttaattatatattgaatgttagattttgtcatttaattcgatccaattaatttcagtaatttgatcgatccaacatccaataaatattggattgaatcgtaactatccatttaatgtatttcatgtatattgattgaattagtttagatctatctaatattttaaaggtaaaattttttggatcgaattagatccaccaaatattttagagctaatatttattggattgaattggatccatctaatttgacaaaaagttgtaaaaattttaattttaattttcatatataatatatatttaagtataacaacataacatttaattatttatctaaactaaacgaaaatactaactagtttgattggatattaaatgtattaatttttcgaacacctcatccaacatttgatccgatctaattaaatatttaaaaataataatcaatgcatttcaatcacaattgaatgttcaatatttaacggtgggttgtaatagaatataaaaaggtattattaaatgcaatgaaaaagatatatgagataaggtgaggtaaaggacatgggagcatagaagatggaaatggtttgattatgattgttatgttatatcttgtcatgtcacatacacataataataataaataaataaataatatataataataataatttaaggtaatagaatagtatatggatcttaataaaatgctttctttttccaagtcaatttacacttggctcaattttgataattctttgctaaatgctcttcacacattgttaaatatgcagttgaaaatacttggtcagtttattaaatttttaaataaagtctaatttgcaagaaatatgaaaactaaaaggctggcctaagcggcttggaggtcttggatggaaagttaaaattgagtttttataatcatttggaataaatttttatcagtttttttctttttgttttttgttttttttattaaatgcatgtttattgttatgaatatttattatgtatacattattaaaaaaaaaaaattatgataaaaaattaatcttttaatataaagtctttgtgcaatcacccattctacataaaaaaaaaaagaattttaatctaattttcactcctattataaacaattttgtaacagtaattttttttaaaaaaaagaactataacagtaaaactttttaagagaacaaaagtaaaaaatgactaaaaagattaggtaatttgcagccaatcttctgattaaaattatagttatatgagtaaattgcggcaaaatccctaatacttttagaataattagcaaattttccccctcaagttatgtcactacctacttgtgcaccttaaaatatactggttgttaaaaaatctccccaatatattaccactatattaatgtccccttctgttaagttttttaacagatttcggtttatttgatgatgtggcataaaagaatctgagatggcaaaataatttgatgatagttaaaaatttattgcaatattaaatactcttaccaaacaaaaaaagatttaattaacaattaaataaaaaaaagatcctaatttcttatgtcttcttcttctccgcctctccctataatatagatgtatttgggagttgattattgtttggagagagagaaatcattaaggatgattgaaatatagatttacttacaaatacaaataatttaatatataaattattatttggtggttttaagagttaccatccaaaatattaatatatttttttaaaacttcaaatattaatatttgaatgaatataaatttcatttatatttattgatggtgaaatctcaaccattgtttttctgggcttgtttggctggaaaatggctttaacgaaccaaaccaataagttttttttttttt

SEQ ID NO: 23873 - DNA, 5694 bp, Cannabis sativa
aaacttttgctagcgagaaaattcgccgacaaaagtattttttcgtgtagtgaaaccagaagtctaaaatagtatttggagattacatggtaaggtaattatttttagcacataaattaattatgatagagttaaaatgaaattattcagccaaatcaaagagagcatttagaaactcctacactcttggcatgagaaacttttctccataggtagttgtgaactgcttcttaaagtagtagtctaattgattcccacatatgtcatctcttgttttcgactactaaaaattgtatgtaatcaattggaactactaatgtcaaacttttggtgcggttcaaattcaaatgattcaaaaatacattagtagagttggaattatttatgcaaggataaaatagctgggggaatgagtttagatcgtttatctcctataatcaatctctcttggcaaaacaagtctggcatatctatcacataccacaatcactgctcaattgcttattgcgctctaagtatctatatacagtcatctttcttggaagctactctttgtcaccaaccttgaatgacttagaaagatactatttaggggaaagaattattagtcaaaggattacaatgaaaaattggcattggtaccaagttttgtgttatacgataccatggattcctggacaatcttattttcaatctatttcttttgttgaaccatcaaatttagttgtatcctcatatataaataaataaagagaatggaatgttcctttgttgctacaacattttttagtctttggacgttgatcgtattgtcaacattcctttaatgatggtattgtaaaagttattagtcttttatctctttttttttggagttgttgtctctcatgttcgaagatatgccaataaaattgtgcatgacttgcaaagcatgttttagagttagatgaagattatgtttggttggatgaaatttcttttcgcaatttatctgttattataagcgaatattttttatttataataacaggttttattcaaaaaaaaattatttacgtcctaaaaacataatcatatcattccaatacaataaggactacggattttctgagtgaagtttcccaccaggcttagttctggactttctaggtttttttcctgtttttctctttccctttaaccctcacatttattgcttgtactcttcctttaatttctatcttacttctacaactatgattattataccccttattctcataacccaatccctcatcaccttaattactctctcaaccctgcattaattttgattgtgcatgttttgtcacatttaatctgggtttagggaacctatagagaatacttcatccaccaatatcactcagagttttcaactgccatttttaatttcttgaggtcttagatggaaatcattgctactctagtgatgttcagcctagttaaggggagatctcagtagatggacctacaatcctcctgctctgcaaggaggcctttcatctctaagtatcttctcttctttctaatttttttctatttaaaggtttggccatctatttttggcaaaccgcctctctccattcttgacctaaacacccaacctgttattatggcatcctcttcccaaaatcacccaaacactctcaaccttactgacgaaaaaaaccttattcatgttttcgaccatgtctcccttcactctggtaatgctacagagtctcactgtcctatttttaagatcctcacctccaaatctcctaggcctacttggagtgaaaaagtgatgagagaagcttggactcttcgttttcctattaacatttcagagtaccattcagatctgttcttagctacctttcaatgtaaaggtgaccttcaatgggcctagaggatcagccatgtcatttagataaatgtataatgatctttcccagccctaagggtcttaacactctcacaccagactagtttcgatatgtccccttctgggtccaagctcataacaccccctttggtcaaaagccccccccccccaactggccaatttcgtggctggtgagcttagggacctcattaaggtctaacccctctccctgtttgaaagctttggatcctatctcaggattagagttctccttgatgtcaccaagcctctcagacgtggaatgaacatccatttcaggaagattactaaaactaaagggctttactttaagtatgagggtctgcaaaattgctactatttttgtggtgtgcttgaccatgcttacaacaaatgtggcaaatatctcatgagatgtgacaatttttctattccacctgaatcgggatacaaggataccctctgagtccctgctagaatcgtcattaagaaaaacccctttgatctttctaactccacctcgttgaagagtatcttagtcgtgggagtaactctgatcaaggcttacaggaagctattgactagtttttgaacttaggttcagacttcatggtccaactttagaccggtataacccacctgcacccactgaaatccctaccactcatgtgggttgtaacgaggctttttctaccctaccaccttcccctgtcatggtcacatctgtgatcacacacacagacaaagggaagggcataactctacccgaagctcaactaccacccatctctattatttcacgacccacacatagaggcctaactataaatgaacccagtagggctaccaccactattttgccggagtgaaaagatccttcactagataaaatgctcaagttggaaactctgtcaggagtaagctcaagcgtgctagagctactcagaatgatgaagctatagttctcgttctctctacctctggtgaaacggtgggtgttgccttacaaccccgataagaaaaatgagtcctcttagttggaatgctcgaggcttggggagtcctcgtgcattctaaaatatctccctattggtgaaacatcgccaacatttcttctattttgtgatggaaaccaaactccaatctggccaagaaatgtatgttaagaatatgttatgttttgataatgctttttaggtgtctagaagaggtttgggggaggtcttttacttttgtggaacaatattgtagtataaattttttttattttttctcttagccatattgactgtattgtacacattagtgatggaacgaaatggcatttcacttgtttctacagctctccctatcttgataataaattgtgtacttggatccttcttgataggatttttgatgttgctcctagaatgccatggtttattttttagagatttcaatgactatctttctgttaatgataaaaacactgtcactagaccccctgctcatgccatgactgattttcactctttttttgcacaagcataacattttacctcttacacatattggcaataaatatacttgaaaacatggtaaccttcttgagcatctagattggtgtgttgtgaacagctcccgacagtccctatttcctttttccatcctgttccaccttggtttttatggctctgttcatagagcccttaaggtcattttagaggatgaccttagaggacctaggagaaacaaaaaaatatcttcaaaaatcactagctcactgataaaaatttctttagagcggttaactcttcttggaaatattgttatgggagtaggatcactactatcctccctgagttcatctccaaacagaacaattgtgttaatgatatcaaaagatggagtgcgagtcagaattccttgagagataggatttctaacatagagcgcgagttggataggttgcttcacactaacagtcttagagagagtgatatttccaaagccaaaacccttcaatctaatctggataatcttttgcataaaaatgagatctattagaaacaaatatgtagaattaactggctcaaatctagtgataaaaatactaaatttttccaccataaggcttccgctagaaagaagaataacttcatcagaaccatcacccttgaggatggttctattgttaggggaaccctctccatcttaacccactttgttcatttctatactcggttatttgccactcaagtaaaggatcaaactaccatctctaacatcctgaaagggacctccagccacctatcccaatctcagtcatcattcttggataaccctttcaccatgaatgatgttgagcaagctttgtttaacctctcaactaacaaagcccctgatggcctgaatgcctatttttatcaaaagaattggcatactttaggtacctggatgtcctcaataaccactcggatatctcccctgtcagtgaaactatcctagtcttgattcctaagaaaaagaatgcttccacctttcgtgattttagacctataagcctctgctctactctgtacaaaattatttcaaaagtcttggccaatagaattaagacttctctagactccataatctcctacaatcagagtgctttcctctctgataggcttattttttataatatcttcattgccaatgagctcattaatgccattcactataggaagaaatgtaaaattggttgggcagcccttaagcatgatatgcagaaggcttttgacaaagttgaatggagttttgtcaaggccattctccaccatgtttagctttccccctagttttgtttccctagttatgagatgcatatcttcagtcaattatcgtatctcaattagcggcaacctttctgagagttttacctctactaggggaatcatgcaagaagactctctccccccatacctcttcctgttagttactggggggctctctgcagccatctgagtcaaggagcaaagtaatgatttctctggtcttaggatatgtagaagtgatcttatgatatctcatttactctttgttaatgatagcattttatttacccctgtcactaagagatctagtactaccattaccaacatttaaaccatttatcacaaggctactgggcaatcggttagtctggctaagtcttccattttgttttctcctaataccagcaaggaggctaaaaactattttagaaactctttaggcgtaggcagtgagggctttgtgagtaaatatcttggtgttccccattgcattggtagaacgaacaatttgattttccattatcttgtccagaatgtagcttccaaaatgaatgtttagaatgttaaattattctctatagcaggtaaagagaccctcattaaggctattgtccaaggtatcccatcccatcctatgtcctgtcttgttttaaactccccaaagccacctgtaaaaccctgcaaagacttatttccaagttttggtggggatcatgcaacaataagaataaaattcactcgaaaaactggtctactatttgtgcttctaaattttatggggccttagttttcggtccctaaccaatcacaatcaggatttaattgccaagcagacttggagaatttggactaacccttcttccctgcttcactctctcattaaagccagatatttcaggaacaatgattttctcagtgctcctaaaggtcacttctcttcgattacttggaggagcctcctttgggggagggaattactcaagaaag

SEQ ID NO: 23874 - DNA, 4287 bp, Cannabis sativa
acaccaaaccgactcatctttacaataggtcgatttttatattttaattatttttaataaaataaataataaaaaattaattactagatcaaggcaaaaaacactcgtattttttgttttcttttattttattgtattaaaaataaaaaaatatatatctacaaaaaaaaaataagaaaaaaaaaagtacatataaataaaatgcaaattaatttattaataagtgtgccttgcatcattgtcaacgtcattttgctaattgtttaatttgtaataattaatgtaaagtcactcatatgtgagattaattatcactttattattattttttaattaatatattatactttaaaatcaatcaatattatattattaattaactaaaaaaatcttatagtattgtgtttatataaataattaaccacttcttcttctctatgaaaacttcaatagctatacaataatcattctctcaaagtgaccaagaaaagactaggagacaacaagtataaatatatctatatattttgtttttcttcattgtttttaattttggttttgaaatttattatgatatataataatgatgatattatatatatacatctttttgttgaacatgtaaattagatacatatatcattatgcaagaagctccttgtttgatctccaacaacaacattggttcaagtactactcaacatcatcatgttcatcccaaaaatacatacaagtatgtctcatatatatatacattatataattatatatatcaaattatataaaataatttttttttcgaatccatgtatagtatatttgtgggttcatggaacgttggcggtgtttcaccacctgatcatcatatggatgaagctttgaatgagtggcttagcgccagtactcatgataaacctgctgatctctatgttttcgggtaattaaatattaaatattaattattaattaattatataaacacaaaatgaatgttcatatatatatatatatataattgttgtttgaaatgaatgaagatatggtaattaattttttaatttttggttggattgatatgatgttagtatctctttctgattaatctcatctaatttaataaaaatagtttaacatatgatattaattacaattaaagattaattagcacgaactgcttatttatgtgatgatcgatactaaatatacataagtatttagtaaactttttgtgtgcttacttttattaagtcgtcatatctcaatgattcttcttccttaattttatctagtttttcttttttctttctcaagtgttaaactttttaaagttttaatgttattatcacatgaatcgtaaatgcatgaagatcgtgatgagccaataaattaaatttaaatatgtgattttttgttttccattttactactttacgagatgtttggtatggaaattatctaaagtattttctatgtttggttcaatttttaaattgggtagtactttatactacactttgtgggtttacaatatggtaatatttttgataaaatatcaactactttaaacctttaagtttgatattaattacccataaacctataatctcctttacaaatttaacacactctaattaaaatgttatatcatgattattaattaacgataatatactagggttggccagtccataagcgagactacttctaatctaatactaatagatttactataaattaaaatatttcacatcctcaatatcattatcatcattattatgtgattaattatagtgtaaatattcttattaattaaatactaaatgagattaatatgttgattattatgattaatatcagatttcaagaaattgttccattgaatgctcgaaatgttatagtgaccgaaaacaacaagatttgttcgaagtggaattcttcaatccgagccactcttaacaaaaacacaacgtcaaaacaagaagaagatgaagataacaacaataataataagtttcaaaaagtgtatccaataaaaaatgataacaataacaataatagtagaggtgatcaattatttggatgccttattagtaaacaaatggttggaatattcataagcatttgggttagaagtgatcttcttcaatgtattaacaacctaagtgttgcacgtgttggttgtggtctcatgggttacttgggaaacaaggtacttttactctattttctttttattctttctattttgtttttgtttcggttataatctcgtattgacagatagtctgcttttagaattgttttgaattgtcgtgatatataccttctaattagtcgacatgcttcaaaatcgaactctgttggacttaattgcaggatggtccgatttagaaaattgaacttaagatattattttatgtatcattttgaaaaatataagtctaattgatcatttaataaaatagaaggtctgatcgataacttttacaaaacatagtattaaaaatagtatttaaccctatattttcactgagtgttcccaatttaaaggactaattaatattcaattgtaacagggttcagtgtctgtacgatttttgttgcatgaaacaagcttctgctttgtgtgtagtcatcttgcttcaggtggaaaagaaggagatgagaagcttagaaacgaaaatgcatctcaaattttgtcacttactacttttacgtctagtaatgctcatcatcatttcccacgaaaaattcttgatcacgagtatggtatttggcgaaatagttttgtttttcatttattttttattattatacataggatcacttcacacaataatagttaaccatgattcaataattttttgtaaaatgttcttatcgttttcagaaattccaaacactctatttctaacataattttgcaaaaaataaaatattattaagagaaaactttttcaaaataacattttttttaaaaaatatatattaataagatacatgacacatatttatatgtatactaatattgttgattacaaaacttagtattataggtactaatatgacatgttttattgattggctaaacctaattaactatataataaattgaagaattttgtgatattactaactatatcattcaattatatgaacacaatatatcatccttaattatgattatttaattatacaatatatatatatatatgcagctgtataatatggcttggagatttgaactacagaattcaattgccagaggacttaactcgacttcttgtagaaaagagagaatgggatattttattaaaagatgaccaggtaattattaattaataacaattattattcataattaagatgtaagtgttgtattattatttagagtattttgtggcataaatatttaaatttaactctcagttgtaaatatatagctaagtttaatttttggcggtaataatacttaagttatatttctggaattctataggtacttgaccgttaaatattaaatcattatccacgtgttatttttttattgatatgtatatttaaattattttttttttgaaaaaagaataaaaatttttgacatggactaattaaagattgtcacgtgataatttaattgacatttaacaattaagtatctagagagttttaaaaatataacttatatattgttgtcgccaaagagtagacttatatatttatttataatcaaaaattaaacttaaatatttatgacaaaaattactgtattaattatttaattttttgattaatttataaattaattaattaattatagcttaaagtggaaatgaatgagggacgcatattcgagggttggaatgaaggagaaataaagtttgccccaacatacaaatacaattctaactctcaatcttattttgggactcataatcataataatctcaatcatcatcaccaaatcaaacaccaaattaagaggcgtgctccagcttggtaagcaatacacatatacatatatataatttgtatattatatagggtaaatagttgcataagtatctaaagttttatgtttgtaagcggcataagtacccaatgtttctaaaactgtaatttttttctaattttatcagtacagactctgatattgtcttaaacagggcacatataaaactcaaatttttgatcatcgagcctagatagaaatatgtagtatcagttacttctaaatgttcttttaataaattcaaaacagagtctgtactgacaaaactagaagaa

SEQ ID NO: 23875 - DNA, 2662 bp, Cannabis sativa
  modified_base (29)..(31): a, c, t, g, unknown or other
  modified_base (2177)..(2180): a, c, t, g, unknown or other
taatctggattacattgaaatggagtttnnnttagggcataaaacccaacatgcaaccgtactagtattggtagtgtacgaatcataacatgcatgcatacatcacacatacacataatcaaatatataagtgagttggccgacctgaacagaaaagctcgtgctggatggatgccttaagtcacatttacgtaaacggtaaatgacatgtcaaaacctaatctggaaaatccaaactcactactaagggttcttctattaataactcttataaaaacaccctaaatatcaaggaaataaccaactaaggctctaaatataacatgaatcgacaaaacaaactgttcgggacgcctgcccctcatccagttaaccagttttacaagacttgtcaaactggttaactggtttgcaccaggttacttcaaacaaaaccaaaccttgcccaaatcatgtccaaaccataccaaaccttccaaaatgcctgtaacaacctcaaacaatattttcaagcaatagaagtaagaaaaacacactcaattcaaaaatatcattaatgacccaagttcgagtttttcaaactcaaacatgttcattcaccacataacacatcaaaactagcattaagaactcaatctcaactcaaataaaacataaaaactgaactaaaaaaaattctaaccctagcagcctctaaaattcaaaattgcatgccataaccaactagaacttagagaattcacaaaacatgagcttctagggcatacctcaacttgaatcaccttgaattcttgctgaattcaagaaaattggaagctggctgggttgattcctctggttgtgtgggagacgagcaagagagagagagagagagagagaactgggaggttctagcttcttgattttttttttctcttttcttaatctctttctaattaattaatttctaaaaaaaaacattactttcagctgagaaaaaataagtggctagctgccattctaggattaagccacttaacccaatactaaaaacttaccaaaatacccttcttacttgttacttgagcaataataagcctagatgtaaaatggtccaaaaccatatataactccgcttaaattcggtattcataaaatctgaaaggtttgttccactaagaaataggttctaaacttacccatgtgactcaaatggtcatccatcgtattttccgttatcgctgagcaaaaattataaaattgcataatttatatttaacttaaataatactcttagagtttaataaaatttccgaaattgagaaattataactctaatgaccttttctaaaaataggaccaaaaacataataaaatcataaataattataaaaatatcaagaattaatactgattgtctttactaatccaaaatctaatatgcggtcattacaagtagtccacctaatgaaattggtcggtttggttgggttaacctgtccaaatcgaccactattttttttttttttacatttaattgttatattttaattaattttaataatgagataaatatatatagattgaatttaaagttcaaatcaaccaccataaaaaatatattggttttaattttatattttttaaatagacatataaattatatgtatataaatatatatcataaaaatatataaatatatataaaaaaaactttcttaatcgggttggttgggttgattaggcgggttggtattattttttcaacctgctcaatataaagattgggcgggttatattttggtcaggttttttggtttgtatttttcgtcgagttatctcggtttggtttgtgctggttatttatgtttggacggtttacaaaaaattatgtataaccctactactaatagtcatgagtgaccataatttttacacaacgatctactagttaatacccgcacccccattaattattgggacgcatatagttatataattaacctacgaaaatagagatgataatttttaaactgtccctgatctgcaccattgtcattcctagttctcacttatgtagagacttggtgattttatgactttaaggtcctatcgtacatatatattataattcaaaaaactgttacttttagtgacaattttttagtcacaacataatttttttatgactaaatgtnnnntttagtcacaacaaaatattatttttgaccaaaacattagtatttcgatacaaattgtcactaatttagttttagtcacaaaaagtatggtgactaaaaatacatttagtcataacaaattataatttttgtgactaatacctttagctacagactttttagtcacaacataagaatgatgatttataattagtcacaacctttttacttttaatcacaagttttattgtaactaaaaatacattttttggtagtgttaatacatcacattttccaaatatcataaatatatagttgaaattataaacatgactttaagtaattttcctttattttctaacgaattaatagttagctcaggctcagtcttgggcataggcgagctagacctgtacctaaggccagggccggccctgaaatgtagtgggctatagggtaaaaattattttttgggcccttatttagaaaaaaatggtattttt

SEQ ID NO: 23876 - DNA, 1738 bp, Cannabis sativa
aaaattcaaaccgcgaccgcaccataaaaaatttcaaactgcatttttttttacagtgtggtgcggtgcgagcaatttgtacggcttgatcaacacccctaaataattatacattattttctttttacatatttaatattcataaaattatatatataatatatttgtacgatgactagctcggtcatatattgctaccttcgtgttctcatattccaaagagaataatacttttggattttgcaccatctaaagatattatattattattgatttatttaagtattgaattttacatttatttgataactatcatagaatataattaattataagccattgttaatgttagacatcactaataacatatgtaattattattaaatattgagatttagatttaagtttaataaagaatatcaatcgcggttgcaaactctagaaactcaacagtgcataaatataaacgaagagagaaaatggtagaaaccaaactgagagaaagaaattgttaatcaaagcttaaacttctctatgatgctaacctttatttatagacaagttgtttgtacaattacagaaacaaaaaaattatattacagctcaacaaagtttaacaaactaactaatatatatctaattagttaactaactaaattgtcaactaattactatgttagtttagataaataaacatgattgtggaaaaagccttagtaagagcatcaaccacttaatttaatactagaacataaaacatagatataactcttttgccaagatttgatccctaacaaaatacaaggtaatctcgatatgtttggaccgagaataaaagtcaggataaactgccagagcaactgcactttggttatcagaattggaggttatgagagtgtaaaccaaagctcagagagaaaaaagacaccaaccatttcaactatgcaacaacattagcaagaacctaaaacttacttttaatacttaatctaacaactacttgttctttttttggagaccaagaaattagattactctcaagagagataacatagccaccagtcagtagagctagcccaacattttagtgggggcaaaaaaaattttgaagcattaatgaaaaaataatttttaataaaaaaaatacaaattctatgagaataaaataaatatatgtaaaaataaaagtgaaaaatataaatattatgagaataaatataaaaatatttaaggacaaagatgaaaaaaatatattttttagggtcaaaatataaaatacctaaaaaattatatacaaaatttatatgaataaaaaattgaggaggggcaaatgaccccacatgccccccttctctctgcctctgccaccagtcgaccttctattatcaacacaaaatgcccagttagcaacaaagtacccatttcgaaaggtagatattacatgagagaaatagagaccatcaaatatagttcctttgagatatctcaataaccgtttacatttcccaataaattaaggtaggagcatgaataaactagttcaacttgtttataataaaagtcacatcaagcctggtgagagtaagatattgtaatgctcccatggtacttctatgaagagtcttatcttcaaatggttctttttcatgtaaagacaattttgttgctaagctagttggatttgggaagttcttagcccctttcatgttcaattttacaagaagatttgtaacgtact

SEQ ID NO: 23877 - DNA, 5491 bp, Cannabis sativa
aaaataatttccaacagttttttctctctttatctagtaagtttaaatatatatatatatatatatattacatacatatcgtgggaactagattgagtgaatattgtgggttgagaaagaaattttgggtgagggtttgagagaaaaagaaaagtccttgataaattgaggtgattaggtcatgagcctaagaaatgtcatcttttaccaaactcaaacctaagcctcacaatacaagcctagttaagtccttttgatctaggatataaagctaagctacattagtggagagggttgcactagttcaacttatggaagcaaactttttaaactcgaggatcgagggtagttgttatataaatttaagttgttggtgggaaacatttgcatactttattgattgaattattcttggtaagtattaaggacatagatagcatgcaaaactctattgaaacacacaagttcaaggcatattcattaccaccaattacacttccattccatctaattctgagagcattttcgttgctaaaccaagtttgaaagagaaatattttctctattgcaagtgtgttattgttgcttttttttttcttttgttcttgttgttttgttctatttattttcattactcgaggacgagcaatactctaagtttagcgtgtgataactctttggtatagagttattttttaagcttttaaactagaatgattgttagaagagtagtgaaaatgtatttgtttgcttaattttaattagttttagcttcattctctattttgtaagctagcttttttaagtcttgtaaaaattgttaatgttagttgtattttttctaattaaatgtggttgtttgttattgaaaaaaaagaattaagttattaggaaaaagaaaatgaagcagggatgaagtgggaacaaaagctaaaattggggcaaattgctgaagcaatgctgaaacgaattcaacattctagcaatgacgtgggaacacaaaatttagctgtccacatcagcaggagcgtgtttgttactaaaaatcagacaagttggatgatgtgtaggaggaggactaaacctagtaggcaaaggtgcaaaagggattgggcttctatttttagggtgtcaatttgtaccctatctaaccaacaacaaaaagaaaagaaaagccaagtacacaccatcttccttctaacgtgggcagctaccattttttgaaggagaaataattgcaaaaggaaagtacagcagagggcggccaagcttttatgtttgattttcttttaccctctcttaatatttttctttctcttcttcttttcttgtttcttgtacttagacattaaaaactttgttgaactgtaaaaaacgggcagcagccatgaaagataactttttagcttggacttgagttttttgatttgaatattagctagacttttaaggcttgaatggctatgaacttctatgttgggaatgattaatctttaagcttactttatcattttttgcctttgttcattcaagtgagtttttttattttatttgatttttgtttcttggccatgaataacaatatgctacgctagatcttgttccggaagggctagatctagtagttcaacttggatggagaaagagaaatcctagatttaggtttttctttataagtgggataagaatatttcatttaccttgcataacttaagaattgatgtttgaatagtgttctgcttgctggtttgatataggaatgtattcagctaagtggtagaccttaatttgtgagttttggaaaattctcacaagcctagaggaatttatgttatctctgtgcaaaatgctggaataatgcagaaccgaggctataacaactgggaaaaaacctgactagaagggattagctattcaagccactttttaccatattatattttttcaagcaattttctagcagcagtagcattaattttcgcaagtttaattattgtcattttaattttgaatcattgctcaaccattttcatgttatttcctcttactttaagttgtaattagttgattttacatcatactttgtaattagttggagacgatcttacttatcattttactacttgtttgactacgtatacttgcgtacataattttcacaacagcctgtgcctcttccacgggattttggggaatttcatttccctgaccgcctccggtctcgaccctattaccctgactccttgtatttcgctggacgtccatttaataggacttagcctgcaaacccctaagccaggtaggtcagacaccagtcaaacagacttaataccactcttatggattttaaggaaatgcattaaaataaataattataaactaatatgcttcctaacatgctttaataatgtacgagcttactaaaccgtgagatgataattgtacatgtcttgacgagctttagtagacaaacttggcggctctgataccaaaattgtaacgccctaatgataaggcactctacaataatttttcaattgcattgctatctttgctaatcaaagaattttcttaaaaatcgtgtcaaattaaaacttttactactaactataaaattttataaactttaataaaatatttacaaatgtcaggatcccattgttaagcttttacaaaatatacaaaatataaatgtcaggatcccacatacactatattaatgcactctatcattttttcgtataagtgatggtagtgaactaaccatataagcatgcatatacattaacacatacatacattcacatattcatatcacatattatacgctgttcttacctcttttccaaattcaagtgtgtcggccaacctgaacgaaacgtctcgtgctggataaatgccctaatcacataacataactgggtaatcacatgtcaaaaccctaatccgggaaccccaaacctacaacttatggttctgttattactaatatgaactagaatatcataggaaacagggaatcaccaaaacaaggcattgaaatggacacgaatcgaggaaatgagtttaaattcaactcaatttaagcttagaattcgaaccacacacaaatcaaaccctaacaacccctaaatctcaaaatcacacacccaaactaaaaccaaagcttgaaaaacaacaagtaaatgttctaggggttaccttagcttgaatccaacttgaatcccttgctaaatgagaaattcagcaacaattcccctggttcttgctaggttcgaagagagagaagggaaagagaaagtgtttctttgattttcggcttttttttttctttttttttcttttatttcacaaaatgaataattcccacttagtttactttaggctgaaagaaaaaggctaggtgtcacctaattacttagccacatgtcccacataactaattaccaaaatacccttgccacttaacttacgcaaattcaagcgtaggggtaaaatggtcaaaaaccataacaccgttcaaacccggtattttatttttctccaataaatatcccactaagaataaggttctagacttacccatgtgattacaatagagatccattgcattttctgttgccgccgagtaaaaattataaaaattgcataattcaaatataatacaaataatactcctagagtttaataaaatctctaaaattgagaaattataactctaatgcccacttttaataatgggacccacaattaaataaagtcacaaaaaattataaaaatatcaataattagtgctaattgcctttactaaccattttatgaaatacagtcattacattttatttggattaattttatcactccactttgcctatatatctggtgttggaagactatttttcatacatctcttcattccacaactctctacttttcaccatttcactcacatttctaccattttcattctgccatatttttatattttgaagagcatgtcaagtatgtttatcctttgtcatttttatttcaatctagttatgagcttctaatctttattcaatataattaagatgatgatgaagcaaaatgtaactagataggatttatttttgtatgttgatttcctatttatgctacaaagttcatgaatttttcttataaaaaatatgtcgttttcatcttcaatatcatatgtttttaattgttaaagcatatttctacttagttcttcattatgcaaaaatataatactatttgattcaatgtctttcattaaattgttcacatctaattcttagaatataagtgttatattttgtcaacacatagtttctttaattttgtgtagtttcattaaattgtcacatttaatgcttaaaaattatacattttataagtgaagaaaaatcctacatttttaaaaataacttgtgcttattgagaaaatatattgtgaaaaatataatgtggtttatttcacctatatatgaattaggaatcaatatacttaatactattgaacttgcattttgtgcattaatatcttaataatcttattttacacatcttatttgaaaactactttactttcactcatctttaatcttaaatccttttattacttgtcttttattatatctttgtaaactaaagtctcatcaaatatttggaattaggttagaatattcttcctttgtttgaaaaaagtttcttttgatgttagtcaactcccatggggttagacctcgtacttacatgaacattatatctcgaaacgattcgtgcacttgcgagtataaatattaaaatactcacttttgggtacaatagcttcacaaaacctcgtatggacaagttttgttatttttctcccacaagtaaaaatggatcctaggttcagacaaagttatgttatttaggcccactgatggaccttaagtttctattttgaatccacatgtccattgccagaaacatagataacaattttgaatcttcttcttccaaattagatacagttccattttatttcagagaaatgtgctccatgagctttgtgaattcttcaactttttctactgtacgcttagtttttgcatcttgggattctcgttcgcaatgcgatcattgatgtggtttctgaaattctctccacgaggtcttacctttttgcttatgactttatccattttagcatttattcatgcacggaggtcatttgtggaaaggcttccacttcaatcgtcagaaagcggatgaattttgtccacattgtcactccggttgaaagaattgttgggatgatcttttccttttcaagtggtcggcttttgtgtccgagtactaggtttatctttctacgctgctttgcctttacgatccgtctgacagccttggtgtaacaccctaactattataatgtgacagtcagtagtctcgtgatccgtaacgggaaataccgggtaagctgtgcaatcccacaccgcct

SEQ ID NO: 23878 - DNA, 2778 bp, Cannabis sativa
tattatcaccatcaccataccacttttaccactaccactatcactatttttcctaaatcaaataaaaattagaaaaattatttagagctacatctatcattaccaccactgtcattttctctaaatcaaatatcccacaactcagttaaaaaaataccctaaaattagattccacaaacagatataaactttattccacaatactcaaatgagttttatacaaaaattaaatatgcaaaaaccttaatctactactaaaaacctatcatttaatccacaacttctattcaatgaactagaaatcacacccttactttatgttggaacttatttactctatgttggtgaaatgaactagtaaaataagttactttatttttttaatattaggatgtatttttcattttatagagtgcaaataaaattttcttaaaaatatttatatctaagtagggatgccaaattcacataaccttttgccacactattttttttttttttttttttgaaaggtaaatgtaaatttccattaatagctaaatcagacatagtcaattacatgcagatattgctttgctcaacaacaatagactaactaagttgtttacaacaattagaaagaaaaaaaaaaaaacctaacaacatcttcaactaaaatgactcataagccgccaattgtgaagcatcaaaataatgcaaagaatgttagatttccgtactaaataaacatgtgacaaatcatacctattaatggcaatcaatcaaagatctttcaataaaaattgggttgaaatacctcaattattcaaattagaataaaagagaataacatagccaagcaagccaaggacaaacctattgaaagattaatccatagaaacctccagattagcaaagaaacctccctcagaataaaaattacgacactcattcatttaatgggtgggtgagaacaccaaaaagtctcgccgcggcaacaacatattttatctgcttcaatttctctcggtaaaatgcacataactttcacatacgaactccaaataagctaattctggatgcgttggagagatgaaaaatatatctaaaatttctatgttttaacttttctcaaaatctaaacataacataatcaaagttaggcttgaaattccagctttattttcttataaaattttctctattttataaattatcgttttcttaaatttgactaatttatatattctaagtgtcgaaacttgaaactaaagaaaataagggtaattctattctaaaaataataacaaaaaagaaaaataactataaaaagtgacccaaaaacttaggttaacaatagcctaacacatgtggtcattttcttaacacttaccaataagttccagaaatataactttattattatcgtcaaaaattaaacttaaatatttatatgtaaatagaagtttaattttaagtatttacaatgcaaattactcttttttttataatccaataacatgaatttctctctccgtcaaccaatttgctttacaaatttttttttttttttgtttcactattggatttacatagttaaaactttatataaaataaataatattaataataaaaaacaagatatttatctctctttttaataaattttaaaaaattaagtacacaatatttattaagttaaaagtcaactaatcgaattaaaaaattgaaaattgtctagcgccaaagtttgggttatagtgtgttacatactaaactagtattgattagagcacaattagatatatcttaattttggacgttggcattgaatcaaaatagtaaaaaaaaaatgaaatggtatgctgtagtagtttatcttttattttattttttgagaatagactgtactgtgctgatgttttcatattatttattgccagattttgatatcctaatcaaactaaacaaaacttaaagactaattaatcattaagtgggttttaatttttttttttttgaatgtagggttttaaaattttaaacatggtgtgacatcaatcaataatatgtgatggtgataaatgaactaaaattgtagtttaatttagagaaaatgtggtggaaacaaaagaataaaaaaagaactaatatgatgtaactttgataatagaatagaatttgttcacatgcagtgcacataaataaataaatatacagtactgactccccacctgctaatcaaatcataatcataataatcatatactttgttaattattctacatacattttggtcacatataatatggctctctctctgtaatattatgattggccaagtgaaaataagtgattccccatgtttcgtaaagcatcttcactacttattgaataatatatattttgaaaaagaaaagaaaatttcctctaaaagggaaaattgataaattgggtcactattactattacttgaaacatgaaagttcaaacacatcatcacaaacaatataagtttcacaataattgaatttgaagcccaccacaaacaaacccccaccgacacttggataaattctaaacataaaattcaacagtcatacataaatatattacgtatatatgagccataattttcttttattataagaaaaactcccatgtatgtgacaaccactaaaggaccatcctaataaggcttttttatttattattattatgtataaataagtgtcaatataatagggctccaccttcttggcacgattatttgtcatttaaaagacacgagaaccattc

SEQ ID NO: 23879 - DNA, 4022 bp, Cannabis sativa
accaaagtagtgaaaaaaaaattgattacaaacggagagagacagactcataatcttggaattaaggaagtaaacatgattaaagattcatagcagttaagtaaaacattgaagagtattatgaaatagttaatgtaacaagttcaagaaagagaggagagattaataaagaaacagtaagaaataacatatatgactaagaatattatgcatataaacaaacaagatgaaaatcatgatttgaaagcgatagcaccaaatatgatgaaaatcaaatcaccgatgaaaacaagtataaggaagaaaaaaagaaaacaacaaacaactcataaaccctaaatcataagctgctcaatgatccacactcaaaccaaagtagtaaaaaaatgaaatcgattacaaagggagaaagacatactcataattaaaaacatgaatgaattcctaaaaaatgaagaagagagcaaaaaataccaaaattacctggaaaattgagaatgaaggagagtcgatcgaaaaataaaaagagggaaaatgaagtaaagtaagcaatagggatatatatactagctaagaggaaaagagagaatggactataatttgaaagaaaggcagattatatacttactggatacatttacctctaatgagtttccaacatgcatacaataataataggacagttttcaattatcgacgtagaaatatcttactaactctcacaaagtaaaatatatggagatgcaatattaaaatacaaacctcttttgatgaggagccgaattacatgagctttggcgaaaccaaaaaactcacagccccgagtaatagtagctgctacaacattaactgtgacatcaaacataaaaaggaacaaatgatatcagttttccaaaatcagaaaataaaatgatcaaatacattttggaaaatcacatttgtcttcttttttttttttttgaatttatgtagttatttccagagtaaataacataaatgggagaaaacataagagcaaaaaagaaattacattaatccaaggcaacaaccccattgaagcccatattggccgtaatcctctgtaataagcaccgaaaccgcattccaaaaccgaattcctcacagtttgaacaattgtgagtggccttctttgcccatttccctctccatccaacacttgcagccttgttttgattgtgtcaagtggcatggtattcaaagcagaaacaccactagccattgcagcacttagaccctgcaccaccaaggttgctcgggaaaggcctaaaactactactacaaccatggattgaaccattctcctctttcttcttcttccccatacaacaaccaaaaccactccaaatgagcctgtgtgcaacagaatacgaagcccactaaacaacatagatggtgcatatgtcaatatagatatcccaaaacctgtataaaatcctctaaagctatctgagtatgattttcctaaaagcatataaaccattggtgtaactatagctactaacactaggaatagagttgaactctgaaccatgagtctttggcttacagcatcaattggggtccaaagtccaaaccaattgaatagccatagctgaactcaaccctgctgcagcattagctgtagtatctgaatatcctaatctaacagtgactgtcccaacattactcttggtaacttcaaggactgtcatgtagagcgctctagctgggattgttcccattaaagacgtaccaaaacccctgtagaaacacccttcatggcgcatgatagcaaatgacatcttgaagcatgagaaatcacattgacacacaataaactcttgatcttgaaagattgaaccaaccattttaacagtttagagcaactgtctctatgtagcaacaaaacatcatatgagacattattaaaatcttttcaataacgagaagaagaggattttctccataaaaacccctgccttggttgaaatatcataaacagttcttgtaggctgcactatctacctaatacacaactagaaaacaactcgcctaagccttagccttagccttggccttagaaatatatgcactatcgacctaacacagacaagtttcaaacatctaagagctgagacaatgaaagaggagggaaggacgggaatttcagtaggccaaaatggatagacaagatctggaaatgagaaatcttttccatctgtcttccctaatatacatgaatattgtcaaataaaatgaacaaaaacattgccattgatgggatggaaagtcatcgcaaccacatacttagacttgttaaaaccattacgcttcttctcaaagtcatgaaccaaagtccatgaggtggtcgtcccatcaccatcaccatcgttagtagtactgccatttttgttattaccataattcaattcccatactttcccagtcagccaaccctggactagttcaagatggacgcttttgcctctcatctttgggaaaggctaagggaaattgaatataagtgcaataatttggatcctgatgcaatgagcagcccttccagacggcggtacatcggagaacagatgggctatcatcgattcggatgaataattgacacagtatatcatctgaaataagcatcactgccgccatcgcacctctcctcatcctcgcctcttctcttcttttctttatatctatgtaaaagactgttttttttttttttaatatttttctcaaaaaaaaaaaaatatatccttatttcacatatttatgaagtgaaaattacacaaaatatgattttttaaaactttattataaaaatatggtaaatttagatttgaccactttatatggcatcttttaatttgtagacttttttatggtatttctacaccatatatatgtaaacttattttcaaaagcatatttaatatttagataaatcatttcaggaaaaaagaattatttttaccatctctttctttccttctcttaccctacctctctctccctcttgcttttgtgtggcgtcccctgtccaagctccgatgagccatttttcgccagtaatgagatacaaggatcttagaacattattttggcgctactactgacattgaacgtatcctttctatttctcttagtccttttccaagagaggacatgcttatttggcatcattcggacacggaattatacactgtcacatctagctaccacttagctgagagtctggaatctatgaatgtgcaatcatcttcatcttctaatcgtcaatggtaaaaccgattttggtccctaaggctgcccaaaaaaattaaaatctttgcttggcggttcataaacgatgctcttcctacctccgtgaatctagctcataggaagattacttctctactgcttgtgcactttgtacttgtgcgtgggaattagtaggacgcacaatttttcggtgagattgtgcaaaggctgtgtggagaaagtttcatttccatgtatctatgccgaatattggtaatattaaagactgatattttctttcacattgctgctgctcacaataatgctgatttagagaagattacatgtctaatgtggtgtatttggtctgaacgaaacaaaaaaaaatacatggtaccaagcctaaaccaaacattgagatgttaataaagcagtccatgctttagctaaatttactcggatgaagatatttcttgattaggggaaattccctcccgaatctactctgttgctattaatgactctcaattttaataataatatttttttctcaaaaaaaactatctacataatttataaaatagctacataatttttattttaaatatataataaaattatttttttatataaaatatctatataatttatattttcaaatatataataaaatttatttttttatataaaatatctacattatttttatttttaaatatatataataatattataaaattaatattctcttaagtaattgacatattctgtta

SEQ ID NO: 23880 - DNA, 842 bp, Cannabis sativa
gaaaaatataacttaagtacgatacgacacaaaaaatctaaaagataaatccaaaagaataacaccataaaaaatcttataatctaaaaataataataatttaagttgttactagtaaatgttaaaattttaatatttctaataactttttaatatgattattagtcaaatattattaacaaattatcataagataattaatgctaaaaaatacatataatttagtaattattttataaattataaaaataaaatacaaattcgagcccatataagaaaacataccaacccaagcaaaataaatcttacaagacatatcggattaaccctttaaaaaatattataacatacgatataatacaatacaacttgtattttaaaaaatatgaacaaaaaaaatatgaatcgaatcagatatttaattacactactaccttttactatagtgctaaatataggtgaaacaaatttagcaatttttttaaattaataaattgttgacgtggttgcttgtgagtggtgtttcatttttgtggtttggaggaattatagtggtgactatttggacactcatataaccacaaacactctctctttctctctaatttagtagtcacaagagaatttgagaatgtttgaaacatcattttctcatcttagattttagattaagatttggaatatttagacaaaaattggcaataaataatgacctcatgatgtttgtggaagcattattggttcatttgtacaaattctacacgttcattattgtgtattaattcaaatataattaaatagaaaaatcaaatttattcatggcctaaattgctcataaatat

SEQ ID NO: 23881 - DNA, 5791 bp, Cannabis sativa
gtaatcgtcttgcaatctgtctccacctggtgaataggaaagcattcttcgatacaccaattaatcgatgtgaggagtgcttttgcttcaagggttgccacatcacctccgccgagatgagaattggctacagctgctaccacctgaccttcactattgcgaattactcctccgaaacctgcttttgcgctattcttcgggatagctgcatcagtgttcaatttgaggcaaccgtttggaggaggctcccagacagagactggggggggcctagtcactggacccagagactgagaagcttgggaggaggttttgtactctgccagaaagctgctagccagactgggaattgcatgattttgatcctgcgcttggttcctgagagctctattcctgttatgccaaataagccaagaaatacagaggaaagagtctacttcctctttggtcagtttagtatatatcaagtgtgctatgtcatgaaagaaacagtgaaaggcaaagagtaaatgtaactatgaaaaactgtacctttccagacacttcgaacgttcctgcagaaaaacagagcatgggaaacagtttcttcttggtgaccacagcgatcacacaaggaattagggaggattgttctaagagctagattctttttggttgggagggtattggtggacgcacggtagacaaaatgcttgaccttgggtggaacatgcaaaagccataagtttttccaccagggagatggggaggaaggggaggggatatcaggaggagaggtcgaggaaaaactaagatgataacctgatttgacagaataggttccggacttagtgagcttccagatcaggttgtcattcatgggcgataagggtagaggaatggataggatttcttggacaatataagacggaaaacagctctgaagactaggaaggtcccaggtcatattgggtgaaataaaggaggacactcgatctgggattggacctataggggtgactctgttatgcccaggaatccagttgtcaagagtagtagaggtgttctgcccattgcctattttggaaattagacccttatgtaataactcttttccccaaaaaatgctacgccaaacaaaagagggggagtgcccgagagagcaggtcataaaactggagttcgggtggtatcttgccgcgaggatttgggccaccattgagtttgggtgcttgaggatgcgccaggcttgtttagcaagcagagcctgattgaagtgaacgagggagcgaaagccgagcccaccatgcttcttagacttgcagagcttaggccagctttgccagtgaattttgggtcggttgttctcattgaacccccaccagaagttagccatgatggattcaagggaacggcaagtggagacaggaaggcgaaagcaggccattgtgtaggtggggattgcctgaattacagacttgggaaggatttccttgcctccttttgagaaaactttatgcttccagttgttgaggtgagcccaaactttgtcgtggagataatgaaagacttgttttttcgttcggccaatgtgttgtgggagtcccaagtatttctcaaaagatgatttcacgggaatatgcatgtaatccgaaattaaagtctggtccgtgagggtaacatttggggagaaatacaaggaagatttatcaaaattcactttttgtcccgtggcccgatcatacaagcttaggacctccttaatcgcgttgcaggatgttatagaggctcgacaaaagagaaaactgtcatcagcaaaaagaaggtgcgagattggaggagctctgcgggcaactttaaagccagataaatccccagttcgttcaaattgccgaatgatagaagataaaccctcagcacagagcaagaatagatagggggagagagggtccccttgtcgaataccacgggtgggagtgatatggccaaagactttaccgttaacattcatcttgaaagtggcggtcgtaatgcaatcaacgataagcctagagaaacgcgggggaaagtccattttctttaagatagcactaagaaaggcccattcgaccctgtcaaaggctttagccatatcaagcttaagagccatccaaccttttctcccttgggatttgagtttgatggtgtgagctacttcctgggcaataatgatattgtccgagatgagcctaccaggaaggaaagcactctgattagaagaaatcagcttatttaagactagcttaagcctatttgcaatggtcttggagataattttgtaaatgatagtacaaaggcttatgggtctaaaatccttcaccgaaagaggctgcttcactttcggaataagggagatgagggtagtgttgagaaggctgatgttaccattctcattcaggaaactgagagcagctgagatgacatcatttttcacgagagaccaattggctttgtagaaattagaattgaagccatcaataccaggagctttgtcagccggaagctggaagaaagctttttcaatttcatccaccgtgaaaatttcatcaagcagagatttgtcattatcagtcaagcgcgagtcgataccctcaagggccagatgcatgtcggaattagaaggattggtggatgtaaagagcgcttggaaaaaggattcaatttcgtgattgatgtcctcttccttggtaaggagagtgccactggaattatgaagcttaagaatcctatttattcgccttctgtgggacgcatgacggtgaaagaattttgtgttcttgtccccctgggctaaccactgggttctcgatctttgtttccaataggtttcctccttgtaaagaagagcatccaaatgagagtggagacttttaattttgttcaccgtatcgagatcccaattcgagctattcttagcttgctccagttctttttcgaggctagaaatgcgatttttgaagtggaaatttttcttgtgattccagtcgtttagatgggcagcgcaatttgattgagtggcaaccaaacgaggaatgatctcaagattatgagttgggcacttccaagccaaaagcgcaacatcatcccatttgggctctgaaagccagacattttcaaaaaggaaacgtttctgaccgtggtcctgaggaggcttggatgttccttccgtggtaagttcaagagcgcgatggtcggaaccaaagaaacctaaatgggaaagaagagcgtccggaaaaaggttagtccacacggggttaacaacgcaccaatctattcgttgttggatgtttttgggggcagcaacatgattgttccatgtgagaaggggtcctttggggtcaataggggctaaattgaaggaatcaagaaagcgtcgaaagtccatggaaggacctcggtcaggatttccgccttgcttgtcatccaaactgaggaacgcattaaaatccccaattataagccaaggatcagtaggattattatccccgatcctatttaaaattcgccaagtatgaggcctttgggctacgaatggggaaccataaaaacacgtaagatgaaaaaacttattatcaacaggaaacgagacataacaatcaaaatgactgatggattgagacagcaaagttaaagttacatcattgttccataacaaaagaaggccaccgcctctacctattctagggacttccagaccagagtcaaattttaatttaattcgaagattgtcaacagcatttttaactagtcttgactccataacaaacaaaatgtccggtttacaagaagaaactaaacgggagaggtttcggaatgctcgttcactcccaataccgcgagcattccagctgagaagcttcatggctgcaggcaggcctgctcgaaggccaggcctgcgctatcaggggagtttccaggctcggtgtagctctcggagcgagagcgcttgacagtttggcgaagctctccattgaccatttcggcttgtcgtttaaacctttctttcactttgactttgtttttcttctgtttgcccgcggaactggatggagtggccgtcccaggatggtagtgcaagttcatagcctccagtctcttactagtatcaaggagcggaatgtggattgggagaggaacattgcaatgcttggtactaatggctttggaggtacttgagctttgcgagttagaggagaggctagaagccgaggcttgaggggctgtttgggtactagtggtactcatggtggcgcttaaaagagctgtaaaagttggtgtgttggtttcggtttggggagggggagctattgggagttgagcttcgggcacaatgtcatttgaggggacggagggaccggatttatagagtccaactaactgagattggccgagtgtggtattttggtctgggggtgtgtaagtaggaaaagccggcacggattcgtttatggaaacgcacacattacttgccggattcgtggtcatgaactcagcaacaggagtagcgaaagtaagctgttcaggacagtaaagcatgggattagtagaaaccttaactttgcccgttattgttttgatatcatacctgagttcagggggcagtggggcttcatcgcaggccttcatgtattcaatacagcctttgttataactgtgacccatgcggccgcaaaagaagcaaatgtccggtagattttcgtacttgagttcgagccaaaccactttgtttatccccgtaaagttaacgggaacacctcttggaagtggttgtgccacatcgaacataattctaatgcgaaaataaggaccccaagtttctcgaaaagaaggacggtagacttctaggaggtgtccgagagatgaagaaacgagggccgccagttggtcggtacgtctgagaatttttatgtttttgttagaatttttatttatacgtgtttagtttggaaatatctctttagtaactgaagtttaagtttaataaatatgaattttcatttaaaaaaaaaaaagttttaacccttcactcttggtagtggtacctatagtgtccacatttggtggtaattcatttatttggtagaatgataaattattttgacttcttaccaaaaaaaaaaaaaaaaaaaagaaaaattattttgactttttgtaatcataataaatgtggacctatttgtcaaaataataatcataatttattttgtattgttactttcacctataacatattttcctacttatacaaggtattttaattatatcatatcatcagatttatataaattagatacatgtgttagatattaattagttacaaacataatttatcacaaacaaatccaacgtactacttatattcaaaatcactgctagatatgtgattttattttcctcaatgaataaattgttatgttgtgttatgatgaagtgtaaagaccattttcaatgataaaaatggaccgttttcaatgataattgtacaataatgttaatatttattatgttataaccttacaaaatttaatttgtctatggtaataaataaacatacctgatctcaatgtaaatactaaataataaattattgataatattcttaattatttttgaaaatgtaaatttaaaaagtgaattatttgatttcttccccttagtaaaatgagattattttacaaatacacaaaaacaacaaaaaaaaattataaaaatacagttgttgaccgagattttcgacaactaataaaatattataaaattattgagctgtaag

SEQ ID NO: 23882 - DNA, 2957 bp, Cannabis sativa
  modified_base (2923)..(2924): a, c, t, g, unknown or other
gcatacagataatagaaccggccgcactattttcataaataaaacaaaaataacggctctgtatgtaattttaactacttctaaatacataaaatgatcaaaatcacatgactacgttaattcaattcacaaacatacggtactgaaattacaacaggagagtttagaattttaactgcaaatgcattgagaattgtaggatgtgaacgatgcaatttaacaaaatttgaaagtacacccaatataattagactggacatacacataaacacatcaaaatcatatacaattagtcaattacattattaatattaacaaagaaaaaaaaaaggactcgtccagtttattataattaattacatctcagctttggtcgccttaatatcctcaccgccagagggcttatgatcttgttcaacaatctcaataatcttgagctgtctatttctctcttcgggctgcttgggtaccgtgatcctcaataccccattctcaacatgggccttaatccgatccaaatcggcattcacaggcaaccggaattgtctccagaactttccactgatcctctctgaccggtgccacctatctccctctcgctcctcctcggccttcaactcgccgctgattctcacaactctgttctcttccacctcgattttcacatcttccttcttcacacccggaatgttgacggagatcacgtgctccgtcgctgtctccttccagtccgcacgtgccagcgcccgtgattccgcttctttagtaaacggcgtttggtcgaggattcggaatgggtcatcgtcgggaactatgtttgtcatcgcctcccaaagtggcctcatcgtcctgtatggaactaaggcggttgattggagaatccatactgagaaaaacataagtgtagaaattgctagatctttcggtttagacatttttggaagatttgtgatcggaatatcaattaattaagactatgttgggacttgtgagtgagcttgattagtatgttatatggtgatggtttgattaatagttaatacattatgtatttatatatatggtgattggttttctcgggtgttctagtgatttccatgatatatggaaagttccagactaggaggatgatgtactaaatgtttgagattttataacaaaaaaataaagatatattacaacttattttcaaaaaaaaaaaatatatattttataactctattataaaataatacaaagattgggatcacaataacttgaataaggtagtctaaaagcttatttcccctatctctaatcaagaactctagaatatagtttggggattatcaagtctgggttatctaactaagtgctttcttgatagaaaacttatctttctcaatatgagcaccttatagctctttatatagtttttaagtgatcacacttagaattcaaacacacaacacctcatttctctcatataaatgagtactaatatagtttgtaacaactatattttataccatttgaattccaccataaattgtgtaacatctcttttattacacaaaatatgatcaaccaaaagaagttacaaaaataattaattttgtaattcctccccatattacaaagtgtaggttataattttaggttaaataaattatatgttacacaatttatttaccaaacacttaatatatattattcagataataatatatattactacattttcatctacatattatattattaaataatataacactagaaagaggatttaaatcgcttgtcaaatgctttgtccttttcttttgaccaatctgcaaactcaacttctattttttttttttttggtgggatagcgtctatttaaacttattatttcgaaccattatgaatgaaaattgtttaaataatcaacatttttaaaacatgtcacttttagcactaattaatattagacaacattaagacaaatatgcaataagatttggggctgaaaaaccatgcaactcacgacgaagagaggaagtttcctccgtaacttgtgtcaccgtgaagaaaaccaacagtgagctcgtggaccactgtggtgatttcgtcagggatcactactataatatgggcctttaacttccctttttcaatccactttatcaaaaagagaaactaaagggtgtgaaaataccccctgattcgaaattgacatttagagatgattttttggtaaaacccgtaggtataaatattaaatatatcctttacagtcggttggggttagaaaaatttaaggtttatttatataccctatgccgtcggttcttagcaaataaccgacagcataggtgcacactttattaacattgtgtgcacctatgccgtcgtttatttgctaggaaccgatagcatagggtgtataaaaataaccctcgtctttttcttccccaagataaccagccacccccatagcagactcccgaaaacccacgaaaatctcgccaaccaccactaaaaaccccctatctccctcatttcttcacaatttcatcccatttttgttttaaaattttttatttttaatatctaatcccatacactaaaaaagtttgttttttcacccatttgcactgtacctgaaccaattttttttaaaaaagtagtggtataaccccgaccaccgattttaacagagaaaacgttgaatctcaacgtccattaaagtataaatataatttctattcattttattgacgtacactggtattatttcatttttgtaaattttttttggatttttttattttattaatattaaattgtgtgtgtgctataggtagccggatttttgtctcaatttatcgtcaaattgcatttataaggtaaatatttattaacttaatgtataagatatatgtatatattttgtgttttnntattgaatatgtatttatatatattgtgtatat

SEQ ID NO: 23883 - DNA, 2486 bp, Cannabis sativa
  modified_base (1087)..(1092): a, c, t, g, unknown or other
ataagtttttacaactttattatttttttatttaatatatgtttttttaaaaaaaaataaaaattgttcatcaatgacttcaaaatatctatacaaggaaagagcaagttgagccataaagtaggaaagcaatttaggtcacgatacacacgtttgatatgaatacgactcaagattttatgggttggacacgacgatgcaagaattttggttcttgtgtttgtgttttatcaattttttatgttacaggtcatgttcgtgtctaccatctaaaataaatttaaaaattcaacataacacgaacatgacatgatgacattaaaataaataatttagcttacaacccgccaatacgacatgagattttgtaggttcggcatgacatgaacttatttgagtcgtgttcgtattcgtgttttataaattttttgtgtcacgtgtcgtgttcgtatcagtaactttttagtaaatttaggatcttagcacgacacaccaacactatttgccactccaactgtaaagcatgacgaatagaagaaagttcgatcccaattcaaaaagtacatgtaacattgtttattaatgcatgattggctatagtatgtgctatttgattagcgtccctacaaataaaattcaaattaattacacaaccatgtgtaatattaatttattttaatatgaattaataaatattattaatttattttaagtaatttgtggcgtaaatacttaagtttaactttcgattgtaataaatacctatgtttaatttattacgataataatacataacttatatttctgaaactttcctagtcacctggtcattaagtgttaagtcattattcatgtctcatttttcattagtatatttagattaatttttaaataaaaaataaaatttaataatttggactaatcaagaactgccacgtggccattaacttaatacttagtggctaggtacttagggaagttccaggattttaacttaagtattattactgtcaaaaattaaacttaagtatttatctgtaactcattttaatatgagttacttgattatatgcttatttaaatatannnnnntgtatacatattaatttatgttttattatgaattattgtacttattaaatttataaagaaaataaatctaaaaaagacatacaataatctttagaaaataaattttaaaaaaagttaatcctcaacaaacttactaaaaaaatatttttaaaagcattatactaaaaaaaaaatatttttaggagaatatgaaaaaaaataaaaaaattactaattaagtgttctaaaaagttaatttaaataactattgcatttagatttttagaaaggaaaaaaaaaaaagaagaaaaagaagacaatagtgtaaagacaaaaaatgtgtaaaaatattactagttaggttccactattactatcacatttgttcaactttattactattagatcaacaattaagggctaaaaaagtatccctaccatagggacaaaactaatatctctaccataaacataaatatttcctatatacatgtttgagagaattatttgttttcaataatctttccttttgggacttacctaaattccagtctattttcaatcatgaaactacgaataacataatcaagggagataaaccctaaggtcagggtagggatagttgaatttagactaaagagtcaaattgtttattctctattaagtcggcctatctggtccagaccctaaatcgtgctcctccttgcattgttgctcctactatgtgaaataaaatttggaattcgaaaattttggagcgtcacgaggttttttggtagagcattctctctaacgccctatctattctctctattctagctaaaaggttgcatatggaggaagtttcctgtccgatttgtggagagggagaaaaaaatgatggaacacgtttttttattataactttgtctttcacctttggagatctttcccatgggttatttttccagttttggaatatggagcccgtgtgtggaattgagttaaatttctttaaaatctaaaggctagaggtgtggatgtttaggagttgttcctgtatacttgaattgtagtcgacacgatatggaaaacccgtaatgataagatccacaatcattctatgtgtaatattaaacaatatattgactttatctatatgtgttacacagattatggttcttgtttgtttgcttccccaatgacaactaagtctcctacttggtccccctctctggaagactaggtcaaaatcaaacgtgatattaaagttggttgcaattcgatgtgtgtgatgactttggctaaggatcgtaaggagacaattttgtaggcggcttccaaagtgctcaacttctctgaccttcttctaattggagaatttgtggcatgtctgttagttgtggaatcggcggtctcgaagaagcataattttg

SEQ ID NO: 23884 - DNA, 3536 bp, Cannabis sativa
  modified_base (2012)..(2028): a, c, t, g, unknown or other
  modified_base (3470)..(3490): a, c, t, g, unknown or other
gtgattagatctaagatcctggtaaaataatttccaacagtttcaatcccgagcgccacccacaaagcagcccaaccaccttgcatcaccaacgaagttccccaaccatcgacaactacccacgaaccgagaatgtggaaggttagttttattttataaaatattatccatttaaaccctgaattatccattcaaatgatcagtggtttttttttttttttttgtaatttttgtttattgttgggtaaaaaattgagttttggtgaaatttgtattttttgtgatttttttgtatatggtacgatggggtacgatagtggtccgatggtaggtacgatagtagtgtaatttggaggttagggatgaaggtctgatggtggttcgatgcaagcccaatgccttgctgttgttgaaatgagcaaaggttgaagacataggtttgatgtaggcccgataatggcctaatgctacccaattctgctgccatcaatataagattttctacactctcatgtgtttaatttcatcgtattagagaattcatatttagggtgttaattaaacatacatgttagtaaatctagattctggtaaaataagttctaacaattggcctcagagccatgataataatttactttcatgaaatatggatttaaaacgatgattgtgatgatttggatgtgttcatgctggtttatgtccttaattgatgattgtatgttcattacaaatttttgacaaaaatattttttagtttcgtactggaagaattttttttagaaagtagatgaaaaattaatcaatcttttacggatctcaatttggattaaaattgagttagatatgatttttcaaaaattggttattggtggagatacctactagcgtgcgcggatcagacacgatttgtctaaaaacctcacccaagcacgctcagacagccctcttgcgcgcgtagacccccctttttggccccattctctcggccaggttcgagttatgtggcatgacttgcatccaaacttgatcttatcatatcttgagttttaaaaattattttttaatgattcaaaagccataatttattaattttttttatatagaattcaaattttaatttaaaaaccaaaatataagaataaaaataatttttatttattttttaaatgataaaggttgtttttagattttaggaggtttacaaatttgaaaattaattattttatttggatttattaattttaattataagatcaaatatttacatattttattaataaaatatgaaatgatcttattttgacattaaaatattaataaaatttaaagataatctagagaaattttaaattgctaaccacatcagattttaaaaaatttatcatttttaaaatatattttattaatttagattataagattaaataaatgttaattatttgatattttacctgattatgatctttatctaataaaatttatatttttttttattaaaatgacatgcaatgttttgaataattggttaattttgtttgaatagatattttagggttttctaaacataaaattttcaaatttaggatatttaattttatttattttttaagtaaaattgataatatcctattttcaaattgtttattttgttaaatttaatttattaaattataagtttaaaaaataatattagaaatatcttaattttataattaagatattaagatatattattttattagatatttaattaatttaaatttaaataaattatatattttaaaattagttggatatttgaatatcaaatttaaatttaagataattaggagtttcttatattttaaatattttctaacaacctaatttgaattcaagttaagatattttttaaatattttattttaaaataaaaatatcttaacctactttcgagatattgtacatgtattatttatttatttaattgttttattcaattttttaataaacctattatttatttgatnnnnnnnnnnnnnnnnnacttgttgacagatccaataatctaattttattcatagtccaatcatcaatagattaaacaaataatttgtaacagatacattttgtaatttctttaatctgtgataaacatagtaatatgataatgcccatccaaatcttttttcctgtgtgagcctatatgtttgctattgggcttagatgcatacatgaaacccatttatttctagatatttaagtggactaagctgctaaaataaaataccacctatgatagttttatttaggcccaattggtattgggcttattcaatgaataacaatcatttaatgaaaagttgtattactctcttttgggccttgtgtgagagttaggggcccatagtagtgggtacaatatactggaccgccaagtggcagaagaataaatataaatgaagcctctctgaagacaggtgaagcctttctgaagacagcataaacagacccgcaaatttcctaagacaagaacaaggagcttcttgataaggtaaggaagcttgaggagctccatcaggtagatctcgagaaagtagctagtgcaactgtagagcataaggagcttcgtgactttcagaagcaagctaagctgaaggcctttaaggctaccctgaaagctcttgtggctccaataacttgtgaggagtgcgtgaagcgttttgaacacggcgtctttatgacatgtagatccaaaaattttgagcccaaacttaacttcttgcctgattgagaggttgctctagcccatttttgggagaagaataagaaattagaggccaaactggctgagaccttgggtccttgtttacctcccaaagccaactaatgtaccatttttaggacttctcttgttaactttctcctctctctctctctctttctctttttttttttttttttttttttctttttggtatgttggggagacttctaattagcatatccttgaggcttttaattttttaggagagacactttattagcgtatccccaaggctcttggtatattcactcaccactttctctttcttatatgtctctttagccttgtgagtaatgtattttgagtttttatgagttatttatatgatttcctactacccccaagtgactaaatagtttcacttttttgtcactttgcatgaattaaaaggatagtatattacataaaggtcttgtcttacaataggtcctcattgaaaatttaaagatgaaattaaatattgaactcctaactattgatagtatttgcgaagatgatcagcattccatgctctcggtactagggatccatccattcgtttaaatttgtaggtccaaaagcttatttcatcttcaatctcataaggtctttcccaatttgggcctaacacccccactctggggttctatgagatgggaaaaacctgttggaaattattttnnnnnnnnnnnnnnnnnnnnnacaagtatgttgattaacaccctcaatatgaactttctaaaacgat

SEQ ID NO: 23885 - DNA, 2685 bp, Cannabis sativa
gtctcattaagtgagttctagttgtaggaatttcagtagggccatctatagtgagtggtaactagatctatggtttgttattaatgacctaagtttatgggaggtgtgatatttgtagtagaactaggttcaccacaagtattttggttaaggttgatgggaggtaagaagctttcagatgtggtacctggggaaatattagggatagaatcaattgtaagcatgttgtggtgagtactggtttgaggaggaaatggtactaaaactagtatgggattctgcattggttcaagtgaagaaactatttggtaaggattttttttgaggaataggtgggatatgttcaattatggtgtgctctctaatgactaatgaatgttctattgaggagacattaatttggtttgtctcaatgatatgagagggcatgacaccataaaaactaggattagtgtttaattgaaagcatgatgtattaaaactagcagtaggaacattaatttaggaagaatggacctgacttgtggttgatgaagagaagacacctggatagtgacattcattaaaaataacattccttgcagtgaacatccttccttgagcattttcacatatgtagcccttgtgatatggtgaatatccaagaaagagacattgttcagacctgaaattcatcttgtgagaatgataaggtctgagatatggaaaataagtacatccaaatggtttcatgatggcatagtctggtgattgtctaaataggccctcaaaagagcttatgttattaagaatggaagtagataacttgttgatagtaaaggtatcatattgaaggcatgccactaataggagaaatctaaaccagactatgcaagtagagtaaggcctgtctcaactatatgtctgcgtttcctctcagccctaccattctgttcatgtgtgtaaggggaaggggtgagaaaatgcaataccttgatctgacaaaaatcttttgaatggcttgtattcacctcatgcatcttcttgaatacctttgataggtaacccaaattgtttctcaaccatagttttgaatttgaggaacatatcaagagcctgagatttgagagataagggatagatccatataaacctgttataatcatcaatgaaataaatataatatttgaatcaatctttggattgtatatgagaaggtccccaaagatcagtgtgcactaattcaagaggttggctagctcaagtagaggatatgattaatggcaatatgtgattcttgcctcgcttaataggcattacagaatcacagtgtcttaatagatccagtatggggtaatttgggaagcaattttcttaatgtagctatggatggatgaccaagtttatagtgccatgtgtttatatcattaaaaatagaagcataacaagtagtaagcaaagataaattggaagaattttctttattgagatgattgagtacatggaggtacatcattatttatattacagtgattgaagttcaaactacaacatgaacactggacaaacttagatttagtggtgagaagacactgtaggaatgagtttaacttgtttgacacatcactcagcatgtatagcccatctttacgctttcctttaaggagaagagtacccgcttgcttgtccttaacaaaatagtagtttttgtgaaattcaagaaagatgtcattgtcatcaattagcttagaaatactgacaaggtttttagttatggagggaacttgtaaaatagattacaattttaaaggataagagggaatataagatggaagaatagaggtgcctacatgggagataagtagtttcttaccatttactacaaccaatgtcttagtgccattgtaagcctattgagtttcaagagtggagttgtcgaatgtgacatgagctgtagctccaatgtcaacataccagcagctatcatcaccaaaatcttggaccaaagtggtggagtatgcctggggatcgtactcgaattcaggttctgtgagatgagcccttcgtggaggttgattggatcttggaaccatccaattattgtcaaacctataatgacaaactggagctatgtgaccaaatctgagacaaacttggcagatgacatgttgttgattgtatcaaggatagccctttccacggcctgatgaggattgaggaagatcaaattgtggattcttggaagtggcaaatggtcgaacaccaccagatctcccatttccaaaagcaagattggcttgcattctaacaacaagatcagtcatggtgatgttccaacctactcgcatgagacaaaagtagagcctgcacttcttcaattgttaaatcatcacttcttgatgtaatgccagatgcaatcgagtcaaattctaggccaagaccatttaggagttgaagaacgagatcttgatcattgacaggggaaccagcaacactcagggcatcagaaatggattgaacctcgtcaacatactctaagataaagagatttcctttttgaacattagagaattggcccttgagttgaagcattcgagcccgtgtttgagtggaaaatttttattctaaagcacgccaaacagtatcagatgtgttttaatttgcgactgaggcaagaatgctttctgtcatggatgatctaagcca

SEQ ID NO: 23886 - DNA, 1808 bp, Cannabis sativa
attacaaagggttgcggaaaatcactagagggagtctaaatttatttaagtaaattgcctttgtaatatttgatactttactaattgatttcattctttgagcgtagccccgtcgactaggagtatttaaaagaaaactgataccacgtataattctcttgtgtcaatttttttaaattctacatttcttaattttcggttctagtttgattctacaaatttgtgttctacagtgacatggttccattctattgctgcagactgttacagttatatatatatatatatatatttgaaatttagtaaaattatttgcatttgtaaaaatacgatttttcaattagagctacattgtatatcgttatataaaaaataaattaagttaatcaattataaaaaaaatatctttatttgtataagcaaaaataatgtccgtacctacaaaactcttacatatacttatgtaatattattttgagtaaatactaatttgatatcttatattttatcaaaatattttatatttcaataaaattaacttgataatctataatttgaatttatatttagtagtcaacaattaaatgtaagaaataatttttttctgactaaattgttcatatatagttatatattaataaattattaaatttgaagctactcacatagttgagcgaagtcgtaacatattaataaatttaattaaataaatctgagttcaactatatattaaatatgtatgattttaaattaccaaatatcaaataattttattttatttgtttgaatgttaaaaaatattgtaactagcgaataatctatatagtaatgttagtaaatatttaattgaggtgtccaatcgcataacaaggtaatactttatgagtttgctaacaagtttttgtattatttagtaagagtattatttttttggcagtttaagttgtccaacatactcatgtaacttcatatagttagttagcaattttttatattgttatcctaagatctgaacagggtgatgtgacactttttttagtgacacgtggatcatttttagacatgggcggagtatccttgatatgtagtccagggtaaattattcatgagatgcaatatatttggagaacaagacaaaggtagcgcgcagggtaaaatgacaccatccacccaacgtcaattttacagcaactccgcatatgcctccaaggtaagtgcaacggagaaagccttaaagatatattttttcctttatttatcaattaaatccttatttttaggagattttcacgtaataataatataatttaggaaagtaactagttttcctttttatttcttaattattttgggaaacctaattgatgtaatcctttcctataaatagtggagtcatttcactatttagggatccactagtacaagctctgtaaaagctctcgagagagatcaagagttcttgcttcttttctccaagctaatacaagtaaaagaggagtaggctatttccaccattatagaccaaacctctataagaaatcggtgttcttatttttctcctttattattcattattgtttattatctctaatcgctttaattaactcaacgttgttggctaaaaataagattaatatttcagtgctttcattgagagttgaactcaagaacaaggtggttgttttgattctcttaaaaacacagaaagatggatgtaactacaaggaggggcaatcccattgaaacaaccactacaagaaaagcaatttttgccggcgcagttgaccaattgcgccggcaaaagttgt

SEQ ID NO: 23887 - DNA, 3333 bp, Cannabis sativa
catccagacttgaatgttttttgtagctccgtgaggtgggcgtaattcttaacttagcacaacacgactgaagctcctggaggggcttctcggacatgaccattaggtctcagactgttgtctaaataggtttaccttaattactcttcatatttaggctctcctaccacttggtcgactttgggattgccatgtgtattaggaaaaatccagggcaacagttagcgagggaaaaaagtttgaggttgagtacaataactacagacaacaatggggaaaggtagcgatgaaaagagttacctaaattggaacatgggtgcgaattaatgttccactttgagacatatcgtggcctagagtgagtcaggacattaaaaactaattattggatgacataaaggtaaacttaattttactattcgtcttttttactattagttgtattttgtacttataactatgattgtcaatttttttaggccgcattcgatataccaaagacggataagaaattaaccatttcaaaaggtggagagagatgaaaggattggaaaaataccctaataaaaggtatttttacaatcaaagatgtggctacccaacttctttataaggtaccgaaactgtatgaaagcataatttatttgcaacaatggagagagtttgtggctagaagattgggtccagacattgaggtaaggagaaaaaaggcccgaaagggaagggcaaaaagtatttacaactatcacatcggatgaggtggtgtaaggatggttcaagaaaaaaaataaagaaagaggcaggcaaccaaattaccaaatttgatagatttgaaatatggaaaagacttcacatgaacacgaaaggcatggtggaggacccaactacaaaaatcgttaagcagattgtaagtttaaagtataatttcatttatactgttgtgtttcataatttatttctaactctattttttatgtttgtaggatgactttcgtaagcaagtggaagagggagttatgcatgtaaaaggtatgagggacgtgttgaccatagcactagggacaaataagcatggtggtcgggttcgagccatgggttattgcatcacctaggccaaatatttcaacacaccatgccctaaaaggaaaaatacagatgggtcgaacaagacatcatcagatttgaaaagacgcatctatgagacagaggaaaataatagacaactgcaggagaaagtggatgagcttatttgtctagtttgtttctagtatagtagcattgcgggtacatcccatgcgacaagttctatagctggaggagcatcgaatgaacaagcccatgctgaccttgcctctgatcctgtagcacaatcatcgagtcttgccaatgtctctacttcaccagatcccatagcataaccattgggtgctgccaatgtctctactccatcacgactgtattttaggaaggtttttgctcccgcaacagcaccgtcacctactaatggtagttcagaagaggtaatcttaatattattttacgaattgatctaatgcaaaattaaaaatatggtcaatttacaaactgaattgttgcttgtttaatttggatatgcagacctttttgtattggatgcattgttggttggagcctagaagaggtaatcttaatattatgtttcacttgatgcttgtactcatctaaccaagtacgcatggtggcgtacttggatcgaaggaatggcaacataccagattatttaaaattcatcatatccatgtgagttctatatcaaacatcccaatttataagcgtgttttatcttgataaatttatatatgctaactttactttttgtgtagatcattcaccatttacaatcaaatgacaaggtaacctgatagacctatccagtggataactcttatatgtcttgaacagcgagatgacaataatgtagatactacgtcataaaattcattgaaaattatatgacagtagaagatccaatactagaattgacataaccggtgaaataattaataagtattataatgaatattattttttattgaatagcatatgataataagtttttattaattaatatttacatttattttacagtgtaagttctccatttcgtacacaaatgacgagataaatattatgcatgatcggtggattctttacgtgaatgcaaaatcagagcgacaatgattgcgttgttgatcagtgtgtatatatttcaatttattgttactatatatatatttataaatatatttagatgattattagtgttagtttaattatcattactatatagatttttaataatatttagatgatattagtgttagtttaattattgttactatatagatttttaaatatatttagatgatattagcattatcttaattattttgactatataaatttgtaaaaaaattaaaaattaacgcaggaaaaaaaaatggcagaaaatcaatatttttcctctatgtttataatgtaacgattgaaaaagctgtcgccgaaaaaaatattttaaacttaaaaatcataacttgtactatatggcacagtttaaaaacgttgcatataatggagtataggggacaattttaaactatcgcctatagtatagggcatggttttaaaccattaattgggaatttgaaattagcgactgtttcaaatcaccacctattctgcctattttgtgacggtcgttaaggtgacagttatagaaactgacgagaatactttactcgactatttgaaaacatcaagaaaaaccaattttgtagtagtgaatggatggtcaggatgtcttaaattagttatgtactagttagaaatgaggaatgatggatgctagatattatttatgtattttattgacttgataaatctatctattcactgactacataactgtagagatattaatgctcttttatattgaagagtggtcctaatattattccaaatattttctatagacataggacttaatccattaatattttcaataggtattttgtaatataaattaaaggatcatttataaactttatcttcctacaagggttaaagtttgatatttgaccacctaagttatggatattacatatctgtcacgatctaagactcgggtcgtcacattgattgtcactttatcggagacaaaatcaaagattccatgagcagactcataccaataaatggcacacttcagctcataaagatgcctttaccaatccactatcccttctatagttttgacttctcacatcagcaaaatatccttaaataaaagcccat

SEQ ID NO: 23888 - DNA, 3395 bp, Cannabis sativa
  modified_base (1599)..(1603): a, c, t, g, unknown or other
atatgcttactttaaagaaagcaaaccaccaatccatctcttaaatttcttttggtgtcaaattctagaccccaaaacaccattaccactatatttttataattaaaaactttatgcattaaaaaaaaattataaagaaaaattgtacatagagcatagagaagaattacctaaaattgaagcaatctcaaagatcactttaaaactttttatttgattttttctatttatcaaaatatgtgtttgattatgactttttgggcatctttgtatatatatttatagttagcataaggaatattctttaagctccatttaaacacactcataaagaaacaatgcaaattagtgttgtgtttgtttatttagagaaacaaaaaaggaatatttatttcccattgataatatttttatgtctaaaaggctaaaatggttctttttggagagaaaaataaaattaaaacaatggaagaaatatggcactaaaacatataatagcaaaaagaaatagtaagaaagaaaatgacttgttcctaacaacataatataacattatgaaaattaaaggaataataataataaaataatttcaattaataattaatattattatatgtacttttctctagctatgaataattttgaactgatattttcatccaataaattcaagtgaacccctggtgatgacaaggggtcatcattttgcattgcatgcatatacatttattggcttctcttttttaatttttaatttttaagtttttttggtgttcttttcatacatatgtaagcatttcaaaagtgtaatcctaattgagaagatcttcaagtatcttgttgatcattgttgtttttttttttttttttcttgttaatagtatattaacttatttttattattttacaaagccaaccccacctcaaaatccatgcatgaaagcacaaaatcaagttggtcaattcaaattaattatttgatcactagctagctaagctagttgtcttgtgtcattataatgtaattaagtttatcacaatctaaaaattaacacaaattatttggtaataaaactatggaatatgaattgagtaataattgatcaaattgaaaagtgagaagattggaaaagaagttcttaatattatttactttcttaatgaaaatatcaattttattaatcatataactttgttatcaaactaagtaacaaatcaattaaaatagactctaaactaaaatgttgaccaaggtaaataataagggctctagcaaaactttaaactaccctattagttaattgcttaataaaaaattgaaacatttttcaatttgctaagcaaagatttacaattttgaattgcacaatcaaacaaataaatcataacaatattagagtttcgtagtaaagcttatacgattattagacaatctgtctccatattcatattctcacaactttttctttggatccaactaagacctccttgacacttaaaaattcagcaaaaattggctctactgtgatttggcaaaacgaggtacatccactataaaaaacagttatttttattgacaattttttagtcacaatatannnnntttgtgactaaatgtgattttttatcgcaacaaaaaattactcgtgactaaaacaagtattttatcaagttgttcactaatttacttttaatcacaataagtattgtgactaaaatcatatttagtcacaacaaattataatttttgtaactaatacctttaaccacggacctttcagtcacaacatatacgaatgataattaatagtcacgacttttttacttttagtcataaatttttttgtgactaaaaatattttttttgtagtgatccttctaaggaaaaacctctatcatctcgagctaccatctcaatcccctagttcttaatattattgaccatgcatgttaggaaaaggttggtcaataaattataattaacaattcacttacatcatatttactacgcatatattacattaatctcatttatttatttttgtaatgaccaaagcatacttaattattgacatggcttcaaattctaagccccccaaatatcttattattcttctaattttctttttttttaaaaaaaaaataataaattgtaataaaaatagaccaatcatgtaataaaattgtaatttagcccctactaaaatttaaacatcataaatatttatatatttttatatatataaatagagagatagtataaaaaaaatgtgcattaattaataagcatagtggagtgcatgcatgcatcacaacacaacattctcatcaattttcaaatataattaattacatgtctcactcaaaaacaaaacaaataaaataaattaataaaggtcactattctatagtactaataatacatctacatcaataagaatattcacaagctcattccctccatccaattattattattaataattacaattatttttctttccccaaagtcatatatatattaattaatagattattttgtagatattttaatttatttttctttttagtatagaaagaaagataaaacttgttctcattgtatatatagcagcttaattattaaccgttgaaggtggatgatggaatattattactattaatccatatatcttaacatataaatattattttataaatatatatatattgactattcattttctttaacaactatcataatgtctcatatatggatatttttactcattctccttccttttaaagagtcacattttgtataaactttactataacatgacaagatagacaagactatctctttttcttatatatcatgtttatatgtatacatatatagatatttgggagcacttgggccaaactggttaggtttttagggttcatattttttaaagggcaaaataaaaagtaaaaaaaattattaaatttttatttaagtaaaattaagtttattataaataataaatatttatagtttaattaattagagtgtaagatatattatacaatattatggatttgaatcccataacactcttttttaatattttttatatatttctaatggcatgtttataagagtataaatgggtcgggtcagatctgattcggctatgatccgacctaatccagatcatgtaaggatctgtcccgccccgcccccgctagatcagatactcggattggatcaagatcaaatccgacatccgacccgacttattcggatcagatctgatccgacacgactcttttatttaagaatttcaatattaacttataattttatatctattttaattttgtattagtattattaaatacaatactatatttggtattgacatgtatta

SEQ ID NO: 23889 - DNA, 1615 bp, Cannabis sativa
tttatatgtgttttatttattatcgttttataagttcatatttaggttgctaatcaacatacttgtcagtagacctaagatcctggtaaaataaatttcaacagtaatatgaaccggtaatatataaatataaaatagaatagttaatattatagaaaaaaaataaatatattatacaagattaaaatagatataatattatagaatttaatgtatatatcgaagggtgaacacccttcggtttataatactagaaggcttaaggcaatttctttatccgtactagtgattggagaactgggtttaatgcaatatctaacagatatgaagatatcttccaaatgtcggcatcctagatccttgtcaggtttcaaggtgcacccttgaaaatacagtttctattgctggattagttttaaaactcaagctataatattaaggcaatttcttcatcaatgataaaagactaatatctatttttgttatatctctattgaatctagtagtttataagctagactcatgcttattcttataaatataatccaattacattaattcaacaagaagatgagtaatatattttcaatataagatatgaatccaatagtatatatattgtatctagtgatctatgtatagaaataaaatacatacccaatattagttttgaaagacatgctattatatttccatttgaattttgtaatattgctccaataccaatagttgttgagtttttatcaatggttgcatcagcattcaatttaaattttccttttgaaggaagaacccaactagcagtagaagtgcatctggtagtattagaaactgcatttttaagccatccttgaatgtgttccttaaatagttcatttattcgaaccacaataatactcaacgatttaaattcctgatcatgagttactttatttcgttccccccatatcatccaagctaaaaaaaaaattcaaaatcttgttgtgaaagcatatctgatgctttcagaatcacttgttggaatgaaatattaaaagaagttgtcttcaaaaactcaaagtccaatgattgccaaactttttaaactccttcacaccagaatattgcatgaccatttgagtcttcaatatgcccacataaagggcaatatgggtctgaagtcacatgtctcttgtacaaacctacgtaagtaggtgatccttcatgaaatcccctccatgcaaagtgcaaaatctttgattgtaaatgtagttttcaaaatttcttccaccaatccataagggttgtacctgatgatgacggagtatcagttgcaagagatgtagctaaatgatatctacttttaactgaataatcaccatcggtggtgtagtgccataaccaactgtttgtcttagcaaatttacttattggaatagaccaaatacattcttgatctgccacattgaaataagattgcaccataggccaattccaaccttctctattatctagaataaaatctttaacaatcatagttgagattgagttagtaacctttgttggtagaaatgaatagggcctaggcagccatggatctttaaaagctagaatataatttgttggaaattatttt

SEQ ID NO: 23890 - DNA, 1145 bp, Cannabis sativa
gtcactcggcggctcattgttacaaccgttatgacgagacatatatggggtcagctcctgctggtgcaccaagttccaacaaaaataatcatcaacagcctgcttctgcttttgtggccacaccagagatggtggaaaacgattcctggtatgctgatacaggagctagtaatcacactactgctgatgtcaataacttgaaccaaaagatgaaatacatgggtaaggagtctctaacagtaggagatggaacaaaactaaaaatagctcatgttggaacaggttcaattcgcaccactgatgactcattgctggttttaaaggaaatgttacatgttcctaatataacaaaaaatcttattagcatttcaaagttaactagagataataatgttagtgttgaatttacccctaatttttgttttgtgaaggacaaggaaaccaagaaggtggttcttcgggggaggcttaaagatagtctttatcacttctgcattccaaatactgactctgtgacaaaaccaagctacagcaacttctcttcctctcaactctcacccgttactggtgcttttactctgtctaagtctaatgtaactcagcacactactgctgcttttttcaattcaatcaaggacaaatggcataggagattaggccatccgtccaatagagtgttaaaccttgtgcttactcaaattaatgaaaaatctctaattagtaatgttgagcatttttgtgaagcatgtcaactaggcaaatctcattccctgcctttcaaagcaaatagttttcatgctaaacatcctcttgaacttgtgcataccgacatatggggccctgccccagttatgtcaaacactaattatagattttatatacacttcatcgatgatttcagtaggcacacttggatataccctctaaaagccaaatctgatgctctccaagctttcactcactttaaaacattagctgagaatttacttgagagaaagataaagtatctccaaacagatggtggaggcgaataccaagcttttaatgatcatgttgttcaaaatggtattagtttccatcattcttgtcctcatacttctgcccaaaatggaagagcagagaggaaacatagacacattgtggaa

SEQ ID NO: 23891 - DNA, 2333 bp, Cannabis sativa
ttcgagatttgctttggtagtcgggttgactcaaattctcatggccctttggctggaatttttggggttaccattacacctcattttcaaagatacttagggatgccatgctttattggacgaaaaaagaatgatatttttaagtacatcaaagattggatttagaataagattcgaggatggaagaggtctcttttttcgttggcggggaaggaggtgttggtgaaggatgtcattcaaggaatgccaatgtatgatatgagttgcttcaggtttacaaagaattttataaacagtgttcctagtttagttgctaaattttgctggggttctactgaaaggaagaggaaactttatttgtgtaagtgggaaggattgtgtaaaaggaatgagaggggggtcttgggcttaaaaatctagagttgtttaacaagtctatgttggcaaagtaggtgtggtgattggttcgtaatggtaattctttagtggctcaacttctaagaaattcttattttcgtaggtgatgtgttgagtgctaaggtgggttcttgcccatcggtagtgtggaggagtttactttgggggagggaaattcttttctagttaagcctgtgctaccgcctgaccttatggtggtgaacttgaggttggcttttcgggagtgggttttggagattttatgagctaatttttgtcatgaggatgtcaaacttattcttggtatggtgcctgcctcattagattctgaagatagaattatttggcactataatacaaatggtgagtattctgtgcaaagtgggtatcaggtgccaatcaagaagaaggaggtagaggaatggttgaatatgacgagggtggaacaatggtggaggcaagtttagggtttgaaagtaaacactttctttggcatctttgtcatgggtggctgctaacctttaaggtgctaaaaaagagggggatgcaagatgtggcgtgatgttgtagatgtgggttacaaaaggaagatgaagactggtatcatgctttttgggatgtgattaggttaaaagattgtggaaaggtgctggttttgggaaggttagtaaaatgtgtgatggtgaagatccgatagcttttttatgtcgcattgacaggttggtggtgccaaaagacaggtttgattttttttattgtattaacttggcaagcttggtatatgcaaaattgtgtgttacataggtcttttggttccttctatggatcgggctttggattgggtggctgaatatttgcatgagttttgggataaaactgatggggagcgtttggttgaacctaaactaaaatgcaaatggcagcctcctaagatggggggatgttgattaatgtggatgctgcaattggtgaggttgatgggtgctgtagtactagttggtggttcagaatcatgtcgaggaggttattgtgtcgcaaggtatgttcttaaataggcctttttctcctatagcagttgcgttgtcagctataaaacatgggattgagatggctggcttgttatctttagaacgttgtatatatgatctcgtctgattgtaattgacagttgctatgttagggaggccaccggagttgtgtggagaatgcgatctgcttgtggaggagattaagcagctgattttaaagaataatattgttggtgtaacttattagctgcgggctaataataaagtggcacatttgatagctaagaatgttttaggttgtaaaacttctagtttttgggatggaggagttcgtgatttgtctcttcttatgtaatactttttttatgtactggtttattcacaaaaaaaaataatgtaagatgagaaattttttaataatttattaacaatttttttctataaattttaaatatgattctattttatttttattttttcgttcctttcaaccaaacgttacttaagttggcattagtgccgaattagggcatcttcgacctacatagaaataaatttctaatgccacatcaccttaaaatgggtctacaatacactaacaaacacttatttcaaaaggcttgtacactactacaaaatagggaaacaccaactgtttaaaatagtcggtaaatttgttgtcatctggctataaaatcgatacgtataccactgacgcaaaataggatggtataggcgtcattttaaatagtcaataatgagcattcccgacagttttgaatggtcgttatgttatattatttgatataatataatatagattaaaatatttaaatgtgacaaattatatattaataggagattaatatatattatgtgttggaggtt

SEQ ID NO: 23892 - DNA, 3489 bp, Cannabis sativa
ctgtgacacctcaaaagaggaagagcaaagtcgctactaccccagggttgacctatcaaagaaacaccaaaaggtcgcccagcacaaagggaaaaagtcatgatggaacctgcgaccaaagctcgcaatttcatgaatctgtaggaaaattttctaagagacgattttatcacaaaagtcgagggggcacctttcgaggaccttatgtctcattctatcaaacttgcctcacagttcatgactgtgtacttgcgggcttctatcatgggtcttaaagactttgatcttatgaagaagcaaaatgcggctcatcaagaaggcttgaagaaggaaaagttggacactgtttccaaagacaaagaggtcgaggatcttggaaaagataaagataaggcaaaggagaaggcaaaaaagttaaaggaaaagaatgctaaccttactcgcaatcttgaggccaaaaaagaaaatgcaaagaaggcttacgatcaggctattattgattatatttacacaaccctgaccaagctgctagatttcgactttgctattttttccccagagacagttgagatggctaatactttctgcaccatgtctcctactgagactctaggactaagcgggaaccttttccttgaagaggccgaagttgcgaacactgccaaagtcacagatagtactgccaaggtcgcagaagatcttaacacccttgatacttaatttatttcctttttatccaaactctctttttttagcgatacatgggtactctaattttgtacttggtttttaagataaatctgttcatattttgatgtcagtttgtatgaacaacatatccttcaaggatattcttttgtttcaaaacttctaagtatttttatacttgtgcattttcatgcgtttataattgcaactttgtgcttttaaatgcgcattcacttagctgatattttatttatgtgaccatctttcacaactttgtgtggcgatgtatggacatttcgatgttcacattataaatggaattttcaaaatttttaagtatacaactgtgaaaacaatgaaaaatttcaaaatttaatgattcattggataatcaatagtacaattcaagaaaagggaaggcagcatatatacatatatattcctcctatacttagataattttgaaaaaattgaataagtatatacatgcgggtactattggtaataatacttcaaatgtttgtcgttctaggctctatcaaagactgagtccttaagattagattaaacagtatgttacattcccaatcatttcagtgattaggtaaggaccttcccaattgtcactgaaaaccccatgcatagaattgtgcgtattgggtaggactttttgtaataccaagtctccttctcgcagacttttttctttaactttggagttaaaatagcgtgttgtgcgctattgataggctatgtttttaatctgagcatgattacacctctcttccagtagatcaagttggagtagttggtttttctcgatgttttcaacattaaaaacatctcttctcaaggatctagctcctacctcgacaagaaccatgacttcgcacccataagaaagtgagaacggggtttctctagtcgtggagcaaggagttatattgtacgattacaaaacttgtggaaattcttttggccgaacaccttattattcttcgagcttgccttttatggtgtgtttgtaattttgttgactgcttctgtttgcccgttactttgaggatatgaaattgctacaaaagccttttgtatccctagaccatcacataatttctgcatttccttgcaatcaaattattttccattatcataaattaatttgtaaggaatcctaaatctatagataatttctcgatagacaaactcacgtagttttgctgctattattgttgctaaggcttcagcttcagcccacttggtgaagtaatctactacaaccactgcgtatttaactcctcccttgccttttggtaactcaccaattaaatctatgccccagaccgcgaacgaccacggtctggtgatagaatttaaatggcttgggggtctattcacatatgtggcaatatgttggcatttgttgcaccttttggcaaaattaatcccatctactcataaagtttgccaataataaccttgtcgcatgatttttagggccaaggcatttctgccgatatggttaccgcatatgccttcatgtacctctcggaagatataatcacattcctctccatcgatacacctgagaagaggttgactgaaacttctgcgatatagcttatcgtcgtagattacatattgagctgcttgataacacaatcttttcgcttcaatcttatcatcaaggagtttacctatttttaagtaagtagtgattggggccatccaagtgatttgctcgataacatcaatttgcataacttctttgcgatcaattgttgtttgggctaatatgtccaaggaattacatcaagtaattctacttctctcgttgaggccagtcgagccaaggcatttgcatgagagttataagcacaaggtatcctactaacaataactttttaaaatttagacaaccactcacaagtgtaagagaggtatttggccaatcgtcctcctcgggccagatattcgccattaacttgacaaactactatttgagaattgttaaaggcttcaagatactcaaatttcactttgagtgcgagtttaacccaaaaattagggcttcgtactcggtctcattgttggaggctctgaattcaaaccttagagctgtgtggaccttgaatttattgggaatgattaacatgattccaccacctcaaccttcattgtttgatgtcatgtctacgcacaaggtccaacctacgtcttgtggtacctccggatcaactcgctcttcaatgatgagagctacttgttcatttgatcaagaatgaaatcagcaagggcttggcctttgatggctgatcgcagtttgtatcttatgttgaactggcttaactcaatccaccatttaagtagtcgtcctgatgtgttagccttggccaatacttggcatagtggataatttgttaatactttaatggtgtgtgcttgaaaataggatcgcaatttatgagaatccaccactaatgtaaatgcaagtcactccatttgtgggtatcgggtcttaacatcaagtaagtgtttgcttacataatatattgggtgttatttaccttggtcttcgtagattagcaccaagctaatctcatattcagacattgctagatagattgacaatacttcttgaggaaaggcttggaaagtattggaggttgccccaagtgcatttttaatacatgcttcttcgcatttgttagtccattaaaactttttcttgcctttcaatatttgaaaaaattcattacatttattgaaatatcgtgatac

SEQ ID NO: 23893 - DNA, 2408 bp, Cannabis sativa
taatttcactaccttactttggattactcgaaatttagttgaataaatattatagatattggctgttatacatttttgacaataattaatattatcacatatccaggtgggattgggaccggggtcagaatttagagtttgaggtctggtgttgggtcaaggtcggagtctaagtttaggtgatgttttggtttggtggaatataataataatagtaatgtaatggaataaaaatagtaatggaaattgattaaaatgtttggtttgttatttgaatgaatattataataaatatgataaattgacaaaattatcttgtactttaagttttatatatttgtataaagagtaatttgcggtataaatacttaagtttaattctcagtttaatttacttaatcaggtacttacagaagttccaaaattataacttatgtattattaccgccaaaaattaaacttaggtatttattgcaactgggagttaaacttaggtacttatgccgcaaattactcttatataaaaaagatactagagtcattttagttttactttatttacccttttgtgatgtaattttcattacatagtttttctaccatattatattttgtaattataattacaatataatttcattatattatttttaaaaacaaaacaatattataatgaataaattcaattatgattctcattacaacaaatcaaatatgtcattagagtaaagattgaaaatcaagatcgacagggtagagtgagagtttatatataaatatatatatatatatatcatacaattaaaatatacttttattcatttacataatataatgttacagttaaaattaaacataatattatattacaataatactatacaatgtaatagcgtgaactgcccccattaaatactgtctagtattgagcatttataaaatatcgaaggttgaggaaggaatgcatcatggttttaagttcaaaagttcttcgttgtttgtttgtttcatcttattcttacccaagttttgtcacaagatcagaatcagatgatatacaagcaaaaggccaagcccaaattaaaggcctagctacgtagacatatatacaaagagtgaaaagcagaccaagtcatgctcaaaagtctagtcctaatactaatgaaataaaaaaaacttatattagtagcatttacaaagagttaaaaaattccatatcatttaaaaatataatattttattttatctttttttcatatcatttttgactctttcttttttaaaaatactctaataatataatactcttcaaaaatactataattataatctcacacattattatttagcacattgatggaggagctaaagcttaatcaaaagattattgatgttcattgtgataatcagagtgcaattcaattaattaagaattgtgtgcatcatgaacgtactaagcacattgatatcaaacttcatttcatacgagcggttgtagagaaagaagccgtgaagattgtcagggttccaactgaagacaatccttttgatatgataaccaaggtagtgcgatatagtaagtttgagcattgcctgaagctgatcggagtcagctgatcccagaggggctgagaggacaacaacatttaaatcaatgatttatcaagcaacttcaacttgaaaccaaggtggagattgtgttggttatggttacaagttttgtcatctgagattagaagttgtgaatctggagtgcagatattggaagcttagtgtggatccagaaagccctgtgcagaaggccttgaagaatccagaaggtacttccagataagcttgtaccgtgtatggaatctctcccgtatagcttgttattaattcggaaggtacactctcggatagcttattgtcagtcttgaaggtccatacgggtaggaagccatgtacatatccggaaggcttgtgtgtttacaatgctttcggattgtccgtaataaaagcgtgtctttccaagatgacgtaaattattgttgatggtgatgagctagatcatttaaggcaatgtaaatgtgctacaataatttaggagatatttttggcaacaatacaaatctatatatagctataaatctttgtaacatgtgtgtgaatcatactagattcgcttgagtgaaaattgtgatagtgtaaggttgagagaaagagtctaaactagagagaaatttcttctcgttatctctgagaagtttgtgaagattcttgtaactttgtaaacactaatattaataaaagatatgacagctgctgttccaactagggctgtacatcggtcggtttgggcggtttatcctatatattttctaatccaatctaaagttcgggttgctaaaatttaagtacaacccgcc

SEQ ID NO: 23894 - DNA, 2535 bp, Cannabis sativa
atatattaggatatgtaatttagttacgagagattaattactatgtaataaatttttgaaaaattttgaataatcagtttaagtcaaaatcataatttcaaccagtgtatatacttttgtacaagtgtataaatttcgaagcaatacaagtgcgatgagctgcttgaatattgattttgatatcttaaattatttaaaacttcttgaaaatttacttaacatctaaaaatactaaaatacctataaatagtgatttaaatatcaatcaatatcccattttttttttctatatatgtatatatttggtgagaattaacttacattcgatgttcctagatcatctgtaagtcgtagaatcatggatgcatggtaaattatgggtggataacctaattccagtaaatttatggcatcttttgtaacaggatttgtaagagagaaataagcatccataagaataatcggtcctgataccgaaatccatgcattgttaatgtattcttcgaatgttggtttgtatccactgtgaaaccattttgcctcttgtaattgatgtttacagaaatctacccactgcatgcatgcattacgtgaacataatgttaatttttcacaaaaaaaatattgaagaaaaaaaatacataattaattaataaataaatatatgtatatagcatcaattaatcaatgtgtattgtatttatattacatattttattttaaaaatataatttattatctcaaaaatagttttcaaagaaagtacatgtatttcacatgcctattaaaaaatatacacaagtgtaataatgcatgctaacatgatttcgatataaaatattatttataaatttttaaaaatttacacattctataaaaaattaagttataatttatcgaatactaaaaaaacaaagaacatcactataataatttgtcaggacaattattgtaaaaatttctatatgacaaaaatctttgtagagaaggaaaagaaaaaattcatacaaacataccgtcctcttaaggaatttaacgttgaggaaattttggtgtcctaacacatcgaaagccatttcgtttatggtattgtgtaaaagaaagaaaggcatcctcatatattctggtaaatcatccattgctttcacatcccatctacaaaaccgatttaatatttgtaacaaaaaacatcattattatatgaattacatatgaattcacgatatcgttatctacatctatactttagtatttttggtatataaaaagttataactctttcggattataatgtagttatatgagatttcccataaattttttcaaaaaatttcgaataatttagaatatatcaagtatcaagatattaattcaaatagttttgtataatatatcaaaataagcagaaaaataacaacgtgttgtttgaattctgattttgctatcttaaattatctaaaattttataaaaacatttgcgggacatcctcaatgcgtaactatagtaaaatttacacgaaaaatttgataaaaattacaaaaatatgtagtcaatataattttttatttttatttttactctttgaacatttttatctacaattcagtataaataataaatcgtttttcttttgttgttttatagtttataaatttatagtaattgtgatttttttttttttgtcgagtaaaatgtattaaatactaaaaataatcaatatcaaatagtatttgtatatacatatatatattacctctcaactgcattagtgaaaagctctaattcctccaatgttccataaacatcatatatatcatcaattgttgttattagaacatataatcttccagacattcttctataatagctttgttctggctcacatgttactcccacagtccataagaaacactccattattctaactctaaagaaatccattttctctccaagttttgtatggctccaccacctttaacatatacatataaatatttatataaattgacatcaaacactaataaaaaaaggaatttctcgaccgcttatttaaaacagtcgagtaaaattttgctatcaggtcttaaaactgacacctataccaccgacgcaaaacatgatgaaataggcgttaggtcttatcatcatgttatatactctatagatattgattaacaaacttaataatctatattccaatattaatgataattttattagcgacgatttttattattagtccccctattcaatactgaactgttattaggggcgacttttttctcactacaataaaataaaataataactatcaggagcaacaaagttagtcgttaaataataatgaatattaaggacaatatattaggggcgactaactcctaattattagtttcctaataataatttttaggggcgacttcttttgtccctagatttttgtaattttttgtagtggtatccatttattcattgaaaattaatgatattgtgaactaattaatttattttataacagatatatatataatatc

SEQ ID NO: 23895 - DNA, 2626 bp, Cannabis sativa
aattccatcatcattttttgtaggcatttgggcaacaatttcttgacgggttctctttctccatcaattggaaacctcactaacttgcaaatcttgtaagcctacaaacttaaaatttgagcttggaactaactaacaagacttagcatatatgttcaaaatatttctctctacttatctttttctttttgggattactacttactaggagcttgggtgggaatgcattgtcaggagaggtcccaaaggaattgggactacttactcagctatcaactttgtaagttattctttatgaaatttccattgaccaactcaatcacattattattcacattaatttttggaaataattttgaatataggtacattctattgaataatttctctggtcccctgtcgccagaactagggaatttgaccaaattagaaattttgtaagttggtggtaacaatttatcctttgagatttcctattcaacttaatgagtaatggagttgtaaattggtcccaatatccaccctgattacttttcttttccttgtttattttatagtagtttttccagttgtggagttagtggcgagattccttcaacatttgaaaatctccgaagcataaaatcattgtaaactgtttcttctatgtaccctctcatcatgatatgatatgatttaaaataagtttaaaaagtttgttgtctaatcatgacatgatgatcttttattgaccagtcatgcatcggataatgaactcacaggcaagatacctcacttcataggaagttggtcaaatcttactaccttgtaagaaaagttgaactgtatagttagtttgcaatgtctatatctgtatattcacaatagttagacacttgtttgtgctgatacagggttttgcaagggaactcttttcaagggcctataccatcaaccttagcaaatctaacttctttacgacaattgtgagtaacagggctcaataggatttttcatcttcaaatttttaaagctaataatcttaagtgtgactgtgaactacatatatgtaggatgttgagtggtatttctaatacaagttcctctcttgcatttatcaccaatataaagtctcttgaaactttgtaagtaacattctttctcaacacaacatcaatctcttggataattatcaaagtaacaactcgtcatatataacctgcagagaactgagaaacaatgatatcactggcacaattccatcgagtattggcaaactcacacaattgacacatctgtaagttcattatagggacaaaaatctacccaacatacactattttctaactatgaaatcgtgcttttatctttacagggatttgagctttaacaagttaaatggaccgattccagactctcttttcaacatggattcacttgtttatttgtaatccttgtgtccctttaattgcattatatcatattcttaatatttatatatatagtagctagctacaactatggtagaactcacacaagtaattttgtttctttaggtttcttggaaacaatagtctaaatggtaccttgcctcagaaaaacagttcatctctactcaacatgtaagtcaacatatataatattttagtatgtttagtaggattcatccatggtaatcactctaaaattaacactgatgtactatatcttatgcttgcagagatctatcatacaatagttttacgggaagcattccttcttgggttaactatcaacaaaatttacagctgtatgcctttcaagaaatattaattttttttttcttttatttttcacttcaatttttggttcactttcattcataaaatgacaaacggtatgatttagtacttttgtgttatgttcatgcttgttttactgcatagtaaagaattaaatcacaaaaaaacgacttgcatgaagacaagactagcatttatacttcacctttttgatgcagtaacttggttggcaacaattttactatagataattcaaccagcaggtattttttatttttcttgtgaagctatctataatatcttcccacccacattattgctcttggtgatagctaagcaaaaaagtttgtagattatgttgttggataattaacttcaattattggtctaatttatgctttgtttgtttttagttttcttttaggtttggactgccttcagagaaattttccatgtaatcaagatcgatccctctgtaagtagacgttacacagtctgtttattttttttttctacttttattaagcaatattacttacttagcactttcttaactaaaatttttatgtgtttcttgattgtgcagactctaactttgggatcaactgtggtggtgaacaaattacatcttctgatggcgttgtgtatgagaaagatgatgagactcttggtgtagctactcattttgttaccagctctaaaagatgggctgtaagcaatgttggacgtttccaatggaatgccagtcttagctatataagtacttcatcatctcatttcacaaatactttagactcagaactattccagactgcaaggctttctgcttcatcattgagatactatggtctggggcttcagaatgg

SEQ ID NO: 23896 - DNA, 2613 bp, Cannabis sativa
  modified_base (27)..(30): a, c, t, g, unknown or other
  modified_base (2536)..(2538): a, c, t, g, unknown or other
actaatcagattgtaaagagttttatnnnnggcataaaacccaacagtgtacactttaactaatcaaatttggcaaacgaacgtaagacactgttgaaattgtcagcaatcgagtgtaccataccccccaaatgaactaggaatttcagtcttaaattcttgatcattagcttgaagtctaacttgtgtccttttccaatttttgaggaggagagttgagtgtggttctgccttgcttcgagaagcataatgttcttccaggccatgtcctccttctccatgataactgggaggggagtttcttaaaagtgtaatgggcacttctgggcttctgtgagaaaaagccacgggttttttttctgagaacccaattgtactaccagtccatcccctcgtgacatggacctcgcgagtgagagcatatgcttcttgtggcgcgtgaggctattcgtttcctaaagggaaagctgggccttcatccttgaacagacaatcttctttatgttgaggtccatttcattaagtgaaagtcatgtcgaatcctatgatggcaaactttcggtgttcacttagaaaggctaaaagtgcacaaggaacttagacactgattttgcttacaaacaccgaagggcaaaacatatagggtgtgcgagagttatgttgaatttttatgaagcaagcttcggcttctgcgaaggatggctgaagttgaataaaaattcaagcttaaacttcgcttcaaaagatcaaagggaaagcatcacagggagtaagatagacttcaagcaacccttccgttctgggaaggagggttgaagacatgtcatacccctagtgatctttcttacacaaaaaacatcgtgcatgcgagagtcatgttgaatttttatgaggcaagctttggcttctgcgaaggaaggctgaagttgtataaacattcaagcttagacttcgcttgaaaagatcaaaggaagaaagcatcgcagagagtaagagagacttcaatcagtcattccattctgagaaggagggttaaggatgtatcatacccctagtgatctttcttgcacaaaaaacatcatgcatgcgagagtttcgttgattttttatgaagcaagcttcaactttcgcgaaggaaggctaaagttgcataaaaatttaagcttaggcttcgcttgaaaagatcaaaggacgaaagcatcacagagagttagacagacttcaagcagtcttccattctgggaaggagtgttgaagacgtatcatacccccagtgatctttcttgcacgaaaacatcacgcatgcaagagtcccattgaattgttaagaagcaagcttcagcttccacaaagaaaggctgaaattgcataaaaattcaagcttagacttcgcttgaaaagattaaaggaaaaaaatcctgtggagtaagatagacttcaagaaatccttccattctaagaaggaagattgaagacatatcttacccccagtgatctttcttgcacgacaaacaacgtgcacgtgagagccatgttaaatttttatgaagcacgctttggcttccacaaaggaaggctgaagttgcataaaaagttgcataaaaaattgcataaaaaattcaagaaattcaagcttagacttcacttgaaaagatcaaagggtgaaagagtcattgggagtaaagcagacttcaagcagcccttcccttttaagagggagggttgaagacgtgtggctcaagacaagcctagcaatctgagtcagtatagcctacgggatttaaagcaccactcttgtagactaacacataatcccttatcctctttaagtatttcagaatatgcttgattgccttccaatgttcctttcctaagttcaaaagatacatgctcacaattcctactacaatgtaaatatctggtctagtgcatagcataacatacattagacttccaactgttgaagcataaggaaatcttcccatatcttctatctcttgaagatcactgggacactgctccttagatagtcacacaccatgtctacaaggcataactgcccctttggtgtcgttcattgagaatcactctagcaccttatcaatgtaagttgcttgcgagagagcaagtgatctgttcttccagtttctgatgatttgaataccaagaacataactagcttcaccaaaatttttcatttcgaattgagtgtttagccattccttaatgtcagtcacttttttgacattattaccaatgatcaaaatatcatcaacataaaggaccaagaatactaccacttgattatccttgaattggtaaacacaaggtttatcttccttttggtgaaagtcgtaggttttgataattttatcaaaccttttgttccaagagcgagaagcctgcttaagcccataaatggacctatttagcttgcaaactttctctttttatcctggaagtttataaccttttggttgctccatatagattgtctcgtcaagaacttctctaaggaaagctgtcttgacatccnnntgccaaatttcataatcaaaagtggctgctatggagaaaaatattttgatggatttgagcatggcaaccggacta

SEQ ID NO: 23897 - DNA, 3612 bp, Cannabis sativa
atatatatatatgtattattatctgggtcagtttattcttgttttagcgtacttgtgccaaatatatatatatgcccatatgtttggcagttaaaatacacatataataaaggtacaccaatcatgctcaataatctatataagggcttcctgtttgttcttcttgattattggttattggcttggctgtgaatgtgatccaattcattgttgcacacaaatttaattaactatacattcattgctataaatctatatatatatatataaatgcaagctagatctaattaaaggcatcaaagaaaacacactcatgagatgagataccaaccaatatatataatacacactatattaattatttatctagatccataaaataaaaaatgaagaagaactagatagctttttaatataagaagataaataaattgactttagagccatcaaatcgtaaattataaataaacatatttattatgtacagaaaaaatttaccatatataattatatatgtccacctatgaattcactacaataaattaaaagttttaacagcgaccaattagagccggtcttaaaatttaataaatcattaaaaaaaatatttatagattcttattttttaaaaaaaaaattatatttttaaaaaataataattttaaaagggaaatgtttttttcctctctagattagataggccttaactacaggcctaatctgattatgcttaaagcttggtctgcgaccaatgtaaaaataacaaaaaatcgcctctaataattagattgtatattgagaattttaatgtccataccactagggtgtttaatagatttagcaatagaaatcatgtaaatgtgaaaaaagagaaatatcacaacaaatgtagtgagtagcaccaccgtaaattatctataaaaattatgtaaaaggattgagtttaccagaaatgttggatggaaagtgtttaagatgcatttgaagtagatggtgtgggctgtaaattttgacttgggagagatatgagagtttgagtgtcttcatgtttagtcagattttctaaaagtgagatatgatcagtggaagtagaagcttgatgtgcagagggttgattttcaatttttcttttgtctccatatcgtggtggaaatccaatcaaaaagtaaggcttcatcttctaattattgcatccttgattggcagtggtggctgatgatgatgatagagtttgagtaagagctgtagaaggttgagatgaatcttggacaaatgcaagaagagatgatagagtttgagtaagagatgtagaaggttgagatgaatcttggacaaatgcaagaagagaggggatttaaggaattttaagtttcatttgtctttcttcatgatgaccatagaaaaatttttggacgcggatgaaaaatgatcaattaacaaaatttaagctctacatgaaagaatggtccatttaaacttgttaggaattgtaaaacttgttcttgattcaagaaagctaaattatcaacaaaagcagcataagtgcatgggattcgaggcctgagttcttgaaattcatcccacatacatatttgagtttagtaaagtaagcacttacacaatcatcaacttgatgcaaagtgatgatagttcccctgagctcgaagatgcgaggactatttccttaatcgaagtgcgagttgagttatgtcgacatttcaacagtcatgtctaagaacatgatgctgcttttgatttcaggtgtcacggaatgcagaatccacaactttgccatctgattacagtgaagccaatgattatgtaggggaccattgattggtggttgtggaagggtgcatttgaggaaaataatcttgtttcttacaccaatggagagctcaaaatcatgacaccaggttgaaagtttcttttcgagagtggtggcgtgatcaagatcaggccaaggtgatcaccagaactcacaaagtaaggactatagctatcctcatgagtgggacagggaggagcgatgacattttgatgtgcaatgtcgccagtgacaacagaagctgaaggaatgatcaaggaatttgcgaaggagcatctataatggaggaggagttatgcggtggaggagtttggctggagtttctcgatccattagctcttgttctagccatgttgattgcaatgacaaaaagttttgaagaggaagatagtgagaatttgtcttagtttaagtgatcaaaattctgaattgtattgattgagaaaacataatgagaaatgctaaaaggcaccaatggtgtctagcacttaagaatttttattagactacatctaatattttcaggcctatccagatctgatccaattatatattagatgttagattttaccatgtagtttgatccaattaatttcagtcatctaatcaatccaacattcattggatgttggattagatcgattctatctattggatacattacatatatatctattgttctaatttgactttatccaatattttaaacctagtatgttttagatcgaatcagactcatccaatatttaagatctagtacttattgggatctaatccaatccaaaaaagaaagtaaaattttatgttagttttgatatatacatatatttttcatgtatggcaacacaatatcaaattactcgttcaaactaaaaaaaaaatattaattagtttgattggatgttgaatatattagatttttggacacccaataatcttacatcttatacgatctaattggatatttaaaaataatatctaatgtgatctgatcacaattgaatatctaatgtttggcggtcaaatatcgttagattttattgatttatgcacactcctactaataccttccaacataatatattattattggtataattaagtatcggattctatataatttattaataactaatcacagaacgtcacatctaaatagtattaagtaccactcatatccttataacaatattctaatataatatataattattggtacaattaaaaaaatattatagtcaattattcaaggatgcaaaagtgtcccaaagtattgattggatccttaattaagtagttgggaaatgagaatgcaacagtaacacatatacataatataacctcatgctctagaagtgatatttattgtgggcaataattcacacatatataaatttagaaaaaatttaatagtagggcctcacttttgttattattggtaggaatgtttcaatttttttgtatgaaaaaaattataatacaatatttttttttatatgatatagattatagttatattaggcattcgactatttttattttttttttattaatttatggtgataagaatagagtttaaaatagtgacttgatcaatgtgtatatatatttatataaaactatcacacatgcaactaatcatttgaatcttattttaaatatcgtataaattattaattttttttttaaatgaataaaatacttaatatataatatgtattgtcatataaaaaagattgaattataatttctcaacgtacaaaaaaataaaaatatttttacaa

SEQ ID NO: 23898 - DNA, 3726 bp, Cannabis sativa
acaaaataagacctattgtcaaaaataagcatttgtaatataatttcatatatatatatatatagattttattgtaatttaggtgtgcccttcatgttatatatgcattttagtattcttcatatttatgacggtatagtggattggaaagatttcgccattagtgtcacaatatgtgattttttgtagcttagtggctaagaaatgggattttgggtatttagccttaagttgattttagtctttagtcatttgttgtaggtaaagataagctttaaaaaaaaaggaaattttattagaggtaaacattacacaaagctaaaaccacttacatcacccttttctctcactcagttttgcatgcccaggagcaacccaaaggaaaccctaagaacccaaacaaaatttagacaaaaatttaccaagttatagctacattttaggagggattttgaaggggaaggtgactcctaaactccaggtaaccttagttctcttcctctatagttttagtgtgagttttaggtgatttcggttatgggtgattttaggaatttgaggttttgttgttgcatgtgtttgattgaacttaggtctattttttaaaaaataaattgttgttatttgtggttgatttttgatggaatttgcacctatagcaagtttgggcaaattttgagttttatgaactcaaccattgctcatccatggtagattttagtgtttaatattttttaggacattgagttgtgacatgtgtttagaatacccgtttgtttttttttttctaagagttcggttttgttgatttcgcttttatccaacgacaatgagtcaattaaaccgattagaaagaataaataataataattaagcaataagaacacaaatttgttagaaaggtttgacccttggatagttgtaatagtctactctccttttacttgtattaacttgtgagcaaagaaggaagaagttcttgatctttcttgaaagcttttacaaagatttagcaacttaagtgctctattgagtcaattgctttcgcatccctaaatagtgaaatggctccactattcattgggaagaattacatcagcttggtttccaaagcaataaagaaataaaatgggaaacttgtatatttcctaaattacagaatttgcatgtagaaatctaaataaaatagggatttaattgataaataaaagatgaaagtatctctgaagatatttcacccgcatttaccttggcctattcacgcaggcttgctgcgagatcgacaatagtcagacggtgctatgtacccggtctagatattccagcttattcttttaatcagtttttttacaaatgataaatcactttggatggtacatatgaagcatattacatgatcaggtcatgaaatgttcctcacgtgttactcagatggatgccatatcaccttgtgctgatttggggataatatttgcccctaaatttgtgtgggaactatttgctcgcacgtagacttattcgaccactaaattggtttgatgggtgaaacatgttcgataagcgtaccattcttgatctagtgtgattgaatgaaaaaaatgatgatttaactgtctcttcagtatctagggcatttaaggcctcaacatgaaatttagatctcgattggcacaacgacgattattgaataccacatgcctgtcacatgtactccccaacatgtaatgattacactattttatggggaaacctaaaattttaactttacattcctaaattaaccatgtaaccaccgatgggtcaaaaattcttttctactcttttggctacaaagagaccatggggacaggtacaaagagcaatatactcagctctctcttagatgagagacttcgaagaaaacatgaagcaagcaatgctggagttcaaagagttagattgaaagctcaatcttttgtctagagagtacgataagcatacctaactcttggataataagattgttgttaaagaaactttggagaaaaaggtgaatcttcattcggagatgcaggaaaatgtggaagagatttagaggaaagttatcaaagaggctgaggaaatcacagatgaattgggttttataaaaaaatcccgacttaggcttacgaagagttccagaaaaaggatttagagctggataacaaaatttaaaaaacttcagagctggaggatcaacttcagacagtgacctaggagaagcaagaccaagaggctaggacattagaagcattaaaataagtttttgtatactctctatacaccatatataagcttaacaaatttgtgatggattttttctggatgacgtagacagagaacatctgatgcccgaggttcttcaactagctgaagcagagaaagccaagaaaggagcgagggcagcaaaagtggtcgatcttggaacttccccctagaggatgagaacttggaagacccatatcttcttgctattgatgctcctcccatgactttacaatcccaaaggtctctattgatgtccaagttgatgatgctcagcctcccaaaggacccagctttgccttgaccaaatttatccaactttaacttacttttaatccttttatcatttggggataaggatcccccttttgcatatgcgaagataattttatgcccttgccactaggccattaagtatgtagtagtcatattttagatactcgcatactttattaactctttaggtatttgagatttaatctatcaaggttgctaagttttaatcttattttcagcctccacgggttctggttccaaaggcttgaacctttgggctgctaattaaatacttagacttgattttttctttttaataagttgcttgtatctcttggaacatgggtccaatagcctaaaccttgatactttgacaacttatttttagaaaaaatttggtaagtattttttactttaagactttgaaacttaaatatttaattaacctgagctaattaattattccagaatcaaaccttttttttttgtaaatattacttacttctaagacttttgaaacttaaatactttattaacctaaattaattaatttctttaagaaatctgaatatcttagtaaatttaaccttagttaactacgaaggttgaacttctacgttaaattaacctgagttaattatgaagtctgaacctctaagttaacttaacctaagttaattattaagtttactaaaaaaaatttatgtataataaggcagtggtttacttcctgttccctggagttctagtttcatgtaatactttctactcttataattcttgttaatttagctatattttatgaaatatgtttaacgttataacgatataatggatgctaccaccaaagtgattaagagtttagacttttgatacctttttacaagtagaactttgagcaatcaaatatgaaatgaaaattccttctttattcaaataattgctgccatcaggcatgcattgaaattagacataaaaataaaaaaccaagaacaaaggaaaggaagctggaaacacccattctatcgatagtatcagcgcaggtggtcaacgttccatgctttgagaatttttggttccatctaatcttctcaagtgataggttccatcaccaattttatcttgacattcatatggaccttcctagttgttggaaatattttacca

SEQ ID NO: 23899 - DNA, 2078 bp, Cannabis sativa
  modified_base (1100)..(1108): a, c, t, g, unknown or other
ttgatattttgattttttttttcaagtgtaactctatttagttataacctctcaattagaatgttattgtcttagtcccaagtgtattcttggatagaggttctactgctaagccactgtagtagcactgtagtaggaatgtagcaaaattaatctttgattattgttgaacaaattgacctttaattatttttgagtgaatgtcactttgaagacaccctccataaaaagaaataaagaagacatcgattgaaacatttgcattagagacagtgtaagctgaattaagttcgaagtgacaattttatcatatgtataagtgacaaaatattattgtatgttatgtatttttgatgatgatgatgatgattaacttgaagaaatatattatttcataaaaataaacaaaaagataatacatgtgagtattcctaagaatgagggggacagagagagccctacaataaaccaagacccaagtataaaagtagagacaaaggatgtaagttcccatgccaaataataaagtagaggattttgtcactacatatgacaaatataaatgattagtttataatgtgatctagattacagtgaacattaaactcaagtacgaggctgagtgagtgtttcaattacttcttctaaaaacaagacaacttcttctatgtacatgtcagtggattaaactataaagtcttatttgactcacacaataatatttatttggccttgtcctaattaatagtaaaattatttcatacacaaagaaaagaaaggggttcgaatgttttattttattagcgcctaaaacattatatatgttagtgtcacacatcacacatcagacagtcttataacacttaataatcttattgctagtacaaagactattgtagcgtttggttggacgtaatgaaatggaatggaatagaaagaaaacaattttcatttcattcatttgtttgattgtattttaaagtattgaaatgacattctaatagaatgctctttccaccattttggtggaataaaaaagaaggaaagaccatttcaatgtaacaagagaaaaaatttaatgaattttttatcaatttttnnnnnnnnnttaaattttattccattccattcccattacaatttctattcatattcccattcccgttgctaatcctatattttttaaggtcgataagagagatgacttgtgatacagataaaaagtataacgctaatccatatagtcaggatcaaactcaagctttccctaaagttggcttttcctcttagcctttgtaggttgtgcttttgagattaacacttactatatagactttgctattatatatcttctgggtggtaatctttgagctaatgataatattcttatgatctatcctaataaagaaatagcccgacgagaaaatttagaaagacatgtttggaaagatagataagatttttattatttaaaaacttgtgcccttaacagaaaatgagaggccatatatataggccctaaacaaacagaaaatattacacactctttaattattacagacagaaaaatattattataaagacttaaattacatctttccctagataggaaatctctgacatacaagactctttttttttttataaccacaaacagacaaaattttcagatggccagaggaatctctgttgtctgaatgatttcttgtcgttagttgtcattttgttacgagaaggaatctttattggtcttgtgagtagttactggtcaaggcacatgaaacaatggactcactttttaggagtcacatgtccacttcattattgacataagacaaatacatcataaacacagatggacatctttccagtggttcaggagttttaccaatttttgttaatgggctcatgtgagggactgagattcatgtactcctctatgtcactatcgtcttcttgccacgatgatgaaggacttgctcttttgtttccacttgttgatgcagtgggtttgttgttgacaggtggagatatagacaatccctacatatttcttcatcaaggtcattgagtgagaa

SEQ ID NO: 23900 - DNA, 2678 bp, Cannabis sativa
agtaattagtttatgatatcttctctactttcaatatcgatccagtccgatgtatactcaatattcgatactagtatacgttgctaatgccctgaaaaagacataccacttatcattgtgtaagtatcgttgattatcacgtcagtgtaaatccagtgcactgacactaaggaatttgaagcatgtaatcacaattactttctactgtgatgacttcactgtaattgtgaataatatattttctagacttaatagaaattgtatattaaatccataattataaaaaaaaaatacatttaaacttaaatgacttcgaatcttctattgatagcaaataaaattatattgaaataagttttttagggcataaaatcccaacaaaaactaacaaaattagaaataaaaaaaagcaaaaattatagatatcttcaatcacggctagcctactaatcgtcattgaccactaacggtcgtcactccaagctacagccacaatcaccaaccccgaacaacaatgatcgtcgttgatctgcaaaaaaaaaaaagaagataataaacgacaattggaactgtttattctctgatctatagtaaacggtggttgggcgaggatttcatggcagtgggagtcgaaggaagacgttagagaccacctacacacaatgagacagatagagagatgagggagatgatagaacgagagaagccagtgatggagcagtgggagtcgaaggaagaccttcgttgggacagtcatgactcgggctttggactttagagacgttgttgtcttaggcaaagagatctcataagtttttttttgatagcagctggcgatgagaaacagttgagggttgaggcttgttttttgatttgtaagtttgataaattctatgctagggtttgggtctttgaccctttatattctactttatctttttaccaaaaataatgatattaataattaattattttatttcaaattaaaaaaaaacttattatctctgattggaaaaaaatattaatcatttaaaataagttatttagagtattgtgagcttattttattattttaaatataaatttaaagttgtgatatagtgatgcactaagcaagtcgagacaagtttacccattcatacatggtgagtcactatagatatcaatatttattttaaaaaaatgtaaaagaaattatgggagttactctttagtacccttcatacttttagtgacccagattagatgacactaacattaatttttatagtctttttgtgcaggtcactaaaacttaccctaaccctttagtgacccacaccttttatgtgagtcattgaagagtgtcactgaaacgtaaatttgtagtagtggatacttcttggattggataattgtaattataccgaaagatagcgagaatcctctaataggctacaagaggtattgtcttctttttataaatctagatttaatctatatatattatattgagatctttaagcgtatggttcatattagataattaaaaattatttttatcaaatctgctttcacttttctaactatggaccattaaaactaacatggtcccaaatagcttacttgtccatcccgaaaaagtctcgtggaatgatagttgccattcagaaatgtgttcccgaatgtctatcatttccactccgggtgtagtcttcaagaaagttagtcctcatccgtaaaggagttccggatggctggctagttattcctcctggaagagtgtgttctggatagtcgactccagctgtctcttttcctatatgagctttagttcgttgtccaagaagcatatgtctcatccggaagcaccttatcttgtgctgatgtggagattctattacaaagagtttttttaagtttgttaagtcgtaactaacttaacaccttatcttttgccgacgcatctactaatgtcgccgttaaaaattgatatgccgacgaaccattgtcggcaaaaaaggtcaccggcaaagctacgccgacgacttcttcttagttttgccggcgagctaattggttgctggcaaaagtgtttttttttttttttgtaatgatccaccaacttaggatcttcatcctgagcctataaataccacaaacacttattatttcaagcatgctgaattgataagtttcaagaggagactttgagtttgagaggtggagagaggtttgggcttgggttttgtatgaaaaatcttctgtagatgaagaagattttgtgtgagagttgaaacactttgtagagatccaacagagaatctttctccactgtattgtacatgttcttgctcaatcaataaagaggatttggtagtgttctagaactggagtagagttataaatcacattgatctatcggacttgaaccagtatatgtatcttgatgttaattttttcgttttattgctttaatcatttttgaattttaatattctattcatccatgttttctccgattactattttttatttgttattctattcattgctaagaataatatgagctagcagtgatatccgatcctctccacatatatcaaatataaactttcttcataaaataatattttagactgttcttcaacatttaaatcaaatttttcattttagtttaatagtactattaagaagta

SEQ ID NO: 23901 - DNA, 2307 bp, Cannabis sativa
gggatcccaaagtattttgtatgctatgttataagtatttaattaaataagcaaaattttaattattcacgtttttcattaacctcgttggttgacaacgagctgcacagtaccttaaaaatcacgtcaacacgcctatgctagctagggtgttacaagggttcattaacacccgaaccacgtaaaaaatacatgtcttctttaatcttgcatttattatttctaaagctcttatttaattagtttttaaaaatctcgttgaaaattgtggtgctttcattgagagctatagaaagatgtaagcctcagtgtttctaaaaccatggtggctacccaaaataatgttacaaagaagattcctcaaggtagccttgatgctgtcatggaggctgaatatcctatttctctagagcatgccgaactgagcaatgtgagagaaggagatacatctggcgctgacaaccaagaggggtgacccaaataaatggtgtgaagtagtggatgaagaatgagatgctaaagatgaagaggaagacaatgacggataatatcaaagacgggtactacaaggatggattctactgtgagcaagatccagaagtagtttgagtatccaaagagctacatgaaacccatgaaaaattagcatgtcaagagaagctttctcaatggatggaaagaatgatggcacaccttcaaggaaaatttggaggtctagaggaggactccaaagaagacacgtcggtggaagttgtcaatagagaaagccttactaactgtgaaaccttagctcatgcaaaggataaggggaaggcaatggtaggtgatgctcagaacttgacagctcccatacatcctaggaaaaacacgaatccaaccaataggcctgtgtaggcgcagaaggtctctgatgcctctgagattgggtgcccttctactctgaaaggccttgttgcgcaaaaagggactcataaaaaagtactcaagcccagtggaaggaaataacaccgtagtgattctattaaccattatggtgggatcggggatagtactctgatgatagttggttcactatagatctttgaaggcgttgatgccaagtacaaaaaggtcaagggaaagaaggtgtagccatgaggaaattacctcagaaaccatttgaatgataaagcttgcagacttgacctccttaaaagtgacacaaaaagattagaatagcatatttctgtcctgagaaggcttgtccggaagcagagtagggtcctcactaattctgaggatgaggacctagagccatgtgttagaaggatcatggaagccccactcctgaataacttcaagatgtcccaaattgagttgtacgatgggcgtacaaatcaaaggacccacctggccaaatataataagatgatgcaagtggccaagatgagcgatgatgcaaagtgtttgtgtttttctctaacacttactaagtctaacgaggattgttagaagaggttggctcctaaatcaatcctcagtcggaagttggaaagagctacagttagccttccaaaagcaattcatagttgcctgagattatgttatggaagttgggtcaatctccaatgtcaaacaagagataggagaaagcctaaagaacttcattcagtgaatgaaggaggcagtagccaagacaaaggtgaatgacgatataaaactcggagcctcataatccagactcacggttaggcccatgtcgtggggagagatgcagagaaagagggcaaagaccttgtccaaatttatgtaaagggcataaggcttcatcaattcagaagatgcttaccagcaagcattcagagtccctccaactccgacccctactccctctactcttggattcgcctcacatgttgctgcttctagaactcaataaactctggctaattatggaccttcaagattcatgtaagcacctactcaaactaatttttttgggtatggaatagcataaattggatgcagtatcacttctgcacagtcaaagcaacaaaccaaagttctagaaaagaacgtgagccaggcccggagcaagagaggcagaatgaatcaaagtcgaagtgaaacttcaaagaagccaagaaaggaatacgaaccaaagtacaccaagtatgccagcctggtggatactcgggagaatgtgtagaaggcaacctataaattttggaattttatgccctaaataaaacacaattcaatataattattgtaacaccctatctataaggatgtcacatgtgtgattttataaactagtttaatact

SEQ ID NO: 23902 - DNA, 3843 bp, Cannabis sativa
  modified_base (3785)..(3804): a, c, t, g, unknown or other
tgagaaaataataatattagaaaaatgaagagagaaactgatatgatcaagcaaaaaaatatcagagggactgaagctttggtttgtagtatgggtaaggaagttattatatagaccacattgagttagaaagggtacacgtggcggagtattattgggtgtacatgagtagaatcagatacgcggttccctatgtgcctgttaattttggaaacaacatttccttttttggtgtattgtttggaattgaggtcggtagggtggtaaatgtgttacgttacgtacaccccacaatccacgtaagcataattattattgcaaataattatatttatacaatgattgatattaggtaccagcggtgtttagcaacttctcgatatatcgcgttgcgattgattagcgatacttcctaaaaactattatattaaattatatgggacgatacttagttcgaccaataataatattaacacataaataatactaggcaccactaatacgtcactacacgaaaacttggatttattaacatttgaaaatgtcacttttaggtagttttagtaacattaatggatttaataacatttgtgaaaaatgtaagatatactgatgtgagtaaaggtgcaaatgtcactatattattttagtatcatttgaaaaaatgtcactaaaaataatttaatattaattttaaatattaattttataataaaatcgtatatattttaattttttttattaaatgattatgttaatataattaattttttattttctaataagaaaacatataattagaaaatggaattttgtaatgtaaatatatagacattatcataagataaaattttataaatacttttcattaatttatatcaatagcagattaacattacaataaaaatttatttatacaaaatatccaaataaacacctaacaaaaacttaaatcaatacatttacaaagattgagtaaaactaaattcatgtccatacaaccaatttcttttatttcttcaaagaagatctctttattttgttttacaatctgcataatccaaaatgcttgtacaggcacatcaacaactcctaaatttcactaaatcacgagctccctctctccaagtcatttctagcttaagatggtccatacatcaatataacctgaaacaaggacttcaaataataaaacaaaataaggatgacatagtgaagattataatcgtacactaaaagtaaaatagatacatataatgattggtaaagttaaaaaaatttcttcattctcaataattagtgtcatggtaaataagtttcatggaaacaaacaaaagtataagaaccatcaagatcacagaaaattcattaacaataatcaatatcatgaatacacctgaagaaaataacccagcccaggaaatagataaatgaacaaaaacaatagtatatgcacagtaaatcaaaaaaattatatcacaaaactcaaaaacaaattcaaaccaatagtcgtatacaataaacatacatatacaattaaaagaaaattaaatataagtgtatgggagctttacctagactcacactgggtttagaaatctagactatgacatccacatccatccacaaaagggagcagaggaacccaaacgtcggcaacattcaatagtcaattacataattaagagcttcgaaaccaatttttgggtgaatcatgttgtactcgatgagaggatttctttcgtgttgggtggatcgtatttgaggaaagatccaaaagtgttaaactcactttttaaaacatatatacgaaattgtcacccatttaacctgaaaacaatctcaacataagtagtgaagtcaaacacaggatatctttcacctaaaatttgaatccttacacttggtgtcatacctacatcaataaccagtcaaaaataaagaaactaacagaatcacattgctcaaacaacttattcaacaaaatttaccaagcctacttcataatccatatgtgaattactgtgtcttcatccacatatatcatagaaagaaacccaaaaattttagctatgtccccaccatcattacctctctcaaattgaggtaactttataagattaaatttctccttacttatatcaaaagcaattatccctgtaaataattccagttcatcttcatcatcagttgtattactattttcatagccaatagaccaatgaatgaagttattaacattaatggacatgcccaatgcccatagatggtgtaacagtagtaggttaggcattgttattgctttccatgaattgtttctcaaactataaatcccaatttggtgaccctctttaaaagaatgtcgaggtgtgaacaccaccactttgaaatcattggttaaggggtcatagccaagcctacctaaacaataatatttatcttcagatctaatcattggttatgtttatgcctattactcatatacagagaagagaggaaaaaatagagaaagcagagagagacttacccattcagagaaagagcacatcgagagatcgagagagataatgagaggaccgagaaaggggaaggaagcttgatttgtggtcggcctgcggcgtcgatggctaaacaatagccgtctgagtcgtcatgcgcggagagcaagagaacgatagagaaagaatagctcgaaggggagagagagcttaggggttttaggttttaggggccggcgaatctcatggtggggtcggattggaccgtcggtgacagacagaaaagagttccaccgggactgagaagagaaaccgtgtggtgagagggtgaacctaaaatggggaatgatattccttcaaaaaaaaaactgtgaaatgatatttttttcatattaaattttttaatttttttactaatatttatttatttatttgaaaattttagtaacttttttttttgaaacagttagtaatattaattaaaagcattattttctatttttaaaaaataaatatttttactcacatttttaaatgccattaattttcatatttcgtgacacttttacaaatgtcattatttatatattttagtgacatttttttatatactattaaatttaaatatatataaactagtgacgttttatatcaaatgtcaataaaacatataaatcctgacattttaaagaaatgttattaatcaaaatgtcatttactcactttaaagtgacattttttaatcaaatgttactaaaccgatatttttacaacatttttcaacaaatgttacaaaaccaaatgtcactaatgtgatattttggtgtagtgaatagaggttctactgtagttattaatataggaagtcaacaagccaatcgtcaaattcaagaaaatagttataccatctcttcaacatgtttatggagatcagatatgattaaattgggaattcagcagtctattatcaataaaagaagaacctttgtgcaaccaatggtctattctaaattaaagttaaaaagaaaatctaataagactttatattgtggaatcaaatgattttaaaacataatatcaatatagatgaaaatgaagaatattcataattggtaaacccgtttattaaaccatctaaacaaaaaaagatctcaactaaccatcagtaagtacaatgttgaaagtattatagataatgttataatttgaggaataagataaatggggttccatcccaaaactagttggcaatgggaggagtagccctttcatcttatatatcacaannnnnnnnnnnnnnnnnnnnatgtgggactaactcttaatacaccctcctcacgtttgg

SEQ ID NO: 23903 - DNA, 2515 bp, Cannabis sativa
ggataattcctcttaaaaaaatttacaaatcgctctctccaaataaaccgctcaaactaaattgaataaaccgacaaaaaaatacaattcaaaataatttaacaaaaatctaaactgcttaattaatatatttggtggattaaaaattattttaaactgttcaattaacctgaataaatcgaattaaataaagtcttatccctcgagcataaggagaagaattcaagaaaaaatccaaaaaattcggtgtgattgaagcttctaatgttaaagaattgaaaagtgtggagtagcgcatcaacatagaaattcaatgtcaaggtgctaaaagacaaaagtttggtagcaaggtcgtatttagcaagtctatggcgggcctcaacaatggaattcaatattgaggcatgaaaaccttaaatcgctcactgcccaaaatttagcttcaagtgtcgtgacatgccctccagtgttgcagtgcgcctcaaatttctagaaaatttttaggagcttctaaaagacacaggtagcgacatgcttttgcagtgtcgtggcccgcctgcttaaagtgacaaattttaggattttaactctattgaaaagctatatgaaagacccttttgacactttcaaagcaccaatgatagtaataagggacgaaaattaaaagcgataagcgactctaaagactttcatcaattatttttcgaagagtttttttttcttttgttttctcatgttcttaattaattgttgtgagttatttacaatgaatatgagtagctataatttcaattagggtattaataaagattgtttgacactttattttagtttaatgtggttcaattcttcctcaattttcttgtgtatctattttattcctacttaatttcttttaattgtctgaccttcaattaaatattttatgattttaatacaaaatctgagaagtgagtattgattattctatagtggaatagacacagatttcaatataagacaagagtacatatatggtttgtgtagcatttaagatttttatgcttaatgcctcctatatgtttaaatttatcacgagaatagaaaattcacatataggttgagatttaaatatcttaacccgaagaatataaagttcttcttttagtagtaaaaattttcgctatcacatgaaaattagaatttggaaattgaattgtactaaatcatataaagtagattcaattgaaattaatcaccctaagttttaatcattattgaatcacactttaatttatttgttatctttgtcaatagattttaaacatcttttcttatatttatcaccaaacaaaattagaaattaaattgtttggtaattaactacaatctttgtgggatcgacctcactctagtgagtctattacttgtaaacaatacgtatacttgtgtactaaaaaaattcataacaataacttttctattattgtggtccttccatcacaatctattcaaattttttcgtgaaatgggtgacgtgataaatagtagttaataaataaatacaaattatatatttttcactctttttatgttaatggataatagagtaaaagacttttttttatatataataattcatatttttatttatagtttttaatagttaaggtaaaaaaggtaaaaatgtatataatttgcatttatttgtcaactgtcatttattatgttacttatttcacgaaaaaatcaaattgagtgtaataaaaggaccacattaaagtaaaagtaatattttgaggattattatttacaagtcgaatgtcttaagagcacaatttagtgatgtaaaaaaattagagtgtaaaaatactaatttttcttaaaaaaaaaaaaagtttttaaaatagtggttagtccatatatataaataaataaacaaatatcatttaaggttatgtaaaaatatctgaattaaatgagattaaatttatcattatgtatgatttcaattttcaaataaaatttatgttttaatttaaatgtagttcgattgactaggattgtttttgatcaatagaggactgctcaacaacaaaagggtgaagcgttgttgttggtgaataacaacaatggctgcgagcagtggcagaaactaacgacaaatacgatcaagattaatgtcaattgagctatctttaaaagtaagagtaaatacggctttggttgtgttattcgtgaccatgatagttgtttgatagaagctatgcctggcagcagaagtggatgtgttcaaccagagcttgctgaaatttttggggtcaaagaagcgctaagttggatagagacaagacttgtcggaggtggtggttgaatcagatgctttacaagtggttcaagctatcatagctcggttcccatgtcatctcagtttggattttttgtttaagattattgagaatcatggggttccatctcaaaaccaattggctatgagtggagtagctcatgttctttatatatggctcaatacttt

SEQ ID NO: 23904 - DNA, 3417 bp, Cannabis sativa
atgtacaatcaccatccaagctcggaactcactcctatttagccttcacttttcctttacctacacatgaaagtagcaactgtgagtcaacagactcagtaagaaaagcatataataaataatacattaccgacttgtatctaggcgcccatacacctatccacaaggcttattagataagtaagaacattctttatacatggtattatcgaccatgatatcagccactaccagtgctatgagtgcactgtgggcctggtactatattcgtactgctatgatagcatcgataatacccaaaagtataattaaccataatatcactcttaaccagtactatactcgtactgccgacccggtactatgctcgcactgctatgatagcgtcagctaatactttttggaattgcagatatgtcaaacctggtactatactcgtactgctgacctgacactatagttgtgttgctatgatatcaattcacaacatttacatatcacatacacaacatgcctatattactcatacacataataacatatataacatgttctatgatatgcttaccttatttttgaattcaaatgagttggctgccctgaatgaaaaactttgtgttggatgaatgccataagtcacatttacataaacgtgtaaataagatgccaaaaccctaatctggaaaactcaaactccctactaagggttctgctatcagtaattgttataacaataccctaattatcagggaaataaccaactatggctctgaaaatcgacaaatcaaacaattcaggaaacctggccataagctagttaaccggttttacaggacctgtaaaactagttaactggtttgcaccaggtcaccccaaacaagttcaaaacttgtccaattcgtgtccagaccatgccaaaccttccggaattcttgtaccaacctcaaataatattttccaagcaataatagcaagaaacatacacaaaataaaatttaaacatgccattaatgagctgagccaagaagtttgagttttcaaactcaaacttgttcattcaccacataacaccttaaaaccagcatctagaagtcaactctaactttaaatgaacctagaaactgattcacaaatacatctaaccctaacaaccacaaactctcaaatttacataatcaaaccaaacttaaaacataaacaacacatagactagagctatagggtcttacctttgattgaaactccttgattccttacgaaatttctaaaaagcagtgagggttagggctggctgttgctggttcttgtggtagtcgagcacaaagggagagagaaggggaaatttctatgtttttcttaaatatttgagttctttctaagtgattaatttcaaaagtaattaatctaagctgaactcaagtgtggccagctatccaaagaaaaaccagccacctatcacacttttgccaaatacctaaatgcccttgacctaaaaactgagcaattataagcttaggggtaaaatggtccaaaaccataaccccgcttaaacccggcattctaaatatctcaaatatttttcccgctaggaaataggttctaaacttactcatgtgattcaaacggccatccatcgcatttttcgtcgtcgctgagcaaaaatcataaaaaattacataattcaaatttaacttaaataatactcttagagtttaataaaatcttcgaaattgagaaattataactctaatgccaaattctaataatgcgacccacaacttaataaaatcatgcataactataaaaatgtcaacaattaatgctaattgtctttactaatccatactctaacatacgatcattacagatactatgagggagagtggactagaatgccatggaagaagactagcaatgatgaagatggtgattttgggttgtaatttggatttgtactctcaaagactattcctaatcaagtagagaaaagtaaagaagaaaactcactcgcccagaatgtggaagacagaccaaggcaatgagactcagggcagtaggagcgccagtgtcgaagaggaatgtaggcgcttgatttgtgaggttctaaaataagaaatataataataatagaaatataaaatataaaaaataaactataaaaataagaaataaaaataaaaattataataatagaaaacaactgaatccttcttgtaaaaggaaaaaaaaaaattggatctcctatagcctatagataagggaaatccttaagcacaaacaataaaataaatatatgaaaaatatttttgaaatgatatttttattacatacataattttttctttacttttaaaaaaatgaaacaatattctttggatcatttagaaaaaaaaaattgcagatcaagtaactgaatcctacaaatgcagaaataataaaattattaatataaattttttgggagctaaatcaagaaatgctcaaaaataggttgcaaactatttttagaatatttctatctttaaaatattctaaatatgtgttgtttttaattaatatatattcagcctccaagatccacataaatgaaaaaataagcttaactacaaataaaatataataatattaatctacatattttgtctctgtgtactttctttattcttaatggctggtggtaataaggatttgaatatgaagatagtgggcttatcactaactttgatggtgataatgatgacaatgatgattagaacaagtgaagctggaaaaactgatattattgtaattccaatggatccatgtgagattccaggatgcactgaacaatgcaaagggtttgctggtacaaccatgaccaaggctgtttgcaacactcaaactatttgttggtgctatcgtcaagagccagattttccagctccacccccatcttccaaataaattaatttcaatctcatttattttttctttctcttacatttttgtttctaataataaatcgagagaggctggcattgttatatctatgcactctttcttacacctttttcacttgccttcatgaataagaagtttatatataatgcatattgtctcataaatttcattaattttgtgtgtttaattattattttagtatctattggttgatttctaaatacttagatcacgcttggtaatattttaatttttaaaattttttaattataaaaataaaagataaaattattgtttttaaaaaataaaaatgtgttctttaattacttttgttttttaattttgaaaaaaaaaataaagtatgttttgtaatttttatttttatttttatttgttgatattatttaagtcggatccgtgtttggagacgagattgggaccagggctagggtccaagcaggcccggccctgggcata

SEQ ID NO: 23905 - DNA, 3264 bp, Cannabis sativa
acgatgaccgttttgtgctgtacagggtaagcatcaaaattcgaaatccattttctcaacacccacccataagaatctttgtcctctttctacttcatcatatattggggcccttcccttttctttctttttatttttctccattatagaatatgcttaaagctattcaagttctgggttgttcgcatatctggagaccccataccagttctgggctttccttcatttccgtctccgtcaatcccttatcctcttctttgagaagattgccctccaattcttctttcttgactatgtcttcaacgcgctcgagtagcggattcggagcgtttcgtgcacgcgcagccaactctgagtcaaacccagttggcgcttcttcttcatcatcatcttcggtcgcagctcaatcaactgtgagcattttctgaatgcccttttcttttaaatctttattggtattttggtgttacaattcttttgtcatggttcggttattactattcattgacaaaatatttttggactttaattgcatttgcagggtagtgctgctcttaaggtcaatttttgccaatggtgtggtggaaaaacaaaacatgaagtacctgaaggggaggagaatattagagctatttgtacagtttgcgagaaaattacatatcagaacccaaaaatggtacaaaacacttttgttgtgaaatcttttgttgcttaatgaatgcatgtaataatccattataagttggtgctgctcgttttttggaaattttttattgattatattggattcgtacagaccttcatgtgtgaactaacactcattaaggctttcaaatctcagaagatagtgtcaaacagtttagaggttgttttgtaccaagaccgacttatgaggttgttttgagcttaatttactgcttcgaaatagttgttcaagtaattgataattatgtacagtgtaggaagatatattaggtatagggagtaaaaatgaatagttctggatcatgttaatttgattgcaaccttactaatcagactgattgaaatgatcattttttaaccaaaacatagactgcattaaagtaagagtaactgatgagaattctggatgtgccaaaatttgtttttttaaatgtaggtcttgttctcctttctctgcacttcctttgtgattctcctattcaaggatttatttttttgaatgttattatacccgttcactttttggtttacaacccattatttcgtgtcttaaagaattatgtaattatgtaattatttgttttcgaattatggtttgataaagaaaagattattattggttggtgagtaacgaaaggagggggacgaaaaggaatcttatgcttataattttcattttgattgtaggcttactagtcaattgtaatctgtatttttgcctttattctgatctttgctgacaatcgcgtagtcaatattttgtccgatacatataggttgtgggttgtctcgttgagcacgataataaggtcctactttgcaagaggaacatccaaccgtcatacggcctttggtatgtttgaacatgaataaagtttctcttttgggaatagtgaagtgaatcatcaagtatgaaatgtagggtagtagctttgttttgtacaatgcagcttctgttaattgtgacagttttatgattttaattgtttgctgttgtcaaataggacacttccggcaggttacatggaaataggggaatcggcagcagaaggagcaattagggaaacctgggaggaggcaactgctgatgtggaaattgtattaccttttgctcaattggacatccctcgaataggccaggtgtggaaaagttacatgttttaattatgtgattcatttcatttgctcaaattctttatgtgtatctttattatttatgtctgtcctttgagcagacttacttaatcttcttggcaaagttgaagaaaccccactttgcaccaggtccagaatcatcagaagtcgagctttttgcattggatgatataccttttaattccttggcattttcttcaatgttggttaccttgaagttggtatgagattgtttttagttctaaaatctagagattcattagttattttgaataataatacatattaggtgatgatgttctatttcttctggctgcagtatgttgaggatgctaaggctggaagatttaagttccactatggtaccattaataagaggtattaactttttcacttgaagataaagcacttgattctaaaattttcctgtctgaacttttgaggctggctttgtgctaattttggtatggtgttacttttgtcaaacttttcccattcatcaaattaaaaacatttctaaagaaatggtcacttaaggctagatcaaacaaaacggttggatggttatgtgtgcgtggtccagggttaaatttcccgtcaacgtatcctgaaagaaccaacatccatatggaaactgcaagtaataataactattgtagattgtgttaaggcagtggatctggatatggatattggtaattgtagttatgtgggcgacgagcgaattctgtattgctgtaccatattttaaaaatcatcaagtgtcccagcgcattttggtgacgataaaaattgtaaggtgcaaactgaaacttggcagcttgaccccccgttccccttctctcctgttaaggattttactcataattattacagtattacctatatttccctattaccaagagagagagaggagagttataatcatttatgttggtttggcaaatattttagagatgtaagcaaaaaaatataagcaagaaattctaagtggatttgaatggtggtaatctgctactaaagcttatgtatatactcttattacttagaactttgtatggtttctactctatggtttagaactagataatgctacattattgacatcttctttatctggctgttgctgccaggcctgggactagtccatctgatattcacgcctttactctcgacggtcatctgcaatcataataagatggtaattctcttacatatcatctaaatttgcagaggagaatgaattaattaacttttcacttccatctaagctgcctttaatttccagctttctcttcttagaagttgatgttcctttcttgaaaaaattggtagttacttgggttattaattgcttatttagtttgtcctaagaatttggtaaaattgatagtttggtacagt

SEQ ID NO: 23906 - DNA, 4844 bp, Cannabis sativa
  modified_base (3333)..(3334): a, c, t, g, unknown or other
ctataaaaggatacataggcaacttagttgctaagactaagtgcagtcgccgataccgcaaaatggtataaaatataaattttaaaatttcataaaaagtcatacacctaggaatttttctaaattttcaaatagcaaaggattccttaaagtgatcatctaccagaatccttatattcaaatactaaaataccgtgttcttaactacaagtggcttgatccttgtaggcagctcggttaattaaattgattgagttcagcagtaattctaaatttccctaaattatttcaaatcatttaatatcatcgtaattggaatcaaagggtattttctttaaacaaaaagattgtaattaagagattatttttaatatattagatgggttgaacttaaattaataaactcttatgttgtaaatttggcataggtgaaattatgttttgcatttatttttaatactctaaatgtcaaatttttgcttaacagtcccttagacccttactgattagaatgtccaaggccttgttatctacatcccccatctttttattgactagccaagcgttcgatcaatataattcatgaccaccactttgcctaccttatttctaaactatacacaataggggctagggacttgttagtggtcgtataggaagtttttgatggaatgattgcattggcatcactgttcaaggtagtctttgtcggagggtcagttgccttgggcaaagcctcattgcttagtgatactttggccactttctctttcccttggtcaccagtagtgatctttagatcgggacaaatagaaggtggcaacttcttagcatccttgtacgaactagtgttttggattttggaaggggactagccaccaggtgtggaaatcttcctcttagtcatacgtgtatatgttgtaaaagacatggctgcaagaaaaaatagaaggtcagaaaaataaaattaaaatcaaatgcaacatgacaataaactcaaaggaagtataatcccactatctatgccatcaattactcgagaagcatccttgtacaacataactgttagttcgtcatcggaagaagcttccatcagcttgtcctgaacaacttgttttcctttgcctttaacaaagggtgaagaagcacgaaacaactcgacagatttagtattgatccaagtatgagacggtctagatgaggggctctgaagacaagcaacaatcctgggttcaacactctttcctttttccttagacaaagtgcacgaatcttgctttttgggttcagatggtttgggtcgagggacaactcttgaagaactagaaggataaagaacataagtgtgaatattcggagtcgttgtcgattcgactatatttttttttctgaaatttcagccaccacataagctcttttcaagagctttagagttggaggtgcacaaataaacgggtcgatgtgtttgaaggaaaggtgtttggctgatatatctcgagtaaggaaatagtacttcacaaatcccctcgatcttagtaatttgtttggattcgctcaagtaattatttattggtgagagaagtagaaatactctatgttatagtttcacaagtttgactttaggtcaaagtaaaaattccctttatggggagaaggctccagccaattaagcttcgtgcacaaaatgaacatcgcaactagatatttgactccctttgggctgatctgggtcagtcagatattacaataatcttctatcctcctaaagtatgggtgtaaaggaaggataacacactgttacgaccaagcacaatggttgctcggggccaggatcaatagctaactagttagatcgaggtgcaaaaatgataacttctttaaaaatcccctagcacgaatcttcttcacttgccgctctatgagtgaagaaggcttagatttaaaccaattaattggttttttagctacaacaacaaatttggggattccagacatcactttatgcagaatcgtctagacacagggtctcacagtgtcagggattgtcccctactttgaacttgcaaagtgtgcagatggtgcctctctcttttgattagtggtcgagtcactaccacccccaccataaccagaggtaagaggagcagtggctccactaacaacctgagtcccttgagactcctggatgcactcaactgcaccctcagctcgtggtgcttttcccaccatatcagcataggtggtgttatcatctgtggtgatcattaggttgtgtttaatcttatggttcagtccatccagatacttcgctttcttactgaagtcagttggcaaaattcttgaggccaacctagccaatctataaaactgggttgtatactcagcaacggtcatattctctttctaagtcagctaagtaaaatctttcctctttgtacttatggctgcctcgttgtaatattttgcattgaataattcttggaactcttcctaagtaatggtagttacatcccgagtaagagccaccatatcccaccagaccaaagtatcttcctagaattagaatgtggcatcagccactctgtcgttgccagtgacacccataatattcaaaatttgtgaaataatcgttagccactattcagctttcatcacatctggacctcccagaaagacaggaggtgcttgcttgcagaacctttcgtaagtagttccattcgattcacagcagcaactggccatgcctgcacaacaggtgcaggagccatatgcatctcaagagcaggcactgcaggagcaccctgctacctcaggcatccgatctctttatcttgttcattaattctggcttgcattactgcaaaccaattttcccaatcctgggcaacctcttgtggcttaacatctcctcggctgcgttcgctgcctcttgagcctcttcctcggccacgtatatttaggggaaactgaactccctgaccgctattggatctgatcgagttaccctggcttcttgtgttctgcctggcgtccattttaatagaacagcctacgaaaccaagagctagcctggtcagatcgcgattaagaataactactaattaccacttattttagaaattaaaacatgcgcatattcagctatcaggctactaacatgcttcctattaggctttacttataacatactaataaaataaactactaaagtaacaagggcttcatgaaccgtgagtcgagcttatctctaatgatgattgtacatgtcatgacgatcttcagaagacagcttggcggctctaataccaaaaattgtaacaccctactagtttnngcgtgttatcgtgattttatattatttgtgcagtccgttgctaattaacgggtttattgaaaattgtgaataattaaaaattttactttatactattaacttgaaaataaataacttttatataacccagatcctgagtttaaaatatttacaattgattcaaattattgatacaaaagttgtcgcctagcgactatacaaaatacagcatgttgtcccaaagatcgtacactacaggactaatcgtctcgacatgtacaatcttcattccctcactctcacggttgcttagccttagccttgcccttacctacacatgcaaacaataactgtgagtcggcagactcagtaagaaaagcataatcatattcatagatataactcgggttacatttaggcgcccatacacccagctgtaaccctatctcctcaccctaggcagtactgagtctagaatgttcatacgacaatactatcggccataatattagcctatactcgatactctagtcatactctagtcgtaccgattaacctatactcggtactctagtcatactctagtcgtactgatgtgatagcgttaatcagtatatgagtcaaacatacatctatcggtatccaatacaactctacgtatattgataccgctatcgatgtaatctaacaggcttaataaacatgtaacaaaacatgtaaacacatatgcatatcattatactaatcttactcatttcaaaatttaggtgtgctggtcaacctgagtggaacagctgctcgacgatttataggcccctaaatcacaatattcgtaaactgatgagtgactcgctaattcactttttggggacctaaaatcaaaactaaaagttttcctattaatggataacatggcaataccctaaataacattaaaataggaaaatctagggtaccctaaaatgcctcaaccagtagatcggatccccaaccagaagaccagttctgtggggtttgcctagggaccaactgaaattttggttcctagaggtcctactgaaccgatcgactaattaagtgcaggaaccactaaaaccttaactaaccaaattgaccctaaatgattccaaaccttccagagtacctatttacaccacagtaagtaaaatccatgcaataaaaccaaataataccctctgtagcaaaattcaccatgagagagcaaagtttgagctataaagttcaaactttgttcaaacacaataacaacacccaaatctaacttcaatcagctcatataacatcaatttaacttaagaatacccaagcaataccaaataatatctacagcaacataaaactcaaaatcaagcataaaatctagctttgaacttaagaaaacaaagaagaaggaagttatgatgtttaccttgggttgattaccaaaatcttgctagaataccctgaatcaagctgaagaaatcctaactcctgcaagtttcttgagaacttgagagagagagagagagag

SEQ ID NO: 23907 - DNA, 1625 bp, Cannabis sativa
cgtactcgtgtataagagtcattagtccgtgggtgtaagggcccaatagaaacttgaagcgaggacgttagaatgctttgactgctgaacttgcacagccaccagcttcgatttcaatggcagatcatcatcttatggctcttagtttaattaattaattaatagtatcactactgaactacgtaattgcaaacaaacctttttcaatgtaatttgtctatatgaaaagataatggaattttcagtaaaaataatttatttcaacactgaaacttcttaacagcagactaacattaaatgcagaaaatataataagataacaaacagtatattacatacaaaccaaaaggattaaacaaaaggaaacacaaaaaatatatagatagatataattccttacaaaaaaatatatatgagaaaaaaataataaataattatgatatcaccaagcctcatactcatagccagtttcactagagatgttcttggccaaatatttgcaaagttctgcaccaaacacaaaatatatggacagtagaatagtgccattgaactccaaagaaccaaaaaaaaaagtcacagcttcaacatgggaatcttatccatggaggccagattcatcttcatgtcaaagagaatctctgagctttttcgtaaaccgcctgatcttgactcttctgtgttgagtagtatagatatagagataagaatgcacaatttgtattatgaaaatcttctatcttttttcacttcacttgtcgcacaccgactgtttttaaacgaaatctatactgtggttggtcttcttcttcatcatcgtcatcctcgtcttcactagaatcatcttcaactctatcccaccttccatagtccaatgttgaatgtccctttggtttcggtattgattgccacccttttggatctttttctgataaccctttattctgctgtggttgaggagcaacaacaacaacttcagctgtaggtttattctttattgagttcactatttgattctttacttgttgttcgggtgaagaaaccttcttgctgtgtatattttgggaggtaacaacattagcatcagcatcagttgtaatccttttaacctcggttttcagaactgttcctgcagatgtaaccgttgagatttcttcccctctacagttttcccccttaaactcgtcttcttccttttcatcttcttgttcttgttcttcctcttcttcttcttctaactcgggtattggagcaagtgcctttccttgagcaagaaaagaaaagaaagctcttacaaactgctaatgctgaattgctaatcttataacttgtttaacatgtcatccctaataaattccaacccaaaacagcagtagtatatttaagggtacgtttggttgagaggaatgaaaacacaggaattcaaattgggaatgagaacaggaataagaatagaatactcattccaccaaaattgtggaaaagtcattctattccaatacttttaaaagcaaccaaacaaaagaataaaatgaaaactgattcaactaaagtcctatatccagaatttacatggaaattttgccatgttttatttttccaagtcctataatatgataagtttt

SEQ ID NO: 23908 - DNA, 3564 bp, Cannabis sativa
ttgcgaatgaaaaagcatgcaagtaagaacttctttgaaatcgtttctacttttgaactggcatctttcaaatttcaatgaacttgtttgaaactttctcttaatcttttttttttagttcttgtcaggatcagcaaagtttggtggttatgagaaataggctgctagcttatttttggccagattaaactttgatgttttgcctatatttcatgggaagagttacatgaaacgaaagtggattcgagagactagggaacataatcatctacatcatctgttgtaaatttttagcttttgtttttgtacatagtaactctatatttcaactaacgtctaattaacactacaccttactaactaattttgatatatatatatatataattcacgaaagaaaaatccaaaaatccaatgaccagactaaataattctataatacatgaaattatgatagtttcgaaggtatcttttaactacataacttactaggaattttgtaacagctaacctcctctgttaagagagggtagctatttctgtcttagttaagtttaaacataaatatagaagcaattcaaacagattggttatagaactttcaaaaaaattatcagctcgatagtaaaaattttcactcatcacacacaagatcaagacaacaaaaaattgtaaaagaaaaaactacaacaatgacataaaagaatctgaaaaaatattaacaaaaatttgttatattcttcccaacagtcaatacaataatgcccaaatgtcatttttctttctccagctactatagtatgatggagagattatggtgtgaagtaaaagacaaaagaaactaatgaaatttttaatcaactgatgtgttagttatttatatttgttttaattaaataaaaataattggaccagttctttattactgtataaattttccaatagtagaagtggagatatatagttagatatatgtagattgagatgagaagttgttttctaagtaaacaaaaagtaagagttttgcattatatataattttgtctgtgggtctcgaacactgaaattggccggcaaaagctgctaacagaagccgcgtagaaacaaaccaaattatttttctcttttctaaattatttgtttatttattttaattaattaattgattaataatagtaaaaaagagatcataacaattattacaaagaacaaaaaagtttacactgttacggcatggccaccaaaggtgtaaagtatattagtggctccggtaaaataaaggacaggcttagtaggagctgagtgttggactccttcaacctataaaatacaccaaatttcattcacttcaaaacttaactttttaacatttatttaaaaagataaaagttgggttcagaaaaaagaccataataatggctttaagatcccaaacaagagatattatatatgtgtatttatttacctgaccgtgtacaagagcagctatagccaaataccaagcagtgtaagtggtcattccaagaccaagaaaagaccaaattctgtagttatggaaagagggaacgaacactgttgtggcacaacaagctccaaagatataagtccatgtcctcttgtctagattgtcgttgatgtagtaaatgttactgtttcaaattcaaaaaaagattagattttgacaaaaacccagatgttaattttccttatttaatactaaaaacagagaaaggaagaatttttttgaaccttgcacaagctatgagttggattacagatccaaagagaagaaaagtacagttgaaagcaagtcccaaggccttccagattggacccaacaacccatcaagcacttcaaaccactgtgtcgtttcaaacaatgttagtgtcgttttgagcttaaatggattatataaagatagataattacaaacctgtatgacatggttcttgaagctagcattttctttctcctttctgcttctgtattcaacatagagtacactgatcaaataagcagtccaacttccaacaagtccataaaatatctgaagaacaatcccagagaccattcccagttgagagaatgagtatggcaatgttaagagaacctgagcaacctgtaaccaaattgtgaggaagaaattagtaacacacggcaagtgtttgataatatgtttgaatggtaatttttttttttttttcttacttgattggaagcacaactgaaccaagcgtcccaggcggaaccaccatgccagagaaaattcttgacattgaacattgattgattctcttcttcttttgatccttcttctttggcttgttgatcatggctatcaacctcactgaagttagagactatggcttcctctgcttgcttttgaggcaacattgttttttgatcacttaaggcaaccgtctaaatctttggtagatctaaattacataaaagacagttaatgagacaaaataatcaataaaaaatgaaaaaaaaaaacgcaaccccagaaaacgaaagccaataagaccccagatccaaataccagaaattcttttcacagatatataaaaatgaaaaccctccacagaaatccaaaaggaaaaggataaaaacttggaaaaaccaaaaggggttatagtctaaattctaaaacatgttttaaacaaaagaaagatgaccagaaatgaactctttcttacaaactatatagtaatataccttgtctgaactctgaaatgtcactttctttctagtgaagagaagaaagcaaagtgaatgaaacctggatctttcactctattccaagcaaaaatgatcttatttttcggccttgactttgatttgtcaacttttatcaatgtataattttccccacctagttttcagaatgataaaactagtgtagcagcagcagtagtagtaatattagagagagtgagaaaaagcagacagagtcatacagttgtggcagagtgagaaaaagagagagtcatgaattatccattacagaatttggtacagagtgcataagacataaatatatatatatttatattaatgggcttaaatgcgtcgaaataattgcaatattcaaaaacaaatctctatgcctagtcttcttaaagatcccacttttaatgcaccacgaaaatctctgctctggccgaaaccaaagacggcgagacctgaaaagctggaacaaattttgaagatggaaaagaaaatgaaagacccttttgagctcttattcaactgaatatattagatatatatatatagtaactaaagagtgatgactcttgcttttatcgaagaagaagaagagaagaagaaaaagttgagagagatgaaactcaaattctctgtattccaattccaattccaattcgattcttgggttatcaatcttaagtgacagagaattttgagttcaaagtggaaggaagagaaggttgttttctaatcagtagtaaggaccaaatttatacaatagaccttctcttttatagaactcaaaagcaaccgcttcaacggctctgattacataatttctttatttt

SEQ ID NO: 23909 - DNA, 2406 bp, Cannabis sativa
  modified_base (27)..(29): a, c, t, g, unknown or other
actaatcagattgtaaagagttttatnnngggcataaaacccaacaagaagctagtcaagaaaatcaaatgttggtttggactgccacaaaagattatatcagataatgggaaataatttgatagtgacatgttcactagcttctacaacagataggacatcattaaaagcttcttcattgttgctcatccttagacgaatgggcatgtggaagctgtaaacaagacccttaaggacactatgaaaaagaatctagaagaggcgaaaggatattttcttgaattactctcaaatgtactctagtcatacaggaccactgacaagataggcactgggcaaacaccatttgcattatcctatggctatgaagcaatgttgcctgtactaagttctgaggataaaaagaaatggtgcatacaagcttggcaagtacaattagaacatggagtttgttctcctaccaagatacttgaatggagaacatcttagaaactactatccatgaccaacttgtacgtatactactcttcaatagtagttgagtcaactcactcataacagttaatttagaaagagctaagtatccatcactcttcagtgatggcccttatctggcatgtcgggtggatgtagccatagaatgagttctagaagtagactttttattttgtaagcttttagaatcaataaatatacgtcgcacaacgataacacttattttagaccaattaatgataaaaatggcattatagttcaatattgtatccagcaacttgctaacaagataaactcgtaaagttaatctttatttttagttccacatgcatacaaacatgtctctttaagaaaatacacaggcaaaaatctatagtacttggtgagtttcaagttaccaagagaccataagtctgcttgatcacatgagggcaccaacacgatacaagcatcgaacaagcacagctaaacttagacaaaatttaaagctttgacaagcaaaaaattgaaagctaagtatactgcaactggcatactttaaattagacatgattaagtaagtccggacacttatatgtctaataaaaaaggtaaagtcaggattaaagaccatcgggccgatcatctatccaaagtaaaaggcctaaagaccatatacaaccattgtttgaatgtatagggcctataggccatacaagaacaaaatgatagtgtgcaaaataaaagcataagaactaacaaaagtttctaaatatcatcaggtataatggaaaatgtagatggatctacactggtcggaccctaggcagtaacatcaaccttggtgcgtggagcctctaaagaaggctttatagcctaaactccaacagactggtcggccactacatcaacgggctggctggccactacatcgacaggttggctggctaatacattaacaggctagccaaccatagtccccttaggttggttggttggtgcctcctaggtctggtcaaccatcatctcaacatcaaagccaacttcctctgtcagaagtctacccttataaagttctctccctcatcgaagttaactctcacagaatggcgactctatgtacttcaggttgacgctggggttgtgcagatacacctcgtaaagaacctttgaggataagctaagttattcatccttgatggcctatcacccatcaagggccatatatttctccttgcgctccttcttaaggtcctttttcaatccaatggtcttagcaatcaacctgaccaccttttggttctggaggctaagcagttggtttaggccattatattggccctaaacctcaccaaagctagttgatgcttcatctaggtcagcttgcaccattgtgcgagaatctttctctgccttgagttcaacatctaggagtaattcaagccaatttcattttgcctcttctagatgctttttcattgtatccttgagggtcttatttacagcttccacctgcccattcatctgaggatgagaaacagcggagaagcttttaatgatgtcgtatatgttgcagaagtcagtgaacatgtcactatgaaattgtttcccattatctgacataatcttataaggtagtccaaactgacatatgatgttcttgactacacagtcgagggctttcttggaagttatggttgccaatagctcagcttctgtccacttagtgaagtagtctactacgaataaagcatattgtgcacctccttatcccctagggagttgattgataaggtctattccccccacaacaaaggctcaaggagactgcattagtgtgagctcgtttggtggagctctcaggatctttgagaatctttggcacttgtcacatttcttcatatagtccattcaatccttgattatggtagg

SEQ ID NO: 23910 - DNA, 2053 bp, Cannabis sativa
  modified_base (37)..(48): a, c, t, g, unknown or other
ttttagaagttcatgtttaggttgttaaatcaacatnnnnnnnnnnnnatctaagttcctggtaaaatataattccaacacatacatgttcttgcagttccacaatttccacaaaatataaaggaagatttggaacacttttgtgttaaaaacttctctcaccaagtgtaatgtgccaattaaaggaaaatttttatattgtttcataaaatagtaagaaggggtaagtttccataccttccggatagttgaacaacgaagtataccatgctctagagtcccattgtggtaggcacaatggggacatttttcttccaaagtgatttgtcgtttcaagtgggaaagttaagagaagtagctggtggttccaagcaccgctaggagttaaaatgtcagacactttgtgtaggtcaggtttggtacagagagtaggaagaagtaaggtgataccagggatccactaatcctacaaaatatgaattgattggccatttttaattttccatttgagtcccctttttaggagggatttacactaaatgatgctagtctagaccaaggaaggacggtagctggtggtgacatggagaaaagggatagatgggaaataacgagccttaagaagctcagagccaagagtgttaggatttttgaggattctctaaacttgtttagcaagcatggcttggttataatgggtcatggatcgaaaaccaatacaacccttaactttagcttggcagagaggaccacttcttctcgtgggttatttttatattgcctttgctaccctactagaagttagacatggctttgtcaaggtctctagataaatcaaaagggagtttgaagcaggacatgacatatgatgggatagcttgcagaacagctttgagcaaggtttcctttccaccctttgagaaagaagattcattccacctgttgaggtaatgttaggtttggtcgtttatgtagttaaaagtagattgttttgtgtgaccaaagcattgggggattccaagatatttctcaaaagtaacataatgagatatgccttaagtctgttcaatattcccgatggtgcaattaggggtgttcgaggagaacatgatagatgatttttagaagtttacactttgaccacaggcttacaatacaaggagagaagaagtttaattctagtggcatgtaatgattgtttaactttaatatgagaattaacagataattaggatttaattttagaattagacttttaattattatttatgaaattatagagatatatttgaattctaagtgtattaattatgatttatgtaaaattttatgacgttcatatttttatgccggttatagtggaatgcgacgtatggcctatacagtcactaagatatagtttgatatcttagaagtagcagggcgatatagttaaaaatttagaatatcgagatattttagggttatggattatgacaaatttacacctatgtatgttgattacttcatggtgaagtaaaaggataaattagaaattttacccttgttttgtctttagtggctagtggattttgtagtaaatcctagggttattaatttttatcctgagctgagttatataggttttattccaattatccttaagtaaataaatcaaaaattttaaaaaaaattcccaagtttcatctctctataggtacggccatactcaagaaccaaaagaccaaaatttctcacctctttagcagcaatttagaggggtttagctagggaattcttagattttggaagattgaagctcaaggtaagcttcctattctccttctctttgaattccaagtttttgaaatttggtttttcatgcaatttctgatttaagttattttaggaattgtttgggtttagttctattttctagtagcttcttctctttcctaggttcggccacaatcaagaaccaaaagaccaacatttctcccctctttagcagcaatccagaggggtttggctaaagaattcttagattttggaagattaaagctcaaggtaagct

SEQ ID NO: 23911 - DNA, 3275 bp, Cannabis sativa
attgtattttatgcatatgctttaatggtgtgtggtttgttattcttcagttgatgtggaaaggcatgctagagactttatggaggctgctaaaaagcttcaactccatttaattggcctgcaacgtgaagatgaaccaagcaaggctgaaacactgaggaaggtaattgcatgattgtctggttggccatttttctggggtttgtgagtcaattcagtattttgacttttgtgtacctgtcatcctttacaggagatagctgtgatggaagaagaattgaaagtaaaaactgagcttatcaacaaacatgagaagttgattcaagggtggagaaaagaattgaaagaccaactagacaaacacctaactgaattggagagagtatagctaatggccaacaggttggaggggcttaggaggctttaatttttaacttaaatatgactttcgcaagttgtcattggcataattttattagtcttttgtacaacatgtagagcattttgttcagcttttgttagaagtgaaagtgttgatctaggatcgacgaaaggaagaattgtatgattatgttttgataagcaaatcaatttttctttctcgacaatcttgtattatgtattgtgataacagttgaactaaaattagatacagaaaccttagcttccgctctataagactttgttgcttagggaaaggaaataacaattcatgaaggaaattctgaagttagattatgtgtaacagtgtaagtcaaaagaacatactctttccttatttcaagtaggaaaaggaaggagaaccttccaagttactacaaagttaagaaatgctccttagaatttctttttttattttttcatgttcgggtagtaccttccgtgctggtgttgggtcgaaaaacccggtcttcattaacaatactacttggcataactaacaattgtgctggtgttgggtcgaaaaacccggtctgcattaacaatactacttggcataactaacaatgttaaacttgctatttcaacaacaacaataatgctagtcttgttgtaatgggtacgtgtgctaaagttaatttttagtacgagtactagtgaaaccaaactaattcttctatgttcacttcttttccattttccatttccctctaaatagaataatcaaaacacaagaaaaaatgtctcgctcgatataccacaactcaaaagattgacaagattcaagttaggaccaaagctcaaaagttcattaagagataacataaaacagtaaaggtctatattgcctatttcttagcgtaagtaattaacattgagttctgctgtgtcatcttgaaaccttggagtccctgcatggcaaccgttgattgcatctcatctccatactccacaaaggctataccaggcttcgtctccaccattctaacttccttaaaacccgggtattgacagaagagcatctgaagcatcatgggttgtgtttcctggggaagattctgaacaaacagtatgttgtttggcggagcaggagcttccggtaccatagattttactccaccaggatatggtatttgtgacatctgcattgtttgtagtaattgcagaagaagacatgatcaattttttttttttttaacaatacactgtctagacataacaaaaggaaattaatattaatgtataattgacatagtgatgcacagggaaaagaaaagattcttacaggaggtgctgcaccataggcaccaggataagcaggattcggacccattccagcttgattaggatcatgttggtcttttcgcttcttccctgtcacatgaaataaaaaaatgaatatagcttattagtttatttaagaacaaatcaacaacaacaaattcagggccagaaagtaacagatgcctttactaatgtgtttgcaagcacttctctatcttttcactagctaatgtaagtaatttgaaaacaaacacaagcagtgtctgtagattagcaatttaaactatcattagaagtacaaaagacaggtatgtctgctttcacttttttcatcacactatactatatttcaatttgcatatattagctttttttaacttgacctcccactgaacacttgaaccctataatcaatgggaagcgtgaagctctatagaattgctagggagagcaagatccccacgaggaatcgaacctcatacctcatgagggtagttatgctcactcaaccgaaatctggtgggtatatatttacttgtgtaagtgataggcagtcagactctggtgtaaaatacaatgataaacatttcacttcccaaaagagatatctgtaactaactaaagtgattgtaaatttttatatacatgcatggaaataattgccttgatgggtatatattttcttgtgtaagtgataggcagtcagattctaatgtaaaatacaatgataaacatttcacttctcaaaagagatatctgtaactaactaaagtgattgtaaatttttatatacatacatggaaatgattgccttgatggtgaggttctatggcagactatgagttaagcaaacagagagatccaagcacaatagcggaaccacaaacacaagatagagagaaggtggaattcctcacccttttcttcatgcctctttcgtttttcccgtggaacaaaagtaccatcagccttagcaattacatctgattttgttttggcgtattgtattctctgttttgtcacatacagtaaataaaacaataaaaaaaaatatttaccaaatcattaaaatcaagttgtacattttatgattcattcagctgcacttaagtcacaaacacatattttttatcaactaaatcaacaacatgctcaaacagatgtagcagcatcacaagacaggaaagttgaaataagatttgttggaattttatgaataaacaatcaccaccgcaaacttatataaaatgaaagtaaaaatgtttgcatagttagaatgaatatattcggctggtatttaaaaacaagccaactttaacaccattcaagctctatcagcagtatttaaccattttaataataatatgtgaaacacagatcaacaagaagatgggaaaaaagttctgatactaatggtcctatacaagatcacaaattcgaataatttattccgagatatacaaatacatgaaggctgaattctacagtgaaccttttcttcaatattaagcgtttccgaagagaaacaaatcttccctatgataaagagc

SEQ ID NO: 23912 - DNA, 3490 bp, Cannabis sativa
  modified_base (858)..(858): a, c, t, g, unknown or other
gagagagagagagagagtagagtttagggtttaagattctgattccttttagtagttatgggatttaaaaattaaatttacaaaaaggtggtaaaaaaaataccataaaaaaccttaaatttggacaaatgccatataagtgtggtaaagttaaaaaagtcatatttatgaaacttttttatagaatcctatatatggtgtaattttcaattcttaatctgaaatccatgtcatatgtcaatatttgactttttgttacaaacgttacttcctaaaatactggatgctggatgccccttctcaaaacacaaaatttagacgtattatatatgtcatacataattgtacatttcaatagtaaattaaaaggaaaaaaaataaaaaaaacaaacacaagtgatgatgaacaagcttgaaagaaaccaacaattaacttctgcattataatctagttgggtaggtaatactgtcagaaataaataagagattataatgaaaagggataattgcggcaaaagtccccaaaaacttagggttgatgcagattaatccctaacctaaaaaattggcggtaatagtccccaatgtcacattttctgtgagttcgttggtcctctttttaactgttccattaaacccaaatgaaatgccacatgtaaattttttattggttaaaataatagttgtaattaaaaaaatttaaaataatataaaaaactaaaaaaatatattttaaaatcataaaataacattttttttctattctttttcttctacgtcttcttcacactattcccagccacccaccatcgagccacccacccatcttcatattccaatctctctctctctctctcnctctctctctctctctctctgcatcaaaaccctaattttctttttcatactttttcatacctctctcgacactcatgtcgaacaaatatggggaagacggcagactggagctctaggcagtgggtgacttggaaggagttttagatctcaacttgaaatgcctccatagtcgcgcaatggtcccctctctctttccctactccgttctttcaaacgtcagcgccctaccctcctccgacgactggtggttcttgacagttcgtgttcgacgggggctagagatctgggaatggatgactgcgatggagcttcattttcaagtatatctcttttctaattatatatttgtccttttttaagtgtaatggagaacctgctggtggtccaattagatctaactgtttccctctctcatttattcttatctgtgtatatgtatacatatttatttatatatatgttggatttttttttggtcaaaacagtgttggtgttttgttttctggttgtctttgacgtcgacgatcgtggttgggaatggcggtggtgagggtagacttggctggggatggggtggggtgagggtcatggctggctgggttgtgtgaagaagaggaagaggaaaaagaaaaaaaaaacaattattttatgattttaaaatattttttttttgtttttcatattatttcaattttttttaattaaaattattatttagacaaataaaaaattgacacgtggcatttcatttgggtttaaccagttaaaaaaaggaccaacggactcccagaaaatgtgaccttggggactattactgccaattatccctaatgaaaaaataaaataagataaataaaagactaagattattacaattttaagtaaaatattacaagaataatatattatataaagagttacaatctcgaaacacaaaatataaataaagaaaaagagttacaactcaaaactcaaaaatacaaataaatgtaaactatataataacacatatatataaaatattgtatatatctataatatagaatatatataaaatagataaaatataatggagatataaagtatatataaaaagtctttatagtatgtatatataatatatatataatactatatagtacagatatattatatatatgatagtatatatataagagtatttaaaagagaagaagagaataatataaaactagataatagaacaaagtaagaatacaagaataaacacccaaagtggagatggggatcactaaaagcttaaagaaggtttctacacctttgtccaagaagattatttctccctctattaaatacttaaggctttgtggaaatacttatgggaattatcaagtcttaaaactctctaactttgtgtttgaaagatagaatagaagagtgtgtctcaaaggatgaaccaatatctctatttatactgtttaggatcacacactttaaaattcaaacattctacacccatggctgttataatctcttagttgggtgtaaatgaaattaaatgggtgatttggatgttatggaagttgttaaaaggcatccccatagtaaaaaacgttctaatattaaagttgaaaaaaaagtaactagttactagttacaaaatttttcagcttttgtaaataacttttcaaaccatttcaaactattccattttatttcatatcacttataaatattataaatgataaaattaaattcctaacagctatatttgcattatagctttgaacttcaaaaaattaagttgtgtaaccactccttacacacttaattgatgatcatgtggaagttacaaaatatgagtaactccaccttttatgttacaacttatatgaatattacatgtatgttacttccaatcacattatattgtgattattacacgtatgtaactctcaatgacattatatattgtactcataatatatatcacaattttaatcttaaaattaaattgtttaataattaatataatattctctcactatgttaaaatttgtgatacatcattgtaacactttatttaatcaatcaaatatctcatatattccccactttgattgaataaatcaacaatctctatagagtccttgctcaagtgcataagattaagtgtttttcaacttgaacttaaccatagtgtaatcatcacaaattttattaaaaagttggttaacaaagcattgaagcaacttttctttataataaaacggtaatgacacacacaactttgctaggttcacccaagatgtcatgtctcgctttgcaccgttaatggccttgtgcacattccattcattgacctttttgagaaaatatactccctatttttcatttagggcggcaccacccttaggtcaatataggtagaattcttacaatatttgctaccaaaatacttattttccaaactgaattctactaaagacttttagaagtcctcaaattgataactcactaagtacttcatagctttgtaggatgggacatatagtacttatcacatttgttcacacattgattacttcttacccattgaacctaacactagtaaagttactagtattaagataggttaccctcaattgtgaac

SEQ ID NO: 23913 - DNA, 2765 bp, Cannabis sativa
  modified_base (932)..(942): a, c, t, g, unknown or other
  modified_base (1712)..(1713): a, c, t, g, unknown or other
tagacaaaagtccttaaaattaacgatctcaatagttcaagggaaatttttaacggccaaaaaaattcaagggacataatttggtacatgtcaaaattcgggagaaagaaaatcctaattaaccttttctttatcataaatactacaaaacatttaattgcaaaacgtacaatacattaacattttatgatattggaaatgttagaatattttatatttgataattgattaattattttatttgataaaacaaagtaattattgattaaatattctcatactaatgattatcttttaactaatttcctaattttatatctacattaattgtcataaattctgacaattaattaaggcagagattttaataaaaaatctcaactatgtaaatatagtatattagtctccaagctcgttgttcatttattttctatcaaattaccattatagagagcaagcgagagtttagaagaatgatataccccgctaattcgtttctcttttatttttgcaaatttgaagatataatgtacatggatttgttgggattttataacctaaataaaacttatttcaatataattagatttacaaattaataaaagatcagatgtcattttatattgcatggttcacacaattattttcatgattatatgtttaatgtataaattctatgaacatatagttattcatgattatagtgttctctatacagtgaaaaataattatgattttatgtttcaaagtttagtcccatgatttgtaagtatactggatttatactgacataataatcaacaataaagtttactaacactttggataagtggtatgtcattttcaaggcattggcaaagtatgctagtatcaaatgtatgcaatatacatcagactagaccgaattgacattggataagatatcataaacnnnnnnnnnnntctttctaagtcaatatcatttagttaatcttattaggtcaatagatcttaatcctgagatggttgggttctgacttaaatgtattatctatgttctttgacttattcgttaaagttgaccaagtagatcttcccaatacttacatcttgtagtataattcagtgggagcgctaatcatatatatgaaatatatagcttctataactattaaaagtgaaatgataattttcttcgagctttgcttaacgcgataaatagttgagcactcatttcagtaattatattagtttactgaatatcatttacaagtggctaaagtattttaaggataaaatatattgaatggtagaacagtaaatttttccttactcgatgtagattatctatacaggatctttgactatttagattaaaataatgggtaattcaaagcgcatctattttttggtaatagagcgttctatgtaattaggagtgcatttctgaatttatagtggagtcaggaggaattaataagttatgaaatttacttggtaaattttggatctacttattggaagtttgattacatagacccatgatccccacactaactgagataatgctagtttctagtctcaattaattggttttaattaatcaattaaaattctaagcaatgacttatttgagaataaaagaagatttaaggtttatttattaattaagagactttgtaatgtttaattaatgaccaaattaaatgctaattttatttgataattaattnnaattattaaataaatagaattgatatttataaagttaggattaaaagatgatatttgtgaaatgaaaaataaattaaataaatgataattaattatattgtgtcctactattgttagtactttggacttgccgggacaggttttttgtcattcaagaaatcgttctaataaattcctagaaatgccgttggattggaagcacgatgataccaaaacaaaataaaaaacaaacaaaaaacaaatggttgtttctatttgtctaaataatttgatacataagtggtatgaaatttttttaacatgtcttagatttagattatgttatcccaaaatacattaataatttattttgttgtataattggtaaagagaatataatatcaataatatttcacacagattggtatcctcattcatttttccacatataatatttcattggaacattttgtatttctaaaagattggcattggcactagtttgcttgacttgtataaaaagattatgaaatgtaagaaagaagcattattagctgaatatccacataatgtcaaacttgaaaataaattttgaaagcaagttcaaagaaggtttccaatggttttgttattcagttagagaccatactctcagtctctttcacaaagccatctccagtccaatccttatcagactgcagccctttcttaatggcctttctctgcttgatcgcctcttgctgcctctttaccaaatcggtgtgagtagtaaagtatggaagtgaagccctgtgaaattggcaaaacagattaagaaccaagaaataacagtaggattattatgcataagaattcttagctgcatgaattgtgcctaccctctaaaatcttcgatcgatgagaaattgtgctttctcatgaagtctttcagctcgtcacaaagtttcttcacaaggccatatccatgcatcataaccccggtacagacctacagccaacattcgacgaaattttggtataaaaatatggcatggattagatactaatgataaaaagagacttcaaaaccaaac

SEQ ID NO: 23914 - DNA, 3152 bp, Cannabis sativa
tatttttaatacacatttatattgaccctataaaagcaaacccattattaacagttgtgtgattttcaaatattaaccacatttattatacatagtatgtaatcaaactccacgattttaggggataattgatgtaagatatcagtcaactgtataaaactaccctactatgtaattataaataggggcatgttacactgaaaagggggttgaaaaaatcattagagaaagggcctaagagctgtatcagaaatataataagatttactcgtggactatgcagaattttaactacaaaactacgtaaaaacatttgtgttcatatctttcttttactacttttgttttctgtgcaaatctatcaccatttaggctcaaatatagctaacgaaaatttgcattaacacaattaatttttgtattttatttaaaaaattaattgattatttatttttactttttaatatctattgaaaaatattgtattccatagaattaaaggatttatttgtgtgtaagttgtgacttttattgtaagtgtagtattatgtgtccagtgtgctttgtttggtatcaattttcggtggttgttgttttgtgtttatcctaagaatgtcgtgaagtagcagtgacacatgatctattctccagttggtaaagataatttttttcttcataatataaaattttagaatattttttgtttaaataaaaattctcattttaatattaccattaagtagtgtgctaattaaattttatatattttatataagtatatttttattttactcacttggtcaagatgcaaggacttcaaaagataagttttattacaattctcttttttaaaaattttactatagtattaatttatatgacagaattttaaaattgtcattttaacgtttatttatgaagttactaaatttatttatttgatgtttttggtctagataatatcttttctcgcagcagttctagcttcttggttggattaagatagaatcaaggaaatctcacagttatctgaaagttgtagctcttataatgattgctttggattggttgccagaattagacttcatctcatttttttggagcctaactgtttagatttgatctctgccttttttatgagattttctttttgtaatgattaaagggctctatttgatgtatttttagtttactgtccaattttcctaagacatctcttattcatgcaaatcattccgcctttatagttacgcatgaattagttgtgcatgcacttagggtgaatgatgagctaattagttgtgcacgcacttagggaatggaagaaatggaatgtagctcttatggccaagtatctatgggctatatcgagcaaacaagacaacctatgggttcggtggatcgatgctatttacttgaagggtcaaagcttatgggtagctgattttaaacaagacgcaagttggtatttcaagaaacttcttcgtctccgttcagtaattggtgaagatgatgtcaagttggctgtaaggaaaggtaaatactaaaagtttctatgtttccttcattcaagtacagaatgctggctatgcgaagaacatatggaatagaatgatattgccaaaatacagatttatcgaatggcaaatagtgaacgatcagctgctaacaagggataatataagtagaataatatcgatacatactaatctttgtctcgtgtgctgcactgtgtgggaaactcacaatcacttgtttgtgagttgctgcttcacttgaaagttatccaagaggtcatgaactggtgcgacaggttcaactggccgagcaactccaaagattggttttctagaccctcaaaaaatctgaaaaagaaggtgctcaatactgttgtgttagctaccatgtacttcgtctggaaaaattgtaagtgttgtatttttgagctgaaatgtaactggtgtaattagcaatgagattaggtttgttgttaaacatagaatcctaagttgtagcagcagggacaaagggggattagacaactataaaattaatataatagacagttggtagtgtggtgtggctgtttgagcttagggtgttttgtttttgttttcttgcttgttttgaataaagaacttttttcttgttcaaaaaaaaaaaaaaattgttcattgtttaaaaaaaaacaattaagtgttataaattaaaaaaaaaattcaataaaaatataattaatatatattatattattttaatatatttttttatataaataaatatgaataatttcttcacctacataaatgtaattggatcagtttttaattaaattttgaaattaacgtttaataataacttcaatttaaatagaatctaacttttaacatctaattataattaaatatttgatttttgtaattgaattggattgaatgttttcggttcaattgaattagattgaatactgccctttcacacaaccacatatccaagtggcaacaccttatgtaaaggacaggtggcactaggcaaatgatacataagtcttcaactttttagtcatcatcatcacttcaatttgaagatatgagtgaaccccaaaacccctcaagccctcagaaccctccttcttcctcttcatctacttccaccaaagtatcaaaccaaacaaaccatggccgagccaatagcagcttctcagccctaaagggtcatttccccaatccacccgactccaccaatcctgatccggccacgctcagggatcagtggaggttcgccatcagacaatacagtaagtggtactctcacgcttggggcaccgccattctcgctggagtttccttcttcgccctcggatgggtcatcaagggttccaaccctctcccttctctcagccatcaagattcctctcaccctactcctgcgccgtccgatgaagttaaacaatgaagtttttccctttctgggtcagtttattttctttacaaagtttttcatattcgttattagatgaatttgtgtttattgttgcagtgatttcagtttagattcaaattggattggtaccagtaacgcaatcgagtcaactaatttttttttctttgttttttggttaacaggacattctaggcctgaaatctcaattg

SEQ ID NO: 23915 - DNA, 1620 bp, Cannabis sativa
ctgaaaacatagaaaacaagcgtaattccgtcccaacacagctaagaatgcacataaatcggatccataacataggctaaaaatagcctaacaagatgtggccttctcaattatactcaaatcacctgtgaagcttttttccacaacgatttcacaaagcttaacgctcgagctatgtatatatattataattttgatcacagttaaatatgaaaaaagaaatacagagatatatttaaacatttaaatcagaccattaacctttcagagactgaattggaggcttgtaaacatgtcactaatctgtcgagactcttttcttcagcctcttcattagatgcatacttcaaactcttcacttcttctaataagatatcttcgttcaacatttcttaaaacataaaagagattgacgaaccttgcatattaaaaagaaatggtgagtatacaaaaatataccaatgagttgtgtgttagtgttagggttattcctgctctaacatagaataacggctatatttgtttctatgtctcaattgctttgaataaattttcactagtgtcaataagtttgcccacgttgtattatgtttcccagagagtagggtgttagtcattgattaatatagaacaaggtgattgtacatcaaggtacattaactaaacggagaacaaatagtgcacaagaataaggcatatcattcatttgagtcaaacaattattctgttacactccatattaatcaactacaactcaagaaaggaagtctgcttattcagagatgagaacttaaagtttgccagaggttactaatgatcatatcaatgaattcttaacagtggtagtcgatttgtagctagtaaggaccaaaacactactattcctattactaccaatgctactatgatactctagaccaaatgaagaaaaaagaaataatcaaacaaaacaatatattagtacccaaacaaagaatataaaaaccaacagtaacagggtatattgagcttaataatacttttctcatacaaattgaataaataaaattataggcaactgaagcaagcaaatcccagttatcatacaccacaagtgaaacaagtaaaatccatagaaacttaaattgaaaagtaatgaatcagattgaactaagcttgttgatcaacttgtcttctccttagaactcagaccctaactaagcccattgcaatttgagaaaatatctaattagaatgtaggtttcagagaagaaaagaactgattataaatcaaagaatgatactcacaattaagaagcaaacagaaatgaattaaaagggtctcccctgtttttgtattctgttttggctgtggtccttgtttggacaggtgtcaaccttgctaatccctaggcagattgtgtcgttagtattgcaatgattattgcatcatggaatattttgtgattctcttttctgttagaatgtgtgccagctgtattcgagccttatggctcttgatattctgtataagtctctaaaatatttgagttgagctttacaaatcttgaatttcaactcaccggaattagaatctgaaaaaccgtgtttttgcaaaatgtcagttatatataagaaaat

SEQ ID NO: 23916 - DNA, 1921 bp, Cannabis sativa
ttttagataaaagtgttatatattttttagtttgaaatgtattggtttaagaataaaatattaaggtttttcaagtatagaaaattaaatttcctttttacatttcacataaaatataatatatatatatatattataatttataataatctaatcaaaatattataaatattatttaaaattaagtaaatactattttggaccctatatattttttaaaagttacaaatttaaccatttattttgttaaataacaaaatagatcttatatttttacaaaatagtataaatagggtcatgaattgattttttattgaaataaaacttaataataacttgatctaagtattatgaaaaaactgattatattttctgaatttttttgttttcaaaattgctttcaagttagttatattaaaaaaattgtcaaaaatttaagttcatgatcttatttttactattttagaaaatataagatttattttgtaatttaacaaaataaatagtccaaccaattatttttgtaatagcatttatcctttaaaattttcataatttcaatttataattttttcaaaaagttaaaaatatatttacatataatttgtaatagtaaatattagtaaaacaattgatataaatgagcaaacgaagaaaatggtgtagttttttttaatttttgaaaaataattgtgtatatttatataataaatatactttgcatttactactaagtaaaataaagaataaattgtgggggagaaaaaaagagacataataatattgaataaagccataatatatattaaaacaataacaaaaaagcagacaaaaaagataagaataataataataataataataaaacaagctggtcattgagcagcttaataaaattattcacatataaatatttctaatattctttaaattctaatatttctgattagcattgaacttgagaattactgaaattgagattcaacctaatatgtaatgaattatagtatatgttaacgggtaatgctctcaaaaaaaaaaaaaaaaaaaagaagaaggaatggttaaataaaaatgttttggagcactattttgaaagtgattgatcctgttatgtataataacagaaattaattgggaagaaaagatgttgatgacatggattgggatggatttgtgaaataaatgaaagaattaagggacagaccggggggtgcatgtggtgtatgactgtatggcatttgactttgtatgtctaataataaaaagctagtttgagtgactacacaagaccactgctctccatgggtattgtgtaccagacagggactgcagctaacgtccaaaaccttaatcccttcctacttacctagctctacatacgagctctccttttctttatttcggtttaaccaaacccatattctttaacccaaacccaccatgggatatcaaatacacaccacattgtgtttcttttgttctgtcatttgttcaaggtgaaaattaaggttagtagcttatcacaaatttggctgttgttgatcgctttgaaatttactattgacgttgttctagccgacgccgtaagggtaaaaataaccaacggcataaagaccttggcgtcgactattatgaaacaactaccataaggttcctatatcgtcattatacaataaccgactccatcagaccaatttcgtccgttattatgaaataatcaacgtcataggatcttcttatggtttcttttatgtttttaattgaataattagtatttttgtccctaaactttcgaccctacttgattttttcccttaaaatatacggtttgttaaagggaaatttgaatttctatgcttacattagggaataattttttccctaaacttaaaatagggaatattggtaaaatgggata

SEQ ID NO: 23917 - DNA, 2615 bp, Cannabis sativa
taaggtccctctgtctcaaaagtcttcagtgtcgatatcttggtcaatatctttataagactcataagacacatctttattgttgctcccttatttttgataattgttagaacaaagggagaatcatcgtcaccgccccctctcttgagtcgtctttggaagtaggtggagattcttcatcactactctcttgctcgagaccatctttaaaaatagtaggggactcatcttcaatatatccttgttggagttcattatgggaaacagagaaggattctatttcaatggaagcattcgttattgattcttcttcactttcttggtaaatgacaattcaaagtcaggaaataaatatgcagtgtaatttgttgcttttggttgagcaactccgctgaccttcttgatggcttgttcaagcctgataaaatcagcactatctagaaactcttgaatggtgtgtagtgattagagttttgcgtctttccataatggactcataatagttagtccagcaaactatcatcatgaccttggcatcttcactgagtatatttgtctatgttgtcgtctctaagaattgttataagtaatcttctaaaggctcatcttcttgctgtttgatgcaaaccaaatcattgggcttgatcggtctgtgtctttatggagagaatcgatcatagaatattttttttaagtgtttcccatgaattgatagatcccgggaaaagcttgagatacaactgtcgtgctatttctgatagagaggctggaaagactcgacgtcaacacccttcatcattccaactttattcctaataccaaacagcacaaatgataacaactatcttctcaatcccttctacatcctatcctttctaaactctccatccatcctactccctcattccaacaaaacatggcctcaatgttgttttgcattaaaatatgtaagcctagctcatgcaaacgttacaattacaaaaggcgtacatagtattatttagacacaaaatttggcattttgtttgtcataataatcatgtgtggtcgcgttgattgggatgtttgtacacttgagcttcttcctttcacgcagatgggccggttacaatttacaaaccccatcattatgcaatggatgtgattttcaatttcttgacatagtttaagtactgctggccacgcgcaaagctttgtacaatacaatgttcctttctagtttctatgctttacatatcaatagcttcattatatgtaggacctaaaatttgtttgcaccgatattaaaaagtacatttttcgtgaattaggaaagagaaagaaaacaaaacggcatggaaatatcaatattacaaaaaagggcctcaacttttttataatcgttcagtttggatcgtatgatgatatgtgagaaaggttacataatataggttgtagacttattactttttatcttttcttaaaaaatatattatattcaatgacaatatgatggtagacattagagcacaaaatgttacttcatctctaagtcaatatacatacaatatccatacgacagaactcagcatgagggacagaaaccatcaaacaaataaatttcatccaacaatgctaatttataaagtgacgttaaattcataacacaaatatttacaccatttgtgattctgtgaactgacccaaatgataggattgtgtctggcatcagttaattgcattaacaaacaaggaattcttttctattttcattttattttttaataattataagggtatctttaaattattttttaatgtgtatatactttacaaaatataaatataaataatagaatttcgcacctcatggcattttgttatgggggaaatctcctaaaatataattataccaactaaactaaagtttgaaatttctttataaaaaggtaatttatgattttatattttacaaatatatagtgttatttttttcttttcttttctttcttggaatggaaattgggaatgcatagtgtaagtcttctacacattaaaatatatataatgactttatagataaagactacttttcattatttaatttttgaagaaaaaaaaaactacttttattttatttaattgtaagaaaacatgactttatttctgtgcaccaaaaaacatgacttttattgatttcagccgaagaaggtagctaaaaatggtcaactatagtaatactagcaattacgaaccattgcatgcgtaggaccccaatagtaagcatccattatccatgatttagtaaagtctagtgtatactacaatacaaaaaactttacaataatttgattttcaccaacttcaccatattaccgatttctatcatttaaagttcatttattattttaaagaatactttatatatatatatatatatttataaaaagattttgacttatgattcatcatattcaaaaaagtaacctaggttgagtaaattttacaatatgtttgtaagctaatttttgtagctttgattttaatccaactaaaaatgaggcaaacattatttggtttttccaaaagaagtctcgctgcataacagcagagtcaaaaaatgatcatgatatata

SEQ ID NO: 23918 - DNA, 1313 bp, Cannabis sativa
agggggttaagtgtataaaaatcaaaacataaaggggtttcaccgcaaattactcacaaaaaaattaaacaatggagttcaagttatatggatcacaaaaataatcgtttcaaacacatccattccaaacaacttctttttcggctcctaaagctctttgagctaaaacatgagctaaagcatgagctaaagcattttagttcctaaagatatgataaagagaagcattagaaaaagaagacaaagaatatacaattttaagaaccaaatctaaaagagatgggtgatagtgagtgaccaaaaacaggcactgagaaagtctctgctatgagaaaattggagtttccaattgacaaaggttttgtctttaactagtgtctagtgctatcgaaggtgttccaagtttcataagtccctaaagattacacactactgttttattcatttctcttgtataagttctactttaccagtttagacttaaactcccccatctttggaactcaatggaagattctgtgggccaagctgtgggacaagaaaaaggcattaatgaaacaatgattggagtcacagaaattgaagaaaaccaaccaccccaagcgagggaggtagatgcagcattaaatgataaacaggaagacagggggaaggagcctatggagacagataacaaggaggatgatgatatggagaagctccgcaataacttcctggatactatgactctggatttagtaccagactttgaaatcaatgctgagattataagaacaggaattttggcacgtttctttgaaggaaaaggagtttcgagaacaaaactgaaagaaattttagagcagaagtggaaactcaaggggcattggaggttcaaaactctaaagccaggagtatggggaattttttttgataaagaggaggattgcatttcgattcttgacaacagaccttggttgatcaacgggaagttactgattatccaggaatggccagaacttggagactggacaaatgtggacatgagtaaggcaattttttgggttaaagcaacaggacttcctactccatatctcaatgcgatgaataccccaagaattgcagctaagacaggtgaatacaaaggttgtgacatagtaaaccagaaagcattagcgagaaggggtttcctgaaatttcaagtggaactatcaacaaagcatcaagtcactcccgactttttcctggatatttcaaggggtcgaaaggaatggattcaatttcagtacttaagactccctaaattctgctacaattgtgggtttattggtcat

SEQ ID NO: 23919 - DNA, 1813 bp, Cannabis sativa
aataataataatataataattaattagaaagatgttattttaagggtgattctagagaatgtaattgtcttaattctaaaatgttaggcatgaaccaacagaaaagatgaagtgttaggcctatttttaggttattttagagtctagttttaagtttatttttattgtttggtttttggcttatttttgtttttatgttaatttcaagtttgagataatgagagtttcactttttggtgaaaacatggtgtttttttcggtttcttgctgatgaaattataaacttttgcgaaaaagaaccttgagattgaatttcttaactccaagcatgttggaggatttgaaaaaacaagttttcaagaatcaacatcaaaagtcgcgactttcccatcaaggcacggctcaccaaaagatacaaaagcagtttttttgaaaaaaaaaaataagagccgcgacctttatttggaagtcgcggccctggaaaaaattaaaaatcctcgtttttctaaaaaaaataagagtcatgactctctaagcaaagatcgcggcgctaggctattttaggcaatttcctgtttcgacccaaaaaggtgaggtgggtaggttttggaaggagattcgaatttggggagaaaaatagacaggaaagacggctggagttggagaacaccattggaggatccaattttgtgttttattcatcaatctttacctttttcatgtttgtaattgaatctttgattgttagaatgaatactatgggctaatattgctagaatgaatattatgggctaatttctctttagggttattatgtgaatttcttgaaactcttttatggattaatacaaaacttattttcttcttcatctcttattcaattctttacaatctgtgtaattgttgcaattatttgttgactatttataattgccatttacaaattaacttgaaagttgaaaagtaaaatttgatatgcgtttgaatgcagattcaacttagaacgaaagtatttaagtaattttttttttggttgcttgtttaatgcgttctttatgatttaactttgccatagaaatctagagagttatcatttagattaagtttgtaaatcttaatcggattatgaattgctttgcaacttgtttattgaataggaagaagaggattgagttgttgcattaggaactaaaagagttgataatagataatcataattgtcctaatttcattctcattattatttttattaaaatctcatttaaattgtttttattttctttgttagaaaatttctagatattgtttgatcaaatagaactaaagagttgattggctgttaattgatgaattagtctttgaggacgatacttagttgtgcacttgcatagcttaaatttttcaataaattttatgtattgttgtcggggattgaaaagaattatcgatatcagtctaattaattttattctaatttgattttaatttctcttctttctaacttgtttagttgatttatttgactatctcatgtgaattatgttatatgtgtaattgaagagtagcagacaatcttgttcctttaaatcatgagattgagaaatcttgcaagcaaaatagaaaggacaatagggaagcccaaaagtctgtgattacagaatgatttaattcttggaattgcacaaggggtttaggctcaagttaatgctgaaaggagcctgagagaatatgtactgtccactttgacgggaatacaaaatacagtagaacctctatccaagaatacacttgagaccaagtaaattatattcta

SEQ ID NO: 23920 - DNA, 1731 bp, Cannabis sativa
catattctccttctccaagataaacaaaattatcatgacactttgttgacttcttttgtctctgagatcttcttagaggaggtacttctggaatatcctatatttgttgatcatcattttaaatgacagcttccacaactgaaatttcttcaataacaagaccctcattaacaacgggacattcttcaataataagcccctcatcaataataggcacttcatcaataataggatcctcgtcatctttgatattaggagtaatacatttatcaacaatgtgaacattatcaactgaagtaggaataagactactgttattatcatctcttaaaaaagacataggaataaaaattcctttagatgactcccttgtttcaagagatgttaaaggatttttttgtaacatcaaattccaaaaatttagcagtctgagatttaacaatactcaagtaggatagtaagcgatagcccttagattgctttgggtaaccaatgaaaaaatattaaattgttctcagatctaactttttcaaattgtgatcataaattcttactttaattggagaccccatacacgtacatgattcaaactaggctttttcctagtccacgactcaaaaggagttttgggaacagatttacttggaacacgatttaatgtataagtaacagtcatgagtgcttcactccataagaactctggtagatttgatctattcataatgcttctaatcatgtccattaaagtgtgatttatcattttagcaatgccattttgctcagatgaaacatgcatagtgtcttgagcaactatataattttcttataaatttttaacaaaaggtctcatgtgttgtctagattctaaataatgaacataatatcctcctccactatccgaatgaaaatttttaatgactcttcttaattatttttcaagcacattttgaaagattttgagtttatcaagagtgtcagatttttctttaagcaattaagtgaagcaatatcgagaaaaattatttatgaaggtgataaaatacttatttttgcacaatatagtggaataaaatttactaatgtcagcgtggatagtctctaataaagatagactacggttggcagtcttctttcttgttttagttaattttctacgagtgcaatcaacacaagtatcccaacctgaatcatcaagaggagaaagaattatagctcgaagtaatcgatcaattttttttttggaaatatgagacaatcaattgtgtcataacaataaggatgtttccttaatataagaggggaagctaagagagccaatgccaatttttaaagaccatcaaaataaaagtttctaataattttgagtcaaacataatatcaacattatcattagaaaaaataaaagaatatccttgtttaactaaaagcggaagagaaactaaattcctcttagaagtaggaacatagaagctattgttcaagagaatcttcactctaaactgtaattcaagaataaatttgccaatttagattacgtcaactacaacataagtgtccactttaagctttgactccctgtcacttggtttcatgagatcccttagccccggattgtgcttgcttcttttcataattttctctatcttatgttgggcttgaattgagaaacatagtgagaagatttgtgcttctccatttataatttttttttctcagctacacactgagaaa

SEQ ID NO: 23921 - DNA, 2981 bp, Cannabis sativa
aaaaaaatatttcagcatgtgtttgaatgtagagattgagaaagatattataggaggttgtaattaacactcgtaacaattttaccctcataatttatgatacagtcttttccaattccatgttcccttgcatctttcaccaacttattaatttatttaattaactgatcaaaaaagcaataaataaaaatttcacatttttaaaatattaaaataaatatcaaacaaaatttcacatatactaaattaatagcataaaaagttaactattattatataattatatgcttcatagtaaaaattagtgcttatagttagaaatagatcttaaataaataattttttatttacgaagattttatatattctagatgtattatatgtgttatatataagtttttatgattttcatactttatgtccggtaacagtagagcgcaacgatttggccattaaagacacgtaattatgcttgagtatcttagaatcagcaaagcaatttcacatatactaaattaataacataaagatttaattattattatataattatatgattcatagtagaaattattgtttatagtcagaaatagactttaaaaaaataatttcttatttacggaaattttattgattctagatgtattatatatgttatatatgagtttttatgatttttatactttatgtccagtaatagtagagcgtaatgatttggccattagagccacttaattatgattaagtatcttgaaattagcgaagcaagctaattaaacatttggaatgttagaattattactattttacatttagattttaaagattatttaagtgtgatggtaaggggcattttggtatttcacctaagatagtggtatattgaatttaatggaaattctttgagttatctaagttattctagctgaattatgtttagaataggacaaaggacatttagtgtactaaaaacaagaattcaacttatctcactctttctctttcttcaccttcggctacatagaacctaagagaaatcaaattttctcctccaattaaaaccaaaatcttgagtgtttacagcaagaatttaagcatctaatgaagagataactaaggtaagcttctactcctatttctctttgatttctaagtgataaagttaggtttgattatgcaattttggggtttaggttctgtatgacttggggatgcttaggtattgttttctggagttgttttagagttatttgtgctgttagttattggttttgtcgattataacatgaattgaacaagatgtgagcttttaagctcaaacttagttctttaatgatgaaatggtattcaaagacttgttgagctgttttgtggttggaatatactgtatatattgtttttaggtgttccggtaagtttggtgtagtttggttttgatttggtggagttttgaggttttgtgcaaattctgttgtgaaaatggcagaccatttctaggaaaatagtaacagtctaccatttttctaggcaaaatacccaaaacaatagcctaccatttttaggaaatttttcccaaaatctcggtttttttttttttttgttttcttgatagttaaggtattgccatgctatctattgatagggaacatcttagttttgagtttaagtcctcaaagtgaattagcgagtcacttaccaattttacataaattgtgacttagggccttaaatcgctgagcaacagtatcaactcaaggttatcgacatacttgcattcagaattaaagtaagattaatataaatagatgcatatatacatgtttagcgtgcattttcaattaccatcatattagcatatcaggatattggtgaagtgtacatagagttacactgagatatcaatagatatatgctaggcaaaatagtagccatcagattaggatatcggaatattggtgacgtgtacatagagttgcacagagatatcactagatatatgctaggcttttagatagtatgaactaattgctaccatatcagtacaactagagtactgattataggttagattcatggttagtcatactttagtcaagaacgttcataacctagttttacacttgtaggtaagtgtatgggagcctggttataagtcgatcatatgtttatgttttatgattttattactgagtttatcgactcatagttattatttgcaagtgcaggtaagagccagagctaaatcagaatgagtttatagctggatgaagattgtacataccaagaaggttatgttagaaattattttgctaacatgtatgttgattatatcctataatctaacaccctaaacatgaattctctaaaataatgaaattaagcacatataaagtttaagaaaccttacattggtggcagcggaataatatgtctcattccactcagatttctaacccttgttcctttctatcgcagagtattaacaagatctaagcttggatctccttcaggtgttggattcttcagtcttccgcactatgtttgagtacttaaattaatatgagtgggcatgtactctatcactatagggacaaaatttatgaagagtaaaagagagagagagggattcgaaatagagagagagatggctctttgttaatctgacaaatttgacggagaggcttatgttatcagtgtcaaattaagagcctattactatctatttataggaattcttctagggttaagtttgaattatatgaaagtaaaaaatgataataaatggctaaatttctccttaagtggccgaccataggatgtgagccccactagttacaattttaccattttattcaacaattcatcttttcttttattaatggcatattttccgatttcaattttttaaatgtcaaaattatttatttaataactaaaagtaattatcaaataaaattaccatttaacttatttattaatta

SEQ ID NO: 23922 - DNA, 5585 bp, Cannabis sativa
tgtttctaaacagttttgagtcttttcaatttatgcatcaaagttagtattttgtaaaataaggcaaaataccggggtgttacaatggtgaccccatgaacaaagaaaacaccatgtaacaccaagaagagtgtcaatccgcaaaacccattggcgaagggacctctcgatgcccaggaaaaatccccatgcctgacgacaaaggtcaagtccgagatggtgggagttcatcatcaccgtcccaaggtgtgtgacagaaaactagtgtccatgtggtgtttatggagaatgaggtgttgtgccaatgcttagatgagactctgagactcaatacagagtggcaagagaggtatggtacccaagaggccgcaaggccaccgcgatggggaactcgtgggtgttgcagtatggcaaaaaggggacagccccgtgggagtcgttcgacgcgacaccctgttgaaagccaagagaggtctaggtcatgatcaacccaaagtcgttatactacttcgccttctcgtgagaatgatacccatggcaagaggagtgaacgtcttccatcacaaccacgacaatgggtaacaaccctgggtcgtgagaatatgaggaacaatacacacacttctactcaataacaaactaggagagacacacaagaacctatttcccttcaagataatactacacatcccccccactaaaagctccggtgaagagagggccacaacacacaataatgccgtctcaccttctcttttgtctcctaatcctagggatattggtgttgatgagggggaaggaatcatgtctaaaaccctccttttaggtttccccaatcaccaataaggcatcctgagcctcctcgtactaatgcatcacaaccacatcaaccagcctagagagggaggtcacgacaaagggaggcacctcccagtcaccttccaagtcaagacttgcctcaatcctctcgagacaaacaagaagtctcatgagataactttgcacgcaagggacctcaacctaggggacatcgataggaaagacaacgcaccatctcccatgacaactctatctgccaggggctgacactaagggagactggaccgtaacaagcatgaaatcttccaccacatgatgatagttatttattaaggtcttgaactgttgccacaaaatcttaagctcaacaaggttctgccctggggaccacagtagtagaggatagtcagtttcatggagtatagttatttctaattatagaagtcgatcgatgagtgttcatgacaatgctacacctccatattatgaggagcatcctcgacacctctcacgtgacacaaggaacccaaatctttgggtccatcagatatcaaggtgacaacttgatctaatggaccatctggacatggagcatgcacaaggagaagtattgtactaggcaccatatgacatacctcgtaagcaagggcatacacaccttagtttaatatggttgctcctccaccaaaagatcacaatgccctggctctagggacgaatgatcgaagactcaccacataagaacaataaattcaacaattttaaaaaactaaccaaaatgttaggggtacgagttagacgaagaacctgagccattcacaccacatatctcaagattaccatatcttttagggttggagaagccaagcataacaaaatatgataggattatggatcatagggttcatattagtgatttcaatacaataatgaaagcgagttaggtcatttaagacttgaggtgcatgttgttccctgtgaccttaactggggcaacgaagatctggtttaacaaatccaagaagcactccatcacttcttgggacaagttgtcgagtgactttaaaaaggatttttgtcctacaaagtctcaaaaactctagtactcctccttggccaatgtgaagcaaaaacctggtgagagtttaaaaacttacgtcaaaagcttccacactgaagttgccaaggttagagatgtagatgacattggaagacttatggcactaggggcaggcataactcatggatcactactatgggatagccttcaaggaaggggtgcccccaccattgatgaatccatgaagagggcacaaaagtacattaatattgaggaggcaagaatagccaaaacctacctcttcctttagcacaatctacccccacaactgctaacaccaatgcaagtccatcaacaagtaaccctctttcttccattaactatatgaataataataaaaagagaaagggtgacaatggatgggtcaaaacgacaccaaaaggagtaagagctaccaacccatgttaaccatatactctaaacatgtgcagatgcaagaaactatttatgtggtgaatgaacaccgaatggccttcaaagtaccaaaactgttaaaaggtagtcgtacaaaaagagaccccaaaataatactaccagtaccataaagatattggacacactactaatgagtgttgtaacataaaggatgaaataaagacactcgtatataatggacctcttgctcattatgcaaggaaacgacataataaccatcaaagagacaatgctctgaatcccctagtgcaaccacaagggggtcgactgggtcataacttggcgttaactctacacgaggagggagaagaggcgctaggtggacaactcacctaaaggaacccttacaggggctagtggcacactagttcatagtggctttatccataatgcaaggaaagaagaagagactagaataaaagaaaatatttagtcaatattcagtttagcattttttcttttcattagcttgttattttctttttagtcaatgaaaacaattatttattcaaaaatagttgtatttgaattgtcaaactcaaaaaaaaaaaaaaatagtaaccaaatgtactaagcaaacccgattactttgagtgcagaagagcatggatataactattcttgaataaaaatcctatataaatgccaattataacgatttttgaaaaagtaagtgaattttttaaattcacaaacactagaactaaaaattgtaatggataaataatgaatttaattatagtcacatgttaagcactcaacctaacaagtgagtatttacgccaaaaaataactagtgagtgaaacgtgttactcaagggagctgaaagagcaaactcactataccatctatttaactaatagaactttgcaaaataaagtgtataaagtacttggataatttaagcaataaaattaaaacacaacctcaagcaaaggacataactctgctcgtacatcaataagagttagggatataactctactcgtgcatagaaaaagagtaaggaatataattaactttgttgatacatcaaaatggagttataggttttaaactctactcaaatgtcaaacttgaataagagactctaactctaattaggtgccgaattcaagtaagagaagcaacttaactcaaatatcttatgaaatgagacatgaaactcaactcatatagaaaggaaagtcatgattcttaattctaaattctaactccatactggaggtacataattcaagatggaaggaggttgtgcccaagtatgatgcttaagaaaatttcacccacactactaaacatgttactcaagccaaaagcttaaggtaaaacaagagctcgaggtcctcatcgatgtggttgtcacctcccatatggtcacgattatacatctacaacaagataagtaggagaggtgagcataccagcatggagtaagggtgtgaagaatcttggtacaacgtcaagatgatcactttggcctaacaccaagagagtcaagaccattatcttgaccaatgtcgcgactcacaatctcaaatatgtcccaacaacaagaaggtaagctagaaccaagctcaagggagatgagcatcttggccttgtttttttttttcaataaaaaagggaccaccttacccctagaaagtaccacctcgaccttagagagggaccataacggccatagagagggaccatctcaaccctagagagggatcatcttagcccgaatcttttttttctaaaaagaggagggacctgctcggcccaaatctctttttcaaaaagaaggagaaaagttgatgaaaggccatcatggccttatttattaatttttttattcttttatttatatattttttattttattatttttaagtgattagagatattggtgtatagaaatatttctaagtgcttagaaatagtattgctatatagtagttcctgaaaaaattggtgttcaaaataatgaagttaagaatgcgagaattgtttctctacaagtccatcataataatccaatattatgacaaacttggaaggtaaatgttctccctacaaaaaattgatggtattaagtttttgttggatatgggaaatgtcataatatttcaccacaaatggaatcctcttgaatggggtcctctttaatgaggtcctcccaatggggtcctccccaatgagatagtcctcccagtagggtacctcacctcctcatggatctcagaccaaggtggcgtatcctcacccaagaccaaaaaagtgacatctcctcacctaggacgaaaaggaaggcatattctcacaataactcctcacgacacctcctcatcacctcagaccaaatttcaaacctaaatatgaccatgttctgttaaattttttggaaaaaagtcaaaacgtaaaagatttagatcttttcctcggtttctataacacgtcttgaattagcttatttggagtttttatgagaacgttattcacgttttacttagagaggttgaagcataaaaatcacatcgacccttgcatataccacctcggccctagaggcctaaaacatatcacctcaaccctagagacccaacatgcatcttctcggccctaggggtcttagcatgcatcaccttggctctgggggccgcaatttgcatcaccttggccttacgagccttaacattcattatcttggccctaggggcctcgaaatgtcatcttagaccaacgctagagcctggccatcatgtcatctcgacctcatcatcacttgggactaaatcggggttcttatgcctccatcacttcagaccaaaatggtcatctcgaccttatcataatcttgacacaaataggggcctcacacactcatcacctcggtccaaaatgaggagtatcccacattcttctcgcgacttactagcaacattgtcttagcatgtaatcctcgtgatggaaatgtgatttttgtatttaaaacctaacccgaccatagttacaggaatgtgtttctgggagggattttaaactctaaattagtcctagatgaaaacctatataaggggagtgaagtcacatataaagggacacaaatttttattctcacgtacgaaatcactctcttgagctcccattctctcattctaaactcacttgagaagggaactcttggagaactctccttaagcattgagatcaataacactttaa

SEQ ID NO: 23923 - DNA, 3624 bp, Cannabis sativa
ttgaatattgagagggattaaaggaaaacttacctcgaggggcatttgaacctctaaaatttcgaatgtaatgagcaagaaaggcttcataagacaattgattttctagatctgatcctgtatttgtagttgcaaaattcacatttagattaatttcttgattgattttctcaatcctcgattcagatgcaagaagtaagccttcaatctctgcaacagagtagccttcaattctagtatttgaagggataatgaacgagctgaaagaacctctccaacaaaggcaagtagatcaacatgttgcttcactttaagtaggtaatcattgagagactgtgagcctttcttgagattctgaagattagttttgaatgctaagatctttgatgaaacctgcagtgtgaaatgtttctccagggcactacatatctgtcttcgagtgttacatcctaccattcaagttagtaggctctcagtcaaggaggagagaagccatgaaactaacaattgatcttgaacctcccactccacaactcaggattatggatccatgcagcttgatctgcattgttgaggtattgaggcggtggtgcaccgtcttggatgaacttcaaaatcctatttccacaaatggaagccaacaattgttgtttccactaaaggaagttgtgagcattcaatctatggacaaagtgtgcttgaaatgaactggtgaaacatcatcaattcttgttctattttgatctgcagcaaagaatccaggaggaggtcctggatatgtcgagctttagttggttgttccaatatttgccatatttgcccccaacgctggtcgtggctttggtaccatgttagtgttggaacctcttctagccattgttctagagcttcaagaacactataaaaagacagaaagaaagagagaaagaatagagctagaggaagagaggaaaaagaagaagaagaagaagattgagaaagactacattgcattgaaatgagagtgttaaactagtttatatacacaagctcaaaagaagtaaaacattacagagcaagtgtaaccgaaagccaaaagaaattacaaacaccaaaaatagttataactaactatcttgacaataatgaagtttgtgaagcttaaagttcaaaatgttgaaaaacatggtggtgaatttgaccatttatgaagagagagaaacctaacatttttggacagcttgtctcactgcaagaaaaataggtatcagtgagggcaatgtttgttacagaagggaatctttttcgtcaatgatgaccatcaatggaaaaatttcgtcaccaatttaagagtcgtcactgaaagtcactatcagtgacgatattcaaagtcgtcacttcagtgactacaatgtcgtcactgataatattcacttttatttaactctgagggccatcaatgacgacttggtcgtcattaaatattatattttattttcttaaaaaaataataatgaggattcaaattattttttagagattaaaaaaataattatttttaaaatttctcaaaaacttaaatatgtataattaaaagttttttattttctaaataaaatatcaataaaaatttaaaaaattataaatgattaaaaattacaaattaatcactgaaaattacaaatagcatttacattggaatcaaacccacaaattggttatacaattaatattttggaatcaaataaacctaaaaaaaaaatataatcagatccaaatgccatgaacacaaagccccaagtcgctatcaaccactaacgaagaacttggagaccaaactaatcgaatattgttcacctgtacattagagggagagaaagagagaggaaaatgaaaatataaagatcggtcttgcttaccgagagttttagaaaccaataaaatataataaagctaaagaaaataatcattgaagaatgaaactagagtttttatgtggttgggatgtgaacaagccttagttcacgcgtcaatattattgatgtaaagtggaaaaggcttatgaattacacaagtgtttgaaccctaaaatttatttgagcactcaaggattgagattctaacccattgcatgaatgagttttcttatagtgctagtattcttgtccactgatgaggtaaatataaataatatgctaactttgggccaatgtagtggagcctcacccatagggcattgattgtatgctgatgtggaggccacatctcgttgatagttgtcaaactgtgtcctactttttgggataataaagacatattaatacttgatcgtcaattactatatttctatattgggaagatatgatcctcagatgagatcttgggaattaaatcctgatatcacgggatctggtaattaatgagtgtgataatgaatttgatgcctggatgctccctaattatatctctagacgctctaattgaggtcttttatatacaggctatgctcgagggttatctcatcttgatgagttatctgttcaacattccgaagacataaatttgctaatggatctagtccattatctcggttgggttttctgttgagcctgaagtaactgagttgtactacttttggaattagatgtgtccccaactaaaaacacagataaaatttacctgcgagattttggaactctaggggttatgaagcttgcattcttcatcccgcatgatgtgacgacatgtggaggctaaaaggaggaacctttttgaattccaaatcaaaatgtttatggttgacgaattcttattttttgaaataaagcaaaatgtggcattttgtctttgggtcatggagattactttccttaatggagcgcgtgtagcatggctttggaaaatgacggctgataatgtcagtgtgaggatcaaggagaagatcatcatttagatattttggttccaagcataacattaaatgcatgattgcaactttcgcaaactgtttgatatatcttgtgtttcttggacataatcttgtgttcgaaataatttacaaagatcttaatttactgttcatgcatgctgtattatgaataatcttacatcctaaatataaattttataaaacgatgaattaacacacataagatttatagaaagccttacaatattggttgcagcagaatataatgtctctttccttttagttctttagcccttgatcctttctgttgtagagtatgatcaagaactgaacctagattttctcgtcctttaattgtattcatcgcagtcttccataaaggcctaagtatcaacttgaatagtgtggattaatactcaaaacacctttgaacaatattgagagagagaatttgaatttcatgatgtatgcaattcaaaatatgtgaataaaagaaaagaggaagagagttgtctaacattatgaaacttaggttaattctttcttctcagcactttttttatatctccatcactcagggttaggtttagaattagatgggctgtaaaagaagacttgagattatatcaactatagggtctatttatccatattttttcaaggcaagggacctatcatgaaaagaagaatacctgtgtctatcaccgtgttattgg

SEQ ID NO: 23924 - DNA, 2990 bp, Cannabis sativa
aaatatgataaatagtggctgccatgacagttgaaaagaaatagtttctaatcttctccatttacttcaaaatccacctaagtaaatttgggatataaatattattacaaacaaattgtccatctcaactagataatttttacttttactgaagatacaaaagggaatagatcaatgataatgagattcatcaagatcttcacaaattaagcaggcagagtaaatatcaaactaagcaatgctatctctagtttggaatctctctaacactgttagccaaaagataatttgcttagaattggaagtctactccaaataacaacattccattgacatgagatagaataaaaaattgttacctcgtcacgaatatgacttatattggacttcgacatctacgagagatcacactactacaatttacacatttatttttaattttttagtgggaagaaatcaaaaactaaagatactagtctatagaggcttatttcatcgattttagtttggtgcccaataaaaatttagttttgtctttggttttattaaaacatcgaagagaaaagtaaaaaaaaaaaaaaaagaatgattttaatgctgaattgcgaagaggaataaggggttatcgaagcacttttgtcttcagttattaggaaataatcaaagataaaagtgtccactgaacatagagttttggataccaacacctctggcataagatatcgactagacaattctagatatagaagttatattgcttattcctgaatttgactaggtgagtaggtgttttgtcgaggacggtagtggaccatccataaaaataagaggaattacctcagggagccctttctagtgtctgggaggcttcccgagttgcgaggttattcttgtattaggtgcgagccacataatcatagtcctcgtcatctgaatacacggatacttattcccagaaaaagtacttgtgatccttaatatcaatagtactttggtttcttcgaagtaggctacaagccttgagattattgtcattcaacaaaaaattagctactcgcagaccaattggaaggttgacaagctgctcgtgacaatgctgtatagacgcagtcggagtaagtcttttcaaaagcttaaggaacaaaacatcaataaacggccaataagtttcgaggttgaaaaatataaaagttaaaataacaagaaaataattaacttacgtatcaatcggaaggcaatggtgccaactgggtggaggtcgctcgcccaaataaagtcctgcttgaattctttcttgtttgacaacctaacaatcattttatggttgccaatgtgtgctcccaaataataaaaatcatcagaacatttcttcctcgcgggacaggatttgatagcattgaaaaaagtaatttccaaaggggttgggcttctctaacccaggatgtggtataaatgttttaaacatgcaaggatcttgtatgcattattaagaataaattggaaaggagcgaccccaaggtaatcgtagaagtccttgaaatattggcaaagaggaagaagggctccagccttgatgtgctaaatacttcccacaagattgtaagaaaggtttgacatatgtgataaacttaatgttggactcaataagttttacctcttgaaggtaacatcgggattttgaggcatcttgaacttttgatctttaagagccatgatattaaaataaaatttacctggtgaaaaagtaacactgactcgtggtaaaaataatagtctcactaagagaatttttactaaattgggaaatttaggccaggctgcttcttgcagataacaacatctaccctcgataatttcatctatgtactgcccatagcgagctgttatctcttattgaatagccctaagggaatgtttactatttttttttttgtcattcatctcaagtatggattgaggattataaatctaaagtttaaaaatcatagcttaaaattgaggattatcaagttctacaaagtctgggtgttagtaaacttgttcagaatgagacattgtcttgatttaaagaaaaaatacttcaaaattctagaaatacaaaacaaaaaaattcagagcctataaatcatctaactctaatctccaaccttaaattgttaaaaaataatatgaagacaacccatataaataattgatgatacaaaagaaaaatggaaagcaacaagaagaaaaatagaataatcaaagaaccaggatagaagtgtacttactgggccattggatcaaaggaagtcgtgaagcttgaatcgagttggtattggcggaagctttttcatgtgagagacaaatttgacagcttggagatacaaaatgcaggggcttcgggtaagtttaaactggacctattatataatagtaaactttctcaggttcctttcatttacaacaagagtatctggagctcgattaatgtcccaaaatatcagttcatcttgtggcaagctgtcaatgctcagctattaataagggataaaatgcttcagtttcgggtcttattggacagcactgaatgtccgatttgtgctgaagttgctaaatcaaatcaacatcttttctttgactgtagactctctcaaagggtagctgataggtgcagatatggctggaagttgggtcctggctgaaagagtatcaagcctggaaaaattggctggtgcacattagtaaaaacagattgtgcagaatttttatctctatcatggctgctatgatttatagattatggattaacaggaatgattgtgttcttaatgattactcgagcagagctacaagaattgtacaagatataaaaaaaatcatgttttatagactaacaatagcgaaaagagggagcttgaataggcatgagaggaagtatatagagtatttattttgtaagtagttgtttctttagcagttgattatgttttcagcttggctttgtttgt

SEQ ID NO: 23925 - DNA, 3262 bp, Cannabis sativa
atcctgagacacatctaatgtaccgtggaatacattccgtgaaaatacatcacgggacaaaatcatatcccaatatatataatttcacagttcattaattataaaaaatttaaaaagatagagcatgaattccatcttgtatatataggaaaacttgttagcataattaagaaaaatagactaacccgagtcaagatacaaatctaaacacgtcacgaaaaaattaaacttacaagccttgtcgatactactctataaaatattggtactatccataatttttatagtctagcacaacaagatgtatatttttgtagacttgtaggtcggcctggccaaatttaaagctaaatttatatatacacacaagaaacttgaaatgaataaaaataagttgatacactccttttaatgtgatcgtaactccatctatctttctctctagctaggtgctaaaaatacataaattctgttaagaaaggagaggcataagtcaaaaaggagaaactatatggctatagctaggtatagtggttttgtcctttatgatcttcatcatatcttacccatcaaaagtgatctttcttttggctacgatctcccatcaatggtgacatttcatcttttatttcatgacaaaactcatgtttatctaacaaacaaaatactttgttacttaaacaacttgaaaagtgatatcaattttgcaaccttcaaaaagctatacattactataaatatatatatatatttaaaatataagaaaaaagaaagaagagtattctaattatttttattgcccttgtattgtcaagaagcaatatatgtatgtacatatgaactattcacatgattaggcggctaactaaaagactcataaataaataataaattatacaaacatctttatatagtgacatcgaagcagcagaaagagaattgaagttggccagctaagatcagtgctacttgacactccttattttattatatcattcacatgtatgatgaataatatgatccattttctatatatatattgttacactaagaagctatggcaagtatccagaatataagaaaaagtatatgatgtatacacgttattcttgcatgaatgtggtaattataattattaaaatggtgataattaataaagaatcaatataatattttacataaattcattaaagggtatgtgtgtgataatatcactttgctaaatatacatatttatgtgtaaaaaaagtgaagtttggatccataaaagaagggtagttagagagagagagtgtggggggcttttgcttggctttccgtttaatatttttgtcagttatatgaaaaagacagtcgacagagcaacacagctttaagctttcttgtaaaccaaacaagagaacctaatccaccacactttcggtttctgctatccatcataagatgttgccaaaactcatcccattaattaacctattttctcacatgttatgcttatgtatgtatatatttataatatgtatatattccaccaaattaaaataaaggtactcaaaaaaaaaaaaaactaagaaaaaaacgacaaagtgctaatgattataacacttttatgtgaactaaataataaaatgtcacacgttaaataacaatgaactatactttactataacagagagaagtgtagtgtatacagttagaagaatcaatctcaatcaattaattactatgattgatcatgatccttaacatcattaataagatatttttgagtacagagacagaatgaacaattaattaataatgtgtaaaaatgaagtcatgagtaattgatattacttcactttttttttttgtggggtactgtgcgagaaaaccccaccaataatgaataatgaatctcgtaaattataaaataaaaaagaaaaagaaaatgaatatagtaatttgtatagacccttaattaatgaattagtaatggcaatccacaagaggagaggctgagaagacgatgacttgttctttggctgcagcgttgaacggaaatttagtttcacggcggtgatcttcatccggcgccggtagattaagatccaactccagaacatgtcttggctttttcttcatcaccatcgccattgtcgtagttgtattattattctttaatttttcgtgatcatgatcgtgactagcagtagtcgtagtactactcgtaaacgacgtcgtttgtgcattgttgttaaacggtgtcgttctatgcctcctcatgtgtccacccaaagcttgtccagaattaaactcagcaccacaaatcgaacactcgtgaaccttaggaaccttactattcatcttgacgttgttgttactgtttgatatttgtaaggaaagagctgtacttgtactattaccgttgatgatcaattgttgatgatgatcatgatcgtccattacgcccacttgaaacgacaacgtttgcttattattattctcttttacttgatgatcagcattaataatattcatattattattagctgtggttttaggtttcttgtgactcgctctatgccctcccaaagcttgaaacgactgaaaacatctgttgcatgtcttgcattgatagatactagtcgtattagtactaccacaggccgccatcttctccgccgcttgaaattcattttcgggtgagctcaggcgatcgttgtgaagacccccttgagccaaaagaatcaaacagttagccatatcctcttcctcctccgtagtcttaataatagtttcggttaattcggttgaagaagtagttggagaagctaaagagaaaccgcccccaccgccactgccactgccaccgccgctggcaccggtactagaagagctagaagccatgtgagtgaataagtttgatgatggtgcccttggacgcttggtgcgcttccctttgatcatcatcatcgtcatattttgtttcatcatagtcaaatcatgatcatgatccttgttatgaactattaattcctcttgagcttccatattggtcatgtatatataattcgagggaaaatttggatatgggaaaagggaaattaaattgtgttggaggaattatggaaggaaaaaagaagagtggtaatgttggttttaagtaaggaaaaagagagagaaagaaagagagttgtattgtctaatatataaaaagccgccctcgtgaatagtactagtgatgaataaccgtaaattattttaggttatttggtttttt

SEQ ID NO: 23926 - DNA, 2619 bp, Cannabis sativa
ggcgaattctggagcaacacttatgattgcaaattttgctaaaatcgtctctaaagggcccaaaaacctatccctctaaagatccttttcgtagtacaataatgttgtctattgataaaataattttgtagactgaatttcacttgcctatctacaccattttcgcatgtgcttagggtagaagtttttttataagtgtatctccagctaataaaaaataagtgtttaactaaccctaaggttaagtatacgcataggttaattaatgtaagagtatttatcaatcaattatattggttggtagattgagctgtaatattctcaattagttaacttctgaactagctagcttaatgatggagactaattatattattaatgtatatcgctaaaagggttattttggtagactcactctctcaattccgatattaaggaaatctttataatttaattattttttttatagttatgtatgtagtataatttaagaccacaaagtttcaaaaacttcaaaataatttatagtgttaaaaataaatttaaatattttattatacatgtgattgtttattcttatacgaatgctaagtaattatttaattgattcttattttgacactataaattatttaaaatttttctaaaaatttataagtgatctatgattatcaaaataattggactacaattaatgttctcctacataaccaaataaataaaaaatgtactaaaaaggtgtgtattgctataaatttttttcaatattaaatataaacataaataagagtactagaaatcaaatgtcaaactacataacatatatatacataattatatattatatatatagctgatttgggatatcataaatgtaaatttgaaatgcaaggaagtacatttatagataacacaaacatccatagacatgaggttgagaacatagattaatttgtcaatgctataaatttagacgcatatttaagtacaattattgtaatatattgtatagattaagaccctaaaatcagacacataacatatttatttatatataaagttcgatctgtctttgttgattaaatattagagtttaatttgatttgtgataacgatattacaacaactttgagaattgagagcaacctaagattatttgtagattaataaattgacatacattaagatatataagacaatttcataagcacaaattaactacaaattcttatatgaaaatgtaaaaataagaatgagaatgaaataaaataaaatttaaaatgcataaaagaaattgataaagaaaattattattattttttttttttcaaatcttgtattgaaatggtttttctttctatttcaaaatagaataatcattttaccaaaataatgaaaaaattccatcagaatggtatttcaataattttagatgcaaccaaataaaagaatagaattaataaaaattattttctttcctttctattcaattttattattacctccaaccaaacgccaccttataatgagattatgataaaatatgagatttatatatatattaacatcatcaacttcaacggatattatttaaaatgaatgagttttatcaagtctttccttttttatttatgatgtaccaacaactaatttcaataactggcttatattgaagattaatgattatgacatatttaatacacattattttacactcaataatatatattaatcaatctcattaaaaatagtgtggtgattgtggtccatactgagaacagctatgaagggccaaggaatttctcatgtcaaatatatagggagtttcttttaaagggactccaaaaaagatcctatcaatggagtgtccgaaatcaatattaaagtgacacgtcatttaagtcaaagtaagtttggagaggtgaaaaagattggaacggaaagtttggaggagtgagaaagtgagtcgccagagactcgacttgaaaccatgagacaatggttgggggaagagagaagttgatgataacagggctaggtcgtagctgacgatgaaggctctggcaaagaggaagcttaagacgatggcgctggggaagagggaagttaacaacgacgacactatgatgatgcatgaaatccaagcattgacaagatcgactgtcgttttcatcttcaactaatgtcgatgatgatagtgatgaatgggtaaggcttccagatcaatgcgttgccgttttggccaactcagcaaacccttgtgatgattttcgacaatcgatgaaggagatctggaagagcatctccaacgacagaagaagattgagtggagtttcatggatgtgtttctgttctgttatgtaccaaaaactaaatgacatgaatccaattcaaaatagtcatgaaactaattcaaaataagctagaaaaacccaccgagggagagggaaatcagtaacgtaaccaacattcaatacaccatacatattttaaattcacaaaattaacacacattaacatggtgagctaaacgcccagtaagaaaattctttaacacacattaacattcaatacaccatacatgtcttaaattcacaactgaaattccgtattttaata

SEQ ID NO: 23927 - DNA, 2502 bp, Cannabis sativa
aaattattcaaaatttattttgttatatataattaaaacataaataattatcatatataaaataagaaaaatgctataggtatgccctaaaatttttattatgaagtgttatataattatttattacaaaaaataatatcattattttttttgaaaggaaaaataatatcattattaatgtgtttaatttactattagtccacatatatattttttaataataatttaagaaaatgctaacaaattatatgaggttaccttaaaaaacttttaaggtgtgaaacctcaattcaaagggcgggctattgagaatttcatatactattttattttaattaatacacaaactttgcatggctctatatatgatcctaacccacgtattcaacatgtcatcatccaatggaggtggttaacaagcacagagtaaatgattttaattaattgcaccataatttatttattttttgatgaaatacaaaatacaaatgctaataattaattattaattatttatttactactctacactatatatgatgacgatatataagtactcttttataatgtgtatatatatatatatattacataaatatattttaagctaagtatatattgtaataaggctcgagtcgcatatattgttagaacaacttttgttatattataataatattacctcaccaagatgcattattattttttcaattatggccacactatatgcattatattcagtcactcagcttctttatatagttaagcaacacatgtgatcttctataaattggcccagaccatttattaaagtttaattattgctcaacaaaagaaaaaaaacttaaaatctttatgtaattaattatggattaaatttattataaaattttagtaattaaataaatattatttttggtgtggttttatcaaaaattaattaattattattcttaggatatattttctcacatggtcttgccatgagtaatattagatagatacacttaacctgtataatatttacacatactgatatgcaatgcattcactaattaatatattactttcaagtgaatatcacattacttttaattatataattgaaaacaattaattacatatacacattttgaaaacattaattacatagtgtaaagtatgtgtaatttaaatgcatcacacaattattattaatatattatatataaatatattttaaatttataaaatgaaagacatctcactataagatcacgtgaaagttgcccaaactatatacaagtttttgtttggtttctcaacaatcaattagcctaggtagttatgatgttatattatatatatagttatggtgtagctctagctgttatggtggcatttggattgagtactgtttggcttaggttgaatatattgatatgactatttagctttattagtctctccactttttattaaagtgctaaaaaaatagtatacagttacattttagtaatactttaaaaaaattatttttatagtttctaaaaaaatgtattaaatttgatcaatattaaaaattgtgtcaaatttaatacaaaatataatatggtcccaaatttttctcacaataattttttttttttttatatatttactgtagtaaaactaatcattatatacacgtagaagatagagggaaagaaggaccatatcacacctagtagctacgtatatatacggaatgttcataaattgagtaaaacgaattaaataatttaatatatatatatatatatatatatataaattcataattcattcgtcgtgcgtttgtgtcttatgtatataattatatataaaataatgatggaaattggacaacaccatgttggattcttgggtatattagcaccacggcttaataatttctcgtcatcatatttgcttatattttgtccttattaaaaacctaaacattaattttcaattaattgataatatgtgtacatagcagtttgtattaattgcccatccatgtcatatatatacacatatatatctttaacaagaaagagagtacgtaaaattcattttatcttcagcttgaataaatatataaatatatgactaataaacattattaatatagtgcttataagagctcattactctcaagcatgcgagaaaggtaactttgacaatccgaagcatatatataggaataggttctttgtttgactcagtgtgcataaaaggcttaattaaacaaaagacaggttggatatatttgtgggctagaaaattaagcagaggatcaccgtcaccatttctttaattctttaacagtgtggctgcatatccaaatttcgtgctagggtgtactacgacatttggaaagtgagaaatttaggtgacctttgttaacacttttttaattagttttttgtttttaaaattagaaaagtgaaaatattttttaaaaacatgttctataaaactatttttgcttttcaattt

SEQ ID NO: 23928 - DNA, 3501 bp, Cannabis sativa
tgtaccattttttaacttttttttcaaatttattttatttatttttttgaagtgtgtatacacatagcactcactatacacactcgtaagctgtttgagctagtctcgagtggttaaaaaaaattaatattttataaataaattgaattaaaccctccttagttattacataaaatgtttttcaactacactatgacaacaaaattataatgtctagtctttcaaaaaaaaattataacatctagaaattttaataaaattataacttggggaaacatttaacaatctaatacaatcactaatataattatcagtgtctcatctagaaaagagacccatgagagtattgaattacaatctttgagtcgcattccacaaacacaaaattatagcccttagcaactacaatctccaaaggaagaagccaagtcgatgcttcaccaataagagagcgcaaaaaatagtctttttgttgtctcccagaagattgttccttgatggtcacacgccaaagtcatagcacacatcacttccccccacccttcacatcacaattaatctttacctagtctaaggaaggaggacttagaatccacaacaataataacaggattaaagagaaggattataatttacgtaacaataagtgatagaatcaatatattgtttgatgttacgtattattattatgtaccttatcaatatgagttatccaaacagtatcaacaacaaccgacacataaagaaagatctcattgacattggctcctttcttgtcaaggcctcacaagaacttcaccaagtcccatgtactgagacttgtataattaattggtataagatcctatggtgaagaaaaccaaaaatggtaagcaaggttacagtgcaaaaaaaaaggtgttccgtgaattctttaaaaccaccagatatgggaaagtaggggtgggcatcatctaatctaatctaattgaaccgaaccgattcaatctaatctaattgcaaaaagttagatatccaattataattggattgaattggatgttaaaagttagattataactggagtggatcggttatcgaatgtcaatctcaaaatctaattaaaaactaacccaatccaattacatttatatatgttaaaaaattatttatataataaaaaatatttaaaaatataatatatatattaattagatttttattagatttttttgtatgttgaatttgtaatacttagttgttttgtgtatttatttttatgatgttttgttctattttattacttagaaatgttttaattatttaaaacttttggctacattacacttgtaacgatggtatgtttatgaagtattaaacttaaataaaatgtgatacttagtttttacatttttttttccatatttttaagttaatattataatttaggtttgtaattggatatccaattaaaaaatcgatctaatccaattagtaattagatttgattaaattggattttgaggtataattggattggatcggatgatgattttccaaatccaattattaattagattggatctgattagaaaaaaaatattggattagatcgaatgtccactcctataggaaagaagtatattcaatatcaatctaatgccccaataactcacaaataggtagcacatttgagagaatactccaccacatcactttatggcactcaagaattttattattccacagtttagtttagtatttttttttattattttttatttaagtgacagaacaatgacaaaaaattgaagtgatatttataaaagaaagtaaaaaactaaactacacctaaaaaaaattgtttaaataaaatttaaaagtaactcatttttgtttttaattttttttttataggatcacactaattatagttttcatcaaattatcaactctatgatggagttaaggtttgaaatctactaaggaaataataaaaacatacgaacatgaatgagaaaagtaagaatggaattgaatcaaatttaaaatgtataaaaattattaaattttttctcatattacattaaaatgatatttcatttttttacaaaatataatagttattccactaaaatgatgaagaagtcattccgctagagtgacattataatactttaatgacatgtatactaataagtaattagaatcaatggtgaggtatgttataattatttattattcataaaatatgcaataacaaaatttaattctatagataaacatatgtagttattataagtgtataaatataaatctaaataatacatgtattgattcaaaaagaataagaacatgaataacaaaagcgtactttaatccattgatagagatgactttcgtggtgattttgagtaatgatcttccaataatacaagaattgatgttctttagtttcctctcttgatgggagaagatgagaatagaatgacttttgtttcttgggggtcactactaatatatacctcatacctatgttataattttaagtaggaatattggtagcaaaaccacctggattttatattttttaatacttaaccacaaaaattaattttttggaggcaaaattatctaaacctcacttctgttgtgttatttaccactgcgtcctaaaatctcaattaagtgtcatgatggacagctgaagtgtatactaatgtacacatcacgtgtttttagtggtccacgtaattttaattaaaatataataaaaacataatttttccttaaataaaattttatcccaacttttccacaaacttatacatccatctacaaataacataaatctactattttttaaattatatcgtaattatgtgagtgtgagaggataattttggtacaatactcataaaaataagtatatttaaattaaattttatttagatgtaaatttgatgaaagtataagaaaaggaatattttttaatttctccattttttttttgttttgaaaagtaacatgtcaaaagtttactttagcttgagaataataataacatgtttggtttgttgtaacaagaatcgtaatagaatcaaattatttgctttgcttttaaaaatgatgtaatgagattacattgtaatcataattacattatataagagaatttccgttacattagaaaagctatgtaatgaggattacattataaaagactaaataagataaaattaaaatgactttaatatccctttttatataaatataaaaattaaagtaggggataattttgtcaatttattatttattccaataacaaaccaaacaagttaataaattcccattactatttttattccattacattactattaacattaccaaactaaacatcacctaagaattttttttttttgaacaagagtaagaaatttcaaatttagttagatattataaattgactaattaggaattttcctcccaaactttgacatgtaccaaatcatgccccat

SEQ ID NO: 23929 - DNA, 3345 bp, Cannabis sativa
  modified_base (3298)..(3298): a, c, t, g, unknown or other
aaataagttctgatgagaagaattgaaacccaaattcgatgaaagagcaaacaaacaaacaaaagacaacaaatctgtgactttagtcttctcttttctctctcctcattttcccctcccctcaaccaaacagtcttaaaaagaaagagagatggatagggatgaacaatgaacagaattgagtggatgaactgtagcaacacagagccttcatccatggattttcttaattagaagaattggcataattaattaattaactaatcaattaagtgatagcatacctcgagttgagtgaaaagaggaagaagagaacgagacctgtagaacaaatcgacagcgtcattgggaccaccgccactgttggtgggagcgttgagctccgtgggtctcgcctgctctcctccaatcccttccttccctccttccaaatccgaaaagcaacctcccatcttcttcttcggaaaacctaatcacacgcactctgttctttctgggttaccctttttatttttaattttcttgttgggtggttacctatttatttaaagtaataataataataatataatctcacttggccttttcatttgccaagctcacaatcgcatttttgtaacgtaatattttagagtcataattgaaacttttctttctttcctccccagtttctcttatttggtgatctataattatatgatgactcctaaccttgctatatacgtttcaaataagtaataaaatatataattataaaataaaagactcggattttttttttttttttttgaaagaacttgtattgcaaccagaagagaagatacaatgtaaagaaggttacaataaagagaagactcggatttgtttgtttttaaagtcatcacttcccttgtcaaaaaaaaaaaaaaaaactcatcacttcccatttgaatcaataaactcactcttacaggaacatggttgtattcccgggaaagaacccaataaatggtaagtggatatattttaagaatattattattgagtaccaatagttcaatcttttacaagtgacgtcttataattagttaataatattttttaaaaattatttttattaagttatatagtatcgatatttacaaggtcggacggcgggctagatctgtgtgtagaacccatactttttggggcccaaaataaaaaataaagtttcagtaggtttttatttaagtaaaattaaatgcatcataagtcataaatattcatagtttagttaattaaagtgtatgatatattatacaattttatgggttagaatcttatgacacttgatatttaattacaccaatagcagtataatactaaaaatgatgctaagttccggtaatactttttagtgtttctcatcttttaaggatggcatgactagacttttttcatggtcaactcaactcaactccatctcattacattttatttacggtaccgtattatggttatgataaattatcaaaaagtaattccacatttgatgttgaaaagcaaaattccatagaaaaaatatgatgtagcgcacaagctgagcactatctaatatgaaaatatatgatattaattttaccataggataaaaaataggggaattacttcaaatactgtttttttaacttttttttaaatttactatttgggtttctaaagtggttgtggcgctagttgtaataagaaagccctatacgattttttgttgcaatttaggttgcagggctagttgcaataggagtttctatatagaattctataaaaatacaaaacaaaaaaaaaaaaaactattttaaagtgtaaaaatgaaaaagcctaaaaaaaaataattacattgaaacatgtcaaatcaattttatatagcttttctctttcaggagtcttctagtaagcatgagatccctcttctccgtgagtgagattttggtcccgttaatggaggatgtcgtccacccaagttgttttagtggtggcttgttttcttctctactatgctactgtcatatatcttttttttctttcattaaagagagaatttattgctctgaggtatatactatttctctttcccatcccatttattttggtcagtgcatttattgctcaacactccatcttctccctttttttgattccatctgttatctctctccatcctcttggcctcttcatcataaaaaccaaatcttttctcccttatcttttcttggagattgcaaaatggaggctgacgtatggtatcccgaagctactttgatcccctccatcattgtggctattctggccatggctagggatgtaactaggagacctttgagattgatcttaagaggctattgattttcctttataaagcacgattcaagtactcttcttctcatctctctctctcttctttcgtttctctttgatttcagtctgctacttgtttttctttctttgaaaatggatgaatttcttaacaatgttaaccctactaatgattctcctacccccattagtctcctccttaagcttcacacagtcaagccctttaattgcccttctctaatgaaagctctttttggtatttggtcgtcgcagtgtcattttcctgtttctgtttctgaacatgtcgatggtcttttcctggtcacctttgggtgtgagggggataagggtagagttttaaaaggccaaccttggcactttgctcaaagtattactatctttgctgcccctgagagttcctttcccattactcctgaaaaccttcattatgtccccttttggatccaagtttatggtatcccttttatgtgtaagtcatatgagttggttaggttcattgcttctgaaattagtgatcttatagaggttgataaggatacggtcaaggagggtactaggccgtacctgagaataaggattctcttagatgttaatttgcctatacgcaaaggtatgaatatcagattcattaagaggggaagagagtttgtcaagtggttagattttaaatatgagaggcttcttgacttttgtttcttctgtggaaagttagatcacactaaacgttattaccgtgcttacttgcaaaatgtgatgagaatcatactgctcctacttgtccctttaccattcttcttagaggaaaatagaagatttcaaataaatctatacctttccagtatcctcatcctcctgccatcactatggttgaggtggaccctgtgtaatatccgcttttcttgatgggtaattattttttttatacttagtttattttgtttgntaatggagataatttatcattttgaatatttatgagtttagtggagt

SEQ ID NO: 23930 - DNA, 3186 bp, Cannabis sativa
  modified_base (2598)..(2600): a, c, t, g, unknown or other
atctgcattgatcataataatttacagctacggaagtagttcttctggacgaagaaaaaggcatggtatgaggggtatgcagatcttcttgcacttagaaataatggcagagatgaagctgtagcagccataaattgattctttggattcaaagtgtgctcttctgcggcataaggtattttctcattcatatcatattcattaagcttaaatttagaatttatttttttgttggttattggaaataataagcctaaaaggatgaattactttaagtattttatgtacataggctgagtggtcttagtcttaattctgttctattagtccaattgtaatcttaggtggcctaagtctttttttttttaagaccaatgcttatcaatatagagggagcaacctgattttgactaacttgggattgggaattagaaaatagtactcttgtggagataccaatcatctcaaaagatatgagaattttaagagaggaaagctcgatattgtaactttcttactatttttcaaaataaaaatcacttggagaattcattactgataatatttctactctaatggtatatttacttacacgtaatcgtaattggaatgattaagaattgtattaactaagaatcagatttacccttaattgaatttattaatcggaatcagaataagcagtattctattgatgtgtatacattactttaaaattgaaatagattatttaaagttataaaaatactctttattaaagttttatttggatttttttttaattcttttagttaaaaactaaaaataattaaaaaacagtataaacgacatttcatatttcgtatttttagaagagtgatttgcagcgtaaatactttagttcacggttacagacaaatatttaagttcaattttttacggtaataatacttaaattatattttaaaatttccgtaggtcacatggtagtctctgattggtccaggtcattattttttatttttatttaaaaattcatttaaatataccaataagaaaatagcatgtagatattatcttggcatagacaggtacccacggaaatttcaaaaataacacttagctaccgtcaaacattaaacttaagtatttatctataatcgagagttaaacttaagtatttacgctgcaaagtatttttttaaaaagaatgacagtggcaatcccaccatcctcaacctcatggaaattccaatgccgttcctcattcacaaattaatgtaaaactcatattatatttcattctcattctttaacgaaattaaaaaaaaaaataaataaataaacaaataatgaattccataatttattctcattccctaaaaaaatcccacaaataaacacaacataatattattctatcaccacaccaatcattctatgcaacaataaatacaaataaattcaattaaaactcaatattagaaatatgaataaagaaatcatttaacaatcacattgttgtggaaccacattagcatcggcaatgtcaaagagatgagccatttcatttccccttgaatggttcaacagttcaatatctttccttaactcgtagaacttagccaaagaatgaaacaaaggcatgtagtatatgctttagccatccttaaaattttatcttccttcaacttaatttctcatatatagaattgtagatggtgaagattctacgcctcaccgagaatcctacaacacactaccagtagacaactaatagatcaaaagatgcacatcatacagagcatttaaaacttcatcaaaaaagttattcgttatagccactctaatctttattgcgcgaatcacaacaaacaaatttggaattctctcgagggccaggcgggggcttcaacatgtttgtacttgtttcgtatctaagcttggtttttctcggattaggattctgcttttggcttcaacttcaaatgtaggttcccaatgggtcatatctcagtttgaatattaggtttaaacttaccgtaacaaagaccatgctatgaagggcttccttttgcaacattcatatctcagaaagttctgtaacttattcaatgtacaagttatttttgtagactttaattacatttacataggctgagctagtgctataaatacagagatttttgacacgacacgaaattggtacgagctcagaaggcacgagcacgactaggcacgaaaaaaatacaggcataggcacgacacgacacgatactacaaattgacacgacacaacatattaaaaatatgtaataataatatatggatttatcaattataaataatttaaaataatgataacactttaatataatactaaacattataattctataatttaaactattaaatcatgaaaaattaagattatatattaatttatttataggttgatataaaaatttgagtatttataagtaaatatttgaattctaatgatgttaataattatttttgtatgattatctataaaatattgttcaaaagttatataaatatagctaaaactttaaaatgtacacataatttagtaattgtaaaaatatatatatatannnatatatatgaaaaaaaaaacacgaatttaagcccggatatgaaaacgagctgacctgtttaaaaaatatgggtcgacacgagcaaagcacagcactaattcgagcatgccatgaaaatatcaggcttacgggtcgtgtcgagcctaccctttaaaatgttagcactacacgacacaacctatgtttttctgtggcacgacacgacccgttttttaaaaaatacagataaatatagatcgggccagcacgacacgcacgaacttacaacactaggttgagcagtgttttcaaattaagttttgggaaacatgggccgtggtgatagtgaatatatttgctaaaaagtttcaacaagacaactgttaaaatcttgtttttagtttgggtggcgtttggtaacacttttattttttatttttttaatcacaaaaatgatagtaaaatttttatttttggaaaaaaaaaatgtgttctataataacttttatttcaatttcaaaaatagaaaacaaaattttgttttgtaaatttaattttgattttcatttgttgattttatttaagtccagtctgggtcaaagtcggg

SEQ ID NO: 23931 - DNA, 3026 bp, Cannabis sativa
  modified_base (61)..(62): a, c, t, g, unknown or other
tgtttaaaaaaaaaggtaaaaatgatagactttaaaaaagagggtaaaaataaaagaggannatataaaaagggtataaagtgtaatttcctcttcatttttttggcccaaatgggacttttaatggactgaatgaaaagcccatttaagagtttaatgggcttaggaagtttggtaaatcagttggaattggaaagaagaaaaaagaaaactttcttcatttttatttatttcctcaaattgttcacttttgaataccgttgttgatatggctctagtgaaatattgaaatctaatgtctaaacacaaattattttattttaagtttttttttggtaaattttgcattaatgtgaatgtggttgttttttttaacatgtttttatgattagaagtactgagtctaaaaaggtagaaaattcaaaaaaaaaaaaaaaagctatgagtcttgtcttttgttgtttgttttgtcatgctttgcttttctgcatttggatcatggcaggctctaatatggatgttcaatatgctaaaatcatgcatagaattaatcataccaaaacataaagattcatagccactcaagccataataatttcaactcatactttagtcaccataatctaaaaaagagtatataaatccatggctataaatcaatttttacaaaatttagaggaataaaaagagtagaaaaagacaaatcctataaatgagagtaatgtgtggctctttttgtaattctccttcttaacttcgaattttcctcttttttttgttctccttctctttttgtactttcttttttataaatttttcttatgaggtatgttcattgatgatggtggttgtactcagtacttctcttgttgttgggtcattagggtaccattcttacccttaaagcaaaaagcccatctccttccttttggcccactaggaacggtctcataaacagtcagctggtctcatcattgatcagtttaattaaataactacaatagaaactaacaacttgaaagactcccaaaattaactcactaaatataaaagaaagaaaactaataaatttgccaaacaacatcacaagcattactctttttacaaaaaaataagtttaaagatcacaaaaataattctatactatagagttatcactgttatttgtgatttttaagttttgtaatcaatttttacatatttaatgtttagtgagtgtgatttgtttttttgttgatattttttaatttttttttaggtttagtatatttttcattatatgttttgggtgtacactcttgatgatatttattgttggttgcaatatagtgtatctactgatttttttgatattgtttagttgtattgtgtgaatgattttttttatattagtttaattataatttcaatgtagttttaacaccatttctattataatattcatgtttcttttgttctgttgttatatatcaatgcaggaataggaatacaagtttaaaatttctgattattacaagtccaagtgtatttttacttgcacctacagtgttataccaacattaaaaaaataattttgtggatgttcctgagtacaatttttatctccaagttatttacaacctttgattacgggtttggattgtatagtattgtattttatttttatgcttatgtttttgtacatgtttcttaattatgttgatatatataatgtatgattcaacaatgaaacaatttttatgcaacctgtctaattagtaataaaactaggaatatagttgaagaaattatttgaatctttgaattatagtgttatgcataacacattttttacaactatcaatcaacggttgggcaacttttgaagattcaacaaaattgtcaatgtaattagaatagttttggaactccaaattaatgtgtcaaatatgatgttgataatactttatatttctattaatattttagatataacatacaatcttaaaacaactgctactcattgcaaagaaggagatgttgttggttacccacaatggataccttgtgaagttaagttcttttaattttagttgtatgtagaagaataggcttggatcgtcatttatcctcaacggttaatattctcgtttcacttggtatttcagttgcagttaagtattttctttagttgcgtttcagcacttgcgtcaacttgtgcacaagttctttatatttgtattaccttgagatgaattcgccactagcttcataattaatataattcattcgttaatcaaactgccgattgaactgtatgagaaatggaattgattccgtttcttgaaattttgaaaaattcaaatatggtcagccaattataacaaaactataaagaactgaaggcgtaatgcaaccacataaaaacaaaagatacaaattaaataatattgtcaagtctattgcgtgtgagatgaatgcgaatttaaatgatttgttgctatcataattgaataaattcattattgaaattttggaaaacaacattttcaacaagtataatattagctactaatattttgtcgattatacataatttgggttgatcgggatctcaagatcaattttttacaaatctatttgtattattaaatttaagaaatattagtttatgcaatttgaattattttacagaatttagtttatatgtttcaaaccattttttttttcttttatagagagcttttgttttggttggctttttttttgtttatgtcatgcacagtatttatgtaatattgtcgatttttttttctataaatatagtcaaattaattagtaacatatgcttatgatattacggaggtgttcaaaaatatctatagcttaaattttgcgatatttacgtgatatattattatttttgtagagaaaggtgcatggtaatttgaaattttgttattgtttatgtttgatgatgattattaaaaagagatatgaataacagaatatttgaaattttaaagtttaaataataataataataa

SEQ ID NO: 23932 - DNA, 2697 bp, Cannabis sativa
tctaaataataccttcccctccataacagaaacacaagagttggtagtacccaagtcaataccaataacatcttgtcccgcaggttttgtactgtagtgaaaagaatcaacatttaaccatcatacatttgagaaaaggaaaaccacgatcttccacagaacacaattgaacaaagtgcatcaggaaaatccatcatacctaaaaggcctcaccaaggttgaccacttctggcccagatgagatggcttcgagatgctagtgaactggagaaagaacaaacaaataaagtatataagcaatgtccgaacagataaaattattcatttggcgaactagaatattcatcctttgcctcacaaattacaatatatatatacatatatatatatatattaataataaatcttagataattcatagacatcgacccaaatcagcccaaagacaaaaaaactattaacccgagcactacaatacacatcgagcttttactttacgcaaataccatgaattttctattccctgaaaaaaagaaagcaaatatacaaatcatttccatcagattatcataatctaatccagactgcgaacccaagttaagacaatactacgaatccctcttaagcaattcatcaaacactttgtgacccatcaacccaattatcaaagctcaagcactgaaatacacatcgagctcaaatatttctccaaaattcaaaaacaaacataaaaaagtggcaatgaaaccaaagacacaaaatttccgtcataatctaaaacaaagattgtgaatttgatcgtggatgaaaagaaatgatgcttaaaacaacgaaatcttcgtaacagcggaagccataaacaaaaagaaaaaagagaaattgggggaatcggacatacggatctgtatgctgagagaggaactgaagcaagatcacgacgtcgaatggatcgaagcaaagcagcggtggccattgatgagttgaaggagaagacaaaatggttagggtttagggttttgagaagagaaggtgtggagttgggactgaagagatgattcgaaggttttagaaggtttttagctatatgagctaacagttcatttcacaacacactaaaatctatttatagcacacaaaacggcatcgtttcgtttacattttctttgttgggggtttctagtctaagggtgtgtttggatgacgagaaggatatgataatggtttttaattagggattatttcacagaaacacaaaaattatataaaaaaaaatattgtatgaaattttaaatatttttaatatttttgtaattttatttatagaaaatacgagcaaaacaaaattagaatttgagaaattttaccacaaaatttttttaatagggatttattgtgccaaactccaaaattcagaaagtttggccgcaaattaactaaaaattaatcatttcatattataatatgaaaagttaacgatactaacatatagaagtgctcttgggtatttattctctttaaaattaaaagaataactcaattgattgattcgagatttgaaaacaattgtatgtgattaaaaactaaaaaggtgagatcacatacaaatactttaatgggctgtttggaatgggttaatgctagcgtgatgtgaaatattactgtgtttttttttgaggatttaaccttacaatatttttccttataatataatttctcttgaagaggataatgttgataacttaaaaaataccgagattgaattattcccttctattatattaatttgaatactatttttgaattaataaataaatttaaatactatcaatattttaattattataaaaaacatattatgatatatatttagtctctaagattaattttttatttttaacttaacgacctaataattatacggttacttgcaaatatatttttattttttttttatgaaatatcaacttcattgaattaaacgcattctgaatacaaaagggactgtaaatcaggccaaatattattttccaaaatgctacaatcagggataaagcgagatttcctagcaacagcatgagcaactcggtttgctgatcgtttgataaaacgtaattgcacaccatgtaaggaatacaacaaactttgacaatcctggatgattaagccaaaagtagaagacatatgttgatcactttgaatggcttggacagttaacaagatgtctgtctcaagctctacattgttccatcccatgctcttgatcccactaagggcttccttaatcccaagggcctcaataacctcagatgggtatattaccccttgtaggttgtctttgcctcaataagacagcctaggctatttcttgcaacaataccaaagccataagcagtctcgtgatgaaatagtgcagcatctacattaattttgacgtgatttaaaattgatttagaccaaagctatgcctcatcgccattattttcaaatgacagcgataataaggcgtttttatcctgagcttttctccaatggtcaaaagtaatagaggttgaaaataaaacatcatttaccgtagacaactttttattccaaacgacattgttgcgagctttccacactgcccagcatagcatagcagcacggcaagtaaatgttgcatcagacttcctttgcaaatcatcaaaccatctgccaaaa

SEQ ID NO: 23933 - DNA, 1727 bp, Cannabis sativa
tgaatttaaaatataaaataatttaaattaatattttatttaatttatttgcataattagcaaaagataatcaaaaaaaaaaattcctatatatattttaaattagttttataaatgaaattgaactaatttaattagggtgttttttaaaatttaattcatttcaatatccaatatgaatcgatgaaaaataatctatatatgtatatattacataaatatcataaaagtgttatatataattaacttggatttatatataattgattaggtgagtaataaactcatcaaaacaatcatattattttatcaataacaaaattatataatagtaattttatatgttgtaaatataattaaattaagaatcaaaattaatttaattactaaacaaaattttgtgatcttcaatatctatattaataatggccaagaccatgcttttgcatgcttcgcacgtgcaagagatatgtacatatatacagacatattatattataatatataattatatatgcatgttatgtatatatatatgttatattacattataatttaatttattatacatagaaagatagatgagatgaacagaaagttctacaccgacaaggacaaaataaaaattaattaaataagattatagttacatagttatataaagtcatatgtgtatatgaattaatattaatattaattaatttatacaattaatatgatatataataaaacgtgtttatgtattaaaaggctgtcataaaacagcacaaaaacacatgaaaactactattgttattattatttattagctgtatataagttatccgtacgtgtatttaattatgtatttatttattttatataatttacaattaataaaattaatcctgaattaataataggttcacttcagtcaccaaaaacattgtttggatgtttttgtgtcaggaataatcacttttataattaacactttattattattattataatcattattattattagagtattaaattaataatattagcttttttttggaagaaaaataaattattagtttggtgtttgtttttgatatctcttatctaaattaagggtctactattcttctaacttgtataattgatgttactattgctaatcaaatataattaatttgtagtataactatattttaatatgattttgatattttggctatagagttttaatgtccttaagaaattttttgaagggttttgatttaattaaatgaattgaaggattattgatgacttttattatttcagttacattctatgaagagtgtcaccttcaaaatatatacacaaatatatgttcattttcaaaaattactaagtgtaatttttagagagtcattagtgttatatttgaaagttcactaagtataaattctaaaatacgcttaagaggatgaggaggtcaatcagcacaaatgtgttggtacgaggaggagcaaaggcatgggtcgagcttcccgctgtccagctgctcctccctcctcgcgtgcccaagctccccgctgtagcccgccatgtgcccgaaggagctccacgctccccgtcacgccgcacgcgcccgagggagctcctctctctctctattccccctactccccgttcaaccaagggagctacccgctatctccctctatctcctctttctttttgttcaaccaagggagctctctctctctctctctc

SEQ ID NO: 23934 - DNA, 3073 bp, Cannabis sativa
tttacaaaattcttaaagttaaaaagagagtagtgttatccttaaagttaaaaagagagtagtgttatcctaatttttggacaatgtgacgtgatactgaatagtgtaacatgcgtcaagtatgttcacaattgaatgggtatattcactcaggaaccgtccaaaatagtttagaacgtgtgtcaagtatgtcactaagccgagcaagttccatgccttgcacttctctaagcaaagtaaacatgccaagctgagtcacatactctgtacatagggatgctgtaaaagaagatctctgaagatattttccttaaatatctccacgattatagctaagttaaaatccttatttttatgggatttattttattgagagaattatgggatttattattcagtttcccttctcatatttttcgagacattacatcttgtattttccttatatatagtggagtcattccattgtgaaggggatcttttttccaactttttgagagctattacgctactgaaatacttgtaagcttttacgagaatattaagaaacccacctggtcggaccttgtgatcttaataattttttaagttatacaattaaaatgagaataggctattaccattatcacagggccaaatctatataaatttcttgtgttcttattttttttattattattttatcattaattaatcatttcattcaatcgctttaaaagactcagtgtcgttggataaaaacaaggtcaatatttttggtgctttcattgagagtaaaagaacacaatcttatccttgataaaattttgatcctttgacgatggtccttgcaaggagatctcaatccactgagccacgcaatccaatggcgacatatcctaatgtccaaactcccactggcataggagtggacaaccccaatgcgcgactgtaacctcggggaatttcgcttgtaatccctgctgttgtggaaattatgtacgcaagtatacgcagtcaaacaagtaatagaggataaataagatcgtctctacaaggatttcaaacaaaatatgatgtaaaactaactaattacaacttaaagaaaaagaaaaaaaaatatcagaatggttgagcaatgcttcaaaattaaaataactataattaaacttgttaaaattaatgctactgttgctagaaaattgcttgcaaaaaatgtaatatgataaaaagtggcttgaataactaatccccctagtcaggtttttttcccaattgttacagcatcagttcagcatttctcaaacatttttgcacaaagattacaaaaattcttctaggcttatgagaattttccaaaactcacaaattaaggtctaccatttagctcaatatatccctatatcaaaccagtacacataacactatttaaacatcaattcttaagttatgcaaggtaaaggaaatattttttttccacttacaaagaaaaacctagatctagggtttctcttgctccatccaagtttaattactagatctagcccttccgaaacaagatctagcttaacaaattgttactcatggccaagaaataacaatcaaataaaatgacaagctcacttgaatgaacaaaagcaaagatgctaaaataagcttaaaaattaatcatacctaatataggagttcatggccattcaagcctcaaaaagtttagctcaaattcaatcaaaaaaagaaatccaaactaaaaagtatctctccatggctgctaccctttgtttacaattcaacaagtttttaatatctaaataaaagaaacaagaaaagaaaagaagaaagaaaaataataagggaatgtaaaagaaaatcaaacacaaaaacttgtgtccttctctctttccttcctcttctgtactttgcttctgcaattaattctttttcagaaatagcagctacatcatgttgaagaagaaggtgtacttagtcttctttcttttagttgttgggtaaatagggtacaaaataataccctaaaaatagaagctcagtccttttccaccttggcccacaaggtttagtcttcttcctccacaacagccagctagcttaattttgagtaattgacacactcatgttgatgtggacaaccaaaattcgttcttccaactctctcctcgtcactgcccagaatgttgaattcgttgtagcattgcttcagtaatttagcctaattttagcttttgttcccacttcgtccttgactcctttcctttttcctaacaatttaattcttctttttcaacaaccaacaaacacatttaattaaataaacacaactaaaaataacaatttttacaagacttcaaagataacttactatttagaaaatagagttatcacctgccaatatcaaccccaaagcaattggggttacaacctccctcgctggaattatgctcgatgtcctagagactggatacaccagctaggcctatgctggagaaactagaccaggcatcggacaaccttctgtgggagaaccccaagttgatttggaggaaaatgttgatctggagaccctgagagaagtggtgggacaagtctaaactcacacaccatagttagaaagaaacatgctctatagtgaaccatgtgttagaacaacagaagcgtcaattctaagagtggatggataaacaggttgaatccatgtgtgccagcatgaagaaatcaaccatcgatcaagggaagctaccaacttaattagatagttccaccaacagactgagggcaattactagaaaacacaccgtttagaagagacccaaattgagggaaggagccttacatcccctttggacgacaagagtacaacctagaggagcgcccaactaattatgtgcaaaaaacccgccatgacaaacattctgattcaatggccccaaaatcaaactggtggcaacctgatagatgatcaagctctaccaagtcactacctttgaagagaagatcaccataatttttgtccctagcctgaagggaggatggacgatgcacttacccgcccatgtgcgggatttaggggacatgt

SEQ ID NO: 23935 - DNA, 2838 bp, Cannabis sativa
ttccaacacctttcccaccacgattgttggggccaccatagggatctctagaggaattgtatgagtcttgagtttgctgaccattatagacaggtggattggcagtgtatcctcttctgttgtgttgaaaacctccacgaccattatgtgctagattgacttctagagaggatatgtcaagatccttaacagctttgtcaatccttgtttgttgaaccataagaagagcctccagatcaacaatagtgagcttctccttgtgcattttataggaagtgtagaagatgtcatattcggatccaagaccattaaaaatggcttcgacatgatctgcagtggtaacattatggcctatggctttcaatagatcaacaatagatttgatctttaacaagtaatcactaatataggaggaatttttctaagtgttacaaagttgagtcttaaattaacttatctttgaattagtttgagcagtgaagaattcttgaggcgcgatccaagcttcagcagaagtttcatgcccaatcatgcgtgtattcatctgatcattcatggaggataacatccatgacaacaagagctgatcttgtgcttcccagtcgatatagtcttgtgagactctatttgtagctcgatcttcgagtgtatcgtactcagggggagcagaatttggtttgaagaatctttgtaatcgatggccacgaacgacgatgagaatttgatgtttcaaagataagaaattattttcattgagtttggatgagagagatagcttgaaggagattggttctctgtaaagagagtctctcttggctgaggacgaagcatccatgaaagaacaaagcaagaaggagaaggaagaagacgaagaaaaacaagaacagtttagagagctttaagctctgataccgtgttaagataatagacgaatgattaaaatgaatttgtattattgatttccaaggcaaggtacggagtataaatacacaagtagagacaaagctaaaagcaactaacaactagaaaaatagaaataactaactgtacaaataacaaaaaaaactattacaactaattgttctcaacaacatcaacttatttatatatattctatactataaaacatatatatatatatatatgaagaattaagtcataattagactatgtaaatattgcggaaagaaacagagagattgaaaaaaaaattatgtatgataaaaatagaattaattgattagaaagtatgcaaaggcacttatttatacaaaaagacttcaccgactaagatcataaaagttgaaccaacaaatataacaaacataccaatcataatggcaacacaactaacgaaagaaaatttaaaagaggctaattaaaatctattattcttctccctcaagatggattatagatattatattcagacattttgtgaatataagaagtatagttgaaagtaatgactaggtaaatgtatcaacactacaacaaattttattattactggtggaattaataccggcagaagcaaaccgccaatattaatgagggtattactgacggaataggtcatctgccagtaatagtttttaaaaataaaataaaaatattaataccggtggattggtattaatatcgacgaaaattctgcccttaaaattaagagcgggaatttaaccgcccaaaatttcaaaaaattaataccagcgaattattagaggcgggatttgtcggtattaattaagaattctgattgttttattattatccggaggaacctcaattaataccggcggggcccgccgataatatttatctataaaagcacaaacccaaactcagaaaaacatttttttctttttcagtttccctttgatcctctcctcctctgcccctttctcttctccttctccacctccgcccattttaccattgttaaccaacattgcaccaccatcaactaccattctaccatcattttatttgataggtaatattttttttactataatatttttgccattatttttgtcttctctattctgtttttttttttttgtaattatttatttttcgtccttgctttaagtattgggtgcgatacatcgcctgagacactaacgggaaccgaaaacgatggaagagaaaccaaaatttctaccaaaaattaagaagttggttttttttttattaattttatttttctcttattaaatgtttagtaattagtatattaatttatatatatatgtgtgtatggttaatagtgtatattataagtgtatgattttgtttatatatattatatgtatatatatatgtgttgtatatttatatataatacatacataatatatatacatataatattgtttaaaaaatttaaggggtgtaaatctgtaaaagtttagatttcaatttattatttgtaataaatatattatgcaataataaatgtaatttatagggttatattatttaattttgttaaaaaatgttatgcaattaatttcttaaaaaaattacaatttttgaataggtacaaaattataaatttgttaaataattgattatgtaattatttatttattaataaaagttaattataatcaaaatattgtttaacaataattatataaatgtaaatatatatgtaaattatttttaataaaaataaaaaaaatattttcatgtaaggaattaaataatattttagatttagaatctaaattacaatttttttaataataaagatttaacataaaaaattataaataataattacttaaaaattaaatataaaaaataaatttaattaattaataatataat

SEQ ID NO: 23936 - DNA, 4359 bp, Cannabis sativa
cattttaagaagaagctcacaacccataaacctcattcccttcctctagtttttgctgcacaaaccaatttcttcaaaggttagatttttgactttttttattctgtaaacagacatacttggtaatgttagttatatttctgggttttctgtattttttttttttcactacttattttgataaaagggtaatgagcaattggacttgacttactgtatttcaatttatacgtgataggtttcatgtatcaaagttaaagttttgattcatgttaaatctttgttggtcaagttcttttgcaaattatttagcttttcagcattgcaattagtcttttttttcttgctggtcctgctaatgacactaattaaagttcagcataaaagggtagtgggcaattggacttgacttactgtatttcaatttatattgcattttatgtaccaaagtttaggttttgattcatgttaaatctttattggtcaagttcttatgcaaattatctagcttttcagcattgcaattagtcttctgctaatgacactaattaaagttcagcattatggttacttttctagctaactactactactactatgtcaaatcatgtgattagttattcaaacggcatggaaggttgcaagtgatggagttgaggctggaaccaatatggtaccggtgagtgttagatttccatttttgtagctctgttgatcttcaaacttgcttctctttatctcattttcagtacatagtttaataataacattttcaagttctgtaaatttcattaggcttcagtaccaagaccggtagcaaaggtatctgtggcaatagttggcttgaccgtttcgctctttgttatcaagtctttcttgtccacagctttctttgtgctggtatgtagctaattctttaacccctctaagagagttttttgtattgatattttttttatcattattatttcgagttatgctgctgcttctgtgtaaatttgcaagtttatttgattagtgtgaactgatatttggtgaacaaaaaatggtaataggattagataatgcttttcggtgaagttattgaccatctaagttgggaaagatttagttttaaaagaggagaatataagaaatagctcaagtaagtttattcattcaaagaactttaagttaatcaaagtttcaagcagctttcattatgcaagcttatgtttctttaatttagaattcaaattgttctgattgctagaacgtttttcttcatcatcggttgctcggttataaggtcaaattcatggatttattctgccaattatcgtctcagaatccttcaagacatgctacttcatgtagcatttctagtaggagtaatctttctgagaatttaagttgagaagaaccttttagcttttagactgacaatatgttaagcctcttcgaatcttatccaacttttatttttcaccatatgagtagctttttcttgtcctggttttcaagaaaatgtaaaaccatcatagtaaaatgcagcctttcttatgcactaatctttgttttggtgaagatcttatgagaagtgttaaaaaataagaatttcagaactgtttctttattatttatttttctaatggtgttaaatattgcatgattacaggccactatgggacttgtatactttacattcatagctttgtataaagatgaaggaccaaaaggaaatgatgataacatgacaactactaaagacactcctacatctactgaagactctctagaagaagctagaagtatcatggaaaagtacaagtagccattttcaagggacagggaaaatccagttcttgctcattcatattcaaaggatgaccaactagaaataattgtcataatatatataggttgcttctttaattgatctagtcacatcttcagtttctgtacagctttataagtttaaagacaggcttagcttttgccaacaatctcaatgtgcaaaaagagccttgttagaatatttattttctttgttgttatgttaacacaagccaaaaatcatgccttggaattgagcttttattttcatttcaagttaaacaagaggcttcttattacatgttttttctaggcaagaaaataatacacacaaaactcataatttatttgttaaaatttcgatttactcttccatgttaatgatacacctcagtccttctccctttaacatgtactcaaaagccttattgatctctgagaaaggtaattgatgggttatgaacttctccaattgcagtttctgtaagaccaaaaagtaaaatttcccttgagttattcatccatggcattccattttttcataaacaaaatctcttaatttaagctataccttgctcatgtacatatcgacaaccgagggaaggtcggttcggggcttgtaattcccaaagaaagttcctttaagtgtcctttcattgagaacattaataggtttggtcatgaacacagcatccttgttgggcactcccacaagcacagccactccccatccctaaacgaaaaatcagtgttagagctatgccctccctcccaaataatcgagagtctacaaaggctgctgcgatcaaccacgaagagtcacatggctcgggattcagaaaaaaacttacatcatgaacacattcaaaagcagagatcatagcattaatgttgccggtacactctatgctcctatcaacaccaccatgagttatttctgcaattacctgtggattttcccaccaaattgatgctatgtaaaggcaaagccatgcttgaaaaacacataaaagagtttgcatacactattttgtacctcttgtactggtctgtcatggtcttttgggttcacaaactcgtttataccaaattttctagctgagatgacataaacaaagaagcatgagccaaaatcaagcttcttattgtcttaacaagacaacaattaagataataaacaaaagattattataccttcttcaaaccttgaagggttcaaatcaatccctataatccttgatgccccagcaattcttgctccctcagcagcctatatacaaattttcattagcttcaataaacaaattaagactaaaaagacaacattaaaaccaagcatacagccaagccaactgctccaagtccaaacactgcaactgtggatcctttcttcggttttgccacattcaaagttgcacccaatccttcaaaaaatcaaaaccatgtatcaacattacatacactattatacatggatatttgcagcataattacccaatattttgaatttattaccaaaagagactcattgatctttccaactcgaaactaattggcaataagaagagtagttcatgtatcttatgcatggtatttagcttccacacattgtcaatgtggaactctctaacaaaacatttattaatcttgtccttacacttgtccagacaaactcacaaacgaaacatgttgggacaaaattggacggtattacacttttactaatattaggtggttttgacaccaaaaactaactaaaactttaggtaattacgccacagatatctttaataacaatagtaaaaaatataaatctaaagtgagagaacatgcaaacctgtggagatgccacaactgagaatacaaactttgtccaaaggtgccaaagggttgatcttggctagacaaccagcatgaacaacagtgtattcactaaaagttgatgtgcctagaaaatgacttataggagttccattaatggaaaatcttgattttccatcactaagcataactcctctatctgtattgattctaagaagatcacacatattgctttcctcagatttgcagtgcccacattccccacattctcctgtgaacactggaagcacatgatctccttccttcaagtccctaaccccttccccaacactctccacaattctgtatataaccatacatacacataattatataaacaacttcaaaacaacttaatcatcgaataagtaacatacccagatgcttcatgaccaaatatgcgaggaaacaatggtgtttggccctacaaataccaaaataacaaaagaaaatcaacaatatttgcaccataattgtgtatttttattttctacttttacttattacaaatacgaaaataagcacaaaaataggattcaattatcaactgtttattcgaaattcagaagatgtaattactgttagaataaatggtagagaattgagccatatataagaatatgggctactttactcattctcaattgattttaagatagaaccatgattctcaacatggtatca

SEQ ID NO: 23937 - DNA, 4775 bp, Cannabis sativa
  modified_base (4691)..(4739): a, c, t, g, unknown or other
ttctttatgtttatgttgaaaattatacatagaattagaaatgtttatatgaataatatcattttttttttattatgattttgctttaaagaaacatagactagctttatggcacttcgctttttctaagcgaaatacatataattaaatactttaaagaccaaatgcgtaatgttatggaaagactgtattagattaaaaatgcaaagtgtatactgtattaaaataatgatggaaattttattttggtgtcaaattaagcacaatgtttaacataacacattattagagtttgttatatattacaatgcataagaaatttgactctttattagaatttcttttaaaaatctaacctcttgtgacaaaaatattctttagatttacatgctatttttttaaaaataatttccatatttttcaacaatcatgaatttagccctactaaagttttttacattttggccccacccaaacaaattcttcctctgtccctgcttgtaatattcttcactcgaagatatccattggccggcaaccacattctctagccactcattgggtaatccacactcctagtcctagccccattgttgtgtctaaagttgtacattcgagccgcctggcccgactgatttttttcttttatatgtttaaaggtcatgttcagatcggcccataaacacaaattatttgaagataagttgagaaatatttcttttttgtatctattaacaaaaataccctcgtattatatttcattaaaatatatcctttttttttgagtgaatttcttaatatagtctcactttcaatttaagtctagcacatattttacattaacctaaagggtataatggaaatatcatctataaaggtgggtacatcttaaagaatatgaaaatgaaggtaaaaattaaaataaataaagtaaaataggtatacaatgtaatttcttcaattattgtgccatgtcaagcataaatgggctagcccgttttataatgggctgatccattttattatatgggtcatttatggcttatgaagaaatatatatattttataatttccaattcaatttttagttgtaagagataaataaattgttccaaatcaattattaaaataataataattacatatttaataactaaaatgatgtgaacattattgtagtgtaataataactctagcaagatcaaacatacaaaaatacagaaaaacacataacaaatcaagaaattaagtaaccaaaccaatgaatcaaaactgtaaaaggatgaattcaccaaaaaatattcgactggataataaacattgaaggagctttattactgatcttttattacaataattagagaatacaaaaaattgaacttagatgcaaacttataagaattacaaccaaaatctcacatgaaggagaccatttctagaatggacactccctttaacatccctccaaacacaacatttacactctatttttcttgtttagatcctccaattctctctcagtaaaatactcatcaaaactaaaaccttaactaacatgtattggtgataagctatttatagatgatagctttagtacagttgtgtaggttgtgttagttaagtttgttggtgaatgtggcagcagctaataggtcctatagtgtcttaattataacaatgtccaccttaattgagacactagaggaattgatgatcaaacttcttcaatgttgagcaaggttaggcagtgcctaaacttgtccaaggtaacacaattagtgagcatgtctgcagggttgtgatcagtgtttatcttccttacctgaacctggttgctagtgattgtgtctctgataaaatgcagtcttatatttatgtgtttagacctctcataatgcataggatttttcatgagatgaagggcactttggttgtcacaatgcacaattatgtctttagagtttagtccaagttcactagtgatcccttcaaccatagagcttctttaatggtttcagtagcatccatatattcagcttctgttgaagataaagctacaaccttctgcagtgttgatttccaactgacacaaccacctaacactgtgaacacaaaaccagtgagtgaccttcttgtgtctatgcaacctgcatagtcagagtctacacatccaatagcaacttctttggtgaatgactcttttccaaacattattcccatgtctagagtgcccttgatgtaccttaggatccatttgaggtcagatcaatgttgttgtccaaaatctgtcaaaaatctgctacccatgctcattgcacacccaatgtcaggtttggtgtagaccatggcatacatcaagctgccaaaaacattagcatatggcatgcagaccatatcaaacctttctttctctgttttaggagattgatccttagaaagtctgaaatggtgagctaggggtgttgaaactggtttggcatctccattccaaacttggttaacaccttctttaggtatcccttctggaatagaaaaattgtgtgaggtttgtttcttttgatattaatgcctaagatcttcttgactaaacttagatctttcatttcgaattcaacattaagtttttcttttattttatctatcttagatctatttttaccaattagcaatcatctacatccaataacagatagatatgctaattaaaggtaaacacaagggtcatacctgctgtgacagaatccaacggtcttcatgaactcatcaaatcttaggtttcattgcctaggggcctgttttaaacaatagagaaatttgagtagtaggcatacttgattaggatttccattgtcaaatccttctggttgatgtcatgtagatcttctcatcaagttttccatgtaagatcatattttgatgtcttagccatcatgactcttatggatttttgtttaacaacatgggaaaatatttctgtgacatcaatcccttccttttgtgtaaagcctttagcaacaagcctggctttgtatctgacgtctcctttgcgagtttcatcttctttttgcctgaacaaccatttgcaccctacaagtttctgaccttctggtttgttataaccacaatccatgttttatttttcttcaaggatagcatctcatcatgaatggcttggttccatttcttgctatctttacatgtgattgcttcttgaaaggtttcaagttcagagttatctaacttttctgctgctgcaagagcaaaagctgtgaagtcagcaaaaccaaatctgacaggggctttgtgaacccttttccctatatctctagtgagctaataaccatcagcatcagcatcagtattagcttctacatatgtaggctcttcaacttgagcctgatcagtaccatgctcatcttgtgtctgatctgtagtatttagatccacctcaaacccaactggtttgatactagagcttccttctagtttgtttctgtctttgacttcatggtcatttcttcttctctaaagataacatctctgcttaacagacatttcttggaacctggttccaaacactaaggcttgtagccatccacaccctctagatagccaaggaataggcacttcaatgccctaggttggactttgtcttgcttaatatgggcatatgcagtgcatccaaacaccctaaggtgttcataacttggtggatgccctatccatttttcttgtggggtcttgaattcaatagctgcagttggacatctgttgaaaagatagctagctattttaacaacttctccctagaatggtttctcaagatctgcactgtggagcatgcctctgaccttctcagtaagtgtcctattcattctttcagctaatctattttgttgtggattcttgagccctttctgcaaaactcaatgaactgattagagcaaaactcaagaccattgtctgtcctgagtttctttaccctctttctagtttgattctcaacaagccttttctaggtgataaatgtattgaatgcatgatctttagatttaagaagaaatacccagaccttccttgagaaatcatttatgatgctaagaaagtaactggcaccaccaagtgttttaatcgttgatggtccccataattctaagtgtatgtaattcaaaggctccttgctggtgtgcataccagtggtgaattttaccttgcaacacttaccatagacacagtcctcacaaaacctcaactccccatccaattttccctttagcaaaccttgtctttccaattcttgtagccccctctcactcacatgtccaagtttgaggtgccacaatctggtcttgtctatatctataaatgttattgcaggtgctgcattccacataacagtctttccaataaaagaaataaatcattcttcaattctcatttcatcacagctgtggaatcctttgagatcacaagaattccaccttccaccttaatggtacagtcaatgatgtccaacatacctattgacaataaatttcttttcaaatcagggacatatttgacattcttaagtgtcctagatatgtcatcaaacatagtgatgataactgaaccaataccaagaacacgatatgccttgttgtttcccaatagaatagtactgcctgagatctgttggaatttattttacnnnnnnnnnnnnnnnnnnnnnnnnnnnnnnnnnnnnnnnnnnnnnnnnnaactttctaaaacgattaaataaacacatataaagt

SEQ ID NO: 23938 - DNA, 6443 bp, Cannabis sativa
gattggattggatcggatacttagtgaacacccctaagttaaaccaaacctttcacaaactacacaaaactctcaccaaaacaccctccaatagaagattaaacaacttagaaactgtggttaataatctcttttctatttatttacaaatcagtatgggtaaatacactgcaaaccatccatcatagtagacagtagcagctagcagagcattgacaacaccagctagtaaacttgttattcggtttgacatccaagcttttaagctcaaaaagttcaaaggccaagctatgaatcccaaccaactaaaaattcgactcacctcgctgagagaaggcagtcaaaaaataagagtgtttgtggctctcctctggccatgcacaagtaggacactacacagtttcaactttcaagaggcaagttgaatttgcaaagttacaaaaggcaagttgaatctgcaaagttacataggcacacatggacccaaaaccctgcaaacaatgacccacacgaacccaaatccctacaaacatcaattgatgtggccccaaaccatcacgaacctagatccctgcgaatctaaaccatcgaccatcgagaacccaaatcctcgcgaatccaaatcatcaataactagaccttcacaaacttagacccccagattttgcttcaagtgcttactcatttcttctaagctcattcaatatctcatatttggagatttcatggtttgtgtgccaaatttggtgtggagctttgaatttacttttgttattttgttttttttttttaattaaaactcactatggagtttagggttgggatggcgaggacatgtgttagattaatcaataataaaattacattgtatacccactttactttacttattttaatttttacctttatttctatattctttaagatatacccacttttatagatgatgtcctcattatacccattagattaatataaattatgtgctagacttaagtggagagtaaggatatattgggcaatctactcacaaaagtgggtacttttttatgaaatataatatgagggtatttttttattaatgaatgcaaaaagagatattcctcaacttatcccttaatcaatgattaagtggtctataagggctcatctggtatgtcatattgtattgtattagtattattaaatataataatatgtttggtattgacttgtattaatatattgtgtaaagttatatattttcaataaactcaacccaaacacctattacgagtccgggtcccgggtccctgtcatgagtctaggtcccgggatccgggtccaggtctaggtcccgggtcgggtcttaggtgctgggtccaggtgccgggtccggtcccgagtctgttcccttgtttgggtctaggtcttggggccaggtccggatatcgagtcaaagattggggttgacccaggatcctttgtaaatattataatacaagctaacacagaccaattgttatgtattacataatacaacttacactgtattaaaaattttggtcgtaataatttatacattactttattcaagcatagtattatttattatttaatacaatacaacccttatacaacctaccaaacgagccctaagtgtataaaatcgaaaacattaagtatttatgctgtaaataattctaagaaaaatatggggaaataatttagggtaattaattatctttttatgctgtaaagagaaacacttatcactcttcaacaaggtgatgattccgttagttcatacttttcaaaacttgaatgtatgtgggatgaaattcaggaattaagaccacagattccttgtacttgtgctgcctctgttgataatttggctttcctaaattaagaacaggttctccaatttctcacagggttaaatgaatcttattttcctgttcgagcacaaatccttcttattgatttgtttccatctttgtccaaaattttctccatggttgtccatgaagaaagacaaagaaaactcaaaaatcctcaactcccacttctggcttctatccaagattccaatcaacaacttgctgttcttgctcagaatccatcagcttctgcaatatctaccgatcctcgtcccaataaaaagataaggccctattgctctaattgtcacaaaccaggtcatttaaaggaaaaatgctacttcttgattggctttcccctggttatggagacaagaagaaaactgaccaaccttcagtccataatgcctctacttctgtcgatcaatatggtgttcttgccaatcttacaaacaaaaagatatccaggccatcatttctctcctaacacagaagttgcagccaactcctactgctacatatgcatctaaacccttcgcatctcatatctctggtaaatattctaataaccacttatggattgttgatagtggtgcttcacaccacatatgttgtgatttttctctcttttctaatgtgcataagaataatatagccaatactattactcttccaaatggttccactattagagtacataactcatgtgacatccaactttcaaaggatcttttcatattcaatgtactctatgctcctaccttccaatttaatctttttagtatttctagcttcttcactaatatctctaacagtattcttttcaacactaattcttgcatattatagggtacacagaacaagaggattgggactgctaaacggattgacaacttatacttcttaatgcagtctgtcaattctcccagatcttcattttcttgtaatcaatacaataactcttgtaacagtgtccattcacgacactctagaattggacaccctttcatgtccataacgaaattgcttaataaataattacattttgaacatgttgatgtttccccatgttctatatgtcatttagctaaacaaagaagattaccctttcattctcaaaataacattgctaaatcttgttttgatttaatttatcttgacatatgggtccattccatgttcaaagcattgaaggttatagatattttttaactattgtggatgaccacaacagacatacttgggtttacatgttacaatcaaaatctaatgtgcaacatttaattccacagctctataaccatgccttcactcaattctctaaaaacataaaatctatcaggtgtgataatgcaaaggaacttaatatcaaatccttttatgttcaaaaaggcattcaagtgtataattcatgtgttgagagaccttaacaaaattcatttgttgagagaaaacatcaacacattttaaatgtggcccgagctttggcttttcaatcatctatagccttggcatattggccacatctgatacacaatgctaattatttgataaatcacacacctacccccttgttacaacatttaacaccctaccaattgctgcataataaatcaccagcatatggccatttaaggaattttggcttcctagcttatgcttcatccatagcaagcactagccacaaattctctccccgagcacacgcatgcatattcattggttatcccaatggcatgaaagcatacacacttctcgactttgccaccaataaaatttttcactctcgagatgttgtgttctatgagcagatttttcctttaaaagggtctctcaacactaagcttttggatctattacgtcctgctcaatgcaacaaaactccaacacaatctgtcaccacttccacatctgtatcaaaccctgttgatcctatacatcaaccatcattagcacctgctgtacctacaccaggaaaagcatctgttgaattcacaccagcaactgcatctgctgatttattaccaatataggcatctgctgatttcacaccagcacctgcctatgctgatccaataccagcaaatgcacctgctgttaatccaccaacacaagcccctgatgcaccttctaaagtactacaacaccattcaatcaccaaagcaggtcgaataacatctacacctgctcatctaaaagactacatttgtcagtcttcaactgatcatcccttggttagatacctcagttatgatagattgaatgttgcatttagaaatgccatattgcatgcatatactgagttcaaacctagtactttcaaataggcatctaaattcattcaatggtttaaagccatggcaagaaaaataaaacctggtctgttgtttcattaccaccaggtagccaaccaattggtaacaaatgggtctataaaataaagtataatgaacaaggtgaagttgaaagatacaaggcacgcctagttgctaaaagatattcacaacaatagggcattgattacactaaaacctttgccccttttgtaaaattcaatacccttaaacttttcttagctttgactgccatcaacaactggacacttcatcaaatggacatagataatgcctttttatatggggaccttcataaaaaagtctacatgacacttcccaaaggttatgttcatgagggggagctgcctcccaaccctgtttgtctcttacataagagcctttatggccttaagcaagcttcttggcagtgatttgccaaaataagcaataccttgattgagcatggttttcaccaatctgcttatgatcattctatattcataaaaaaaaaaaaaaactaacaccagcctccttgccttgttagtctatgtcgatggcatagtcagtgcaagcacaaatgattcagaggcaacaaattttaaagcctttctcaactttcattttcagctaaaagaccttggccatttgaggttctttcttggtctcaaaatatctagatccatagcagggatctctgtttctcgaagacctttcactctgcaactcctcaatgaaacaggcttcctcggctcaaaggctgtctccacaccaatggatgacaatctctttcttagtaaagatgttggtcatcctgtcaacgatgccactttctatcgcagcctcattgaaaagcttttgtttttaaccatcacacgtcctgatattgcttatgccgtcaatagactaagccagtacataagttaccctcgacaaccacatctcaaagccgcttattgaattgtccaatatctcaaaggcactcctggccagggactaatgtttcactccaacatcttgccttaacttcctgcagatcgactattccacctccaagccttttcggatgaagattggggtacctgccctgatacacgacggtccatcactagtttctgcatatttctaggccactctcatttcaatccactatttccaagtcatctgctgaagctgaataccggtcccttacaaacacaacttgtgaaattctctggcttcacaacatcgtaactgactttggcatctcttcatcacaaccaacaaaaattcactgtgacaatcaagttgcaatacatatctctgagaatgcagtcctccatgagcgcaccaaacacgttgacatcgactgtcatatagttcgagaacaaatcaacaaaaaacaaaatcaaactatcctatgtcccttcttggcataacattgcatatgtcatgaccaaggctctcttctccactcaattcaagtctttgttgtccaagatgagtgtctccaacctttatactccatcttgagggggagtcttagacgtagtcgtttattggttgttattagttaagccttgttagttagttacattcataactgtttcggttatgttctgttattttacaacatcttattttcctcttgtataaatactgacttttcattaataaagattaaagattctactttcactaatagttattggagcagctccaacacatgaaatatgtgggttgcttatatcaagtggtaattactttaaagaatagctattatattggagaaattttagtggacatactattactatacattagcaatggtaatattcctaattttttcaattttaaaaaaattaaaattaaaattgaaataaaaaaagtaagaatttaaaataaaatatattaaaaaatagtgtgttggatcttaaagtggtttagtattgaattattttttgtgaataagatttaaaaaaaaaaattatattttaagatgttctataataatattaactattatttgcattggaaatgctattagggacccgtactaacgtttaagaaagaaatggacaacactcttgattaagccaagtaattgtctcatagaagcaaacaaaaataattctaagaataggaattggttcttctacgtcattctttcttgtaagaatggataaatgctgaagagttattctttatcatatatctttttctttcctatatcaatttatgtagggtccaaattaataattcatcaatt

SEQ ID NO: 23939 - DNA, 3062 bp, Cannabis sativa
cataaacttactgttatatttctatgtcaatatcacttagttaaccttaagttaattgatcccaaccctgagatgattaagctttagcttaattgtactatactggttctttaacttgtttgttaccagcttatccaaaggactaacccatacttaaatcttgggaactcgatagtaaattgagtggcaacgttaatcatagatgtgagaaatgtataacatctataactatttagaagtgaaatgttggtttccttaaaactttactaaatgatataaatggaagagctcttattccagtatttatattagtttattgaaatatcatttataagcagctaagtgttttaagaaaaaaatacattaaagggtaaaatagtaaatttattcctactcaatgtaaactgtctataaaggatcattgaatatttagattgaaacaatgaataattcatagcgtatcaatattattaaattaaaagtgcaattccaaatctatagtggagtcagaaagaattaattagttaagaaatttcagatctgcttattgggagcttgatttcataggtccgttgtccccacattatttgagataatcgtgctttgtagactcaattaattgatttaatatcttaattagaattcaaaaataaaatatatcttatttcaaaattttcactaagtttggagaaatttgagaagaaaagaaataatagtttatttattaattaagacactttgcgggtctaattaatgcatatatttaaattgtatttctctttaataattatttgtaattattaaataaaaattgatatttaaataattagatgacatacatggtaaaattggaaaagacttatttgcttcattaaataaaataaagtggtaaaaatcaaatccatgtgtcattctatatgaattttagccatggctttgtcttaggcccaattatctttattttagctcatctcatataatctaaccttagtgtgttggctatataaagaaagagatgagagttttatcattaacctaatttctctgtcggattcaaagtgaattgacatgaaaaagctctcattttctcttcctcattttcaaaaattccataccctttcctctatctcaaattgttccattagtgagttgagtacaagcccacactattcaaggtggtactcaaacatgcttgttagtaaattaaagtcttgataaaataagttcaaaaaacttgcctcacagctatggtaataatttactttcatctcaaatatgaattcatacgatttttttttaatgtgatttagatggtttcatattgagtgtatgtgatttgatgaattttaagtgaaattacatgtatttctatgaaaaataatttaattttagatattcagtgattaaatttattttaaaaataaagttcgttgaatttaagcatgtactgatttcacaaaatttaaaattggacccaaaaacttattttttgggttgctgggcggtttgtgtccacatttaggggtgcaaagctgaatattcttggcatgggctgcctctccgcgtgcgcaagagcctttgtggctcgtctttccagtgcgcgtcacttggacggtggtcgaggtttctcggccttaggttggtgtcccgtgcgcatgatttttgggcattaaggcccttctcgtgcgcttccaaagactgttcaacagttagttttgggcacatcaccattttggttattttttttttaattaaagtaattactagaaaattccaaaaatttgtggtgaattatatttttcaattttgaacctaaatgtcatttcaaaattaataatattgaattttttaataaattattattaatttgaatattaaaaggtttaaaattgaattttatgttttttagattattggatattgattaatttattaattttatttaccatttaatatataaaatttgatgttataatattagatatattttaattaattggtaattttatcttttatttaattaaaatatcatattttaattatcagatgctaattaaatagtaataaaatttaaaattagtctagatattttatagatatatcaaccataatagttcaaatttaaaatttgaatttttaatattattttttttttgtttgaatgataagttatacatgatattataaatatcttaattataatatcttaaccataaatattcaatttttaaatttagtttattttattaatttatttttaataaattacaagattagaaaaaggtattagaaatatctccttttagtaaatctttatgtaaagaccgcttaatattaatttagaattagtgaataattagggcttaagtatgaaactagattattaattatgatttatgattttatggagatttatttaaattcaggatgtaccatttatgccatatataaaaatttacatttttgtatttttgtgcccaacaatattggaacgcgacatttggccaatagaatcacattttagtatttttttagtagcggagcgaattagataaacgttgagaatatcgagaatattcaagattttagaaatgacaaaattacctctaggtagtaaggtttccttttagcttacgtaagggcaaaatggtattttcggcaatttgggttttgtcttttagtgagtttacttatgttttataatctgattttctaaaattaattaagttggatatacactagattttttcattcaaccaaaattaaaaaaataccgaaaaattcaacactttctctctccttctctctctttctctcgacctcacttgaaaccagcagaaactagggtttcatcagcttgattcggaggattttagctagttcttggtgaatccaattgaaataaaaacccttagcactatttcctttggttttcttatgttcatagttgagtttatgcatgtttttcttaagttggggttctgtgactgtaagtagtgtttgtaattgtattttgaagttaaattaaggataattaggttgatttgagctaggtttgtggg

SEQ ID NO: 23940 - DNA, 3437 bp, Cannabis sativa
  modified_base (3346)..(3350): a, c, t, g, unknown or other
ttttctgcagatgccctgctgcaaagcttcccgagtgcgcataatcgctttccacaagatagtgtcggaggtctttgcctctatttccaggaagttttgatttttaccatacttatcattcataagttgcctccataggcattcatcttcagtaagaaatttccacgcccacttcatgagaaaagccttgttcatagtctcagtactacgaaaccccagtccccccacagtcttcggtttacagaggcgttcccaggcgatggtatggagcttccgtttctcctcagtatctccccaccaaaaatccctcagaagtttgtcaattttattggctgttgatgtaggaataacatccgaagaagcaacatagttcgataagctcgagccaacagacttgatcagacacatcttcccggcgcttgacaagagtttaactttccatccctgaatctgctggataaccctatccacaaggtgttgagtgtcttctgatctcttagttgatctaaacagagggaggcctagataagaagcctttctattcattctcttcatacccagtgtttgcgcaatagcttgagcctttctacccgacactcctcttgagaagaagacggatgattttgggaagctaattgattggccagaacattgacaataggagttttggcaatcaagtagcgtccttgcttcccggactgaagcctcaccaaaaagaataatatcatctgcgaacatcaggtgcgttatcggggtgccattacgacccaatttgaaacctttgagcaggccttggttctctttactgaggaggaggcgtaatagagtttcagcagcgacaatgtatagggagggagacaacgggtcaccttgtctaagccccctctccggcgaaaactttcccaccaagaagcagcttgatttcggcaaccgagatacatgtctcaatccatttagtaaaagggtggataaagccaatttggtgtaaaactgaaataacaaactctcaatccaatttatcgtaagccttctccaagtccaatttgataagcatatacccacgcttgcctctcttcttacccattgaatgaactatttctcttgcgatcatagtattttaatcgatatgtcttcccttcacaaaggcagcttaattaggggatacaatttttgggagaaggtatctcatccttgatgcgatgatcttagatattatcttgtaggctacattgcataaggcaattgggcgataatcattgactattgatggagactcctttttcggaagtaggactaaagaagtatcatttatgaacttaggaagttctaggtgtgtgaagaaatgcatgaccatctcaataaggtcgtctttgacagtgtcccaatggtggagataaaagcttggcgggagtccatcaggacccggagccttgtccttcctcatactctttatggctgcaatgacctcatcctccatcggtattgcattaaggagagcattatcttgatcagagatgattttatcaaataagccgtcagccagaagagtcaggccatgtatgtttttgctaaatacatatagtcttagttacttataaatttttttttaataaatttaaaatataatatatacggacaaaattgaagaaaaaatataattttaaaaatatattaaatagttatgctactgttaaaaatcattaaatttatccacgtacaaattcaattaaaactttgggtatatatatatactacaatttactcttactattaataatcgagttattcttgactgatgggctattttgttggccgttacaatttcttttaaaattataaaaatatctatatatagttttctattatagttcttcttctttcttctaaggaattttcattttgtgttccaatttccaatttttcttcatatatatacatatatagttatataataagggcattgattatatttatacatatatatatattaaaatagataatgatcattaatatgaaagagagaaaaaactatatattatgagtttatataattattattaataataaagctcatcatcacacgcaaacgaagactgtttactttattacacaatatcatatgcatgcaccaccaaaccacaagcttcatctctatatatcatcaataactgaaaaaagaaaagatcatgagattagttagaacacacaaatctatactttgaacatatgtatatattacatatataagatatttgttttttttttttttaaattcttatgtaaatttgttagtagggaaaatttttatatagtaattttgtttcctatatacaaatttttgagcgaaaaaaattctaatgtagtaattttgttgcaatgttagtccatttttcgttagcattaatttacatgaactaaatgttgcagcaaatgtgtaaatgttgagataaggatttttgccacaaaaaaaattagggaattaaattattttatatactattttttaatttttttttttttacatttacaatttaagttgctttggtgatgtcttaggtagtttctatgtgaattgttatatgaatttcggttgtttcattaattgctagaggatttttatgtgaaattccgtaaaaatacaaaaaataactattataaagtataaaaatgaaaaaacctccgaaatttatagaagaatttattaagtgtgacataataaactacatacaaatttttaccataatatatttatttttgtgattatataattaacgctataagttaattaattaaatattaaaaggtaccaatagtgtctaacacattcctatgtgttattatcgttattggtcaaattaaatatcggtcccatatagtttaatataataatttttagagtattgctagccaatcgcaatgtgatatgtctagaggtactagacaccactgaaaccaataacaatgctctaattaattagtggggtagctaatgaattaattatatgggaacttataattaagcacactcaactaatttcagtttgtgaactaatgatatagaattaattaagtaaaaggaatattaataattaattaaggagtgagtgatgtgtgtacgtacatattatagttttttgttggaatattgatgtgagtgttccttctccatctgctcaaataaggttccgtcataaactcctctaactttatccttgtgaagaaaacccttcttatcttttgctaacaaatatagtatcttccattctgaaaagccaccaatcctatacaatatataacaacttttttaatataatacataataaattaagggtgattctacaatgcnnnnnttaaaagggatgtactgatgcacccttaacttgtttcggcatccagaagaattttttagtctaattttttttttttatattcatgta

SEQ ID NO: 23941 - DNA, 3414 bp, Cannabis sativa
gcttgaagcagggacgttacattaatcagtataagacaagctcttaccggcacataacatagcatttgtgagtcgacaaattcagtaaaaaaagcattaaacataaacatagactaggcatccatacacctatcaacaagtcataatagataaatcaagaatgtcatatatgtatagcttatctcataacccaagcgctcatacacctggttataagtatgtttgcgtccaacgccttttatgagtcttgaatgttcttaacgatagtatgacctctataccacatgtacccagtaaccttttagaattggtattagtagggtttgtttgtactataagtacaattgttcgttatacatatgtacttcgtactcgttcgatacttgtgtggataacgctactatgttatactttctttataattcatacccgtccggtactagtgtgggatatagatgtttgttttacacatgcactcagtacccttccagtattagtgtaggcaacgctactatgttgtattctctcaattatgtaatgaactataccatatgcacaacgtactgtaactacactagtgatgatagcaataattcatacattcataacatgtaatatgcactcacatgtatttcctttaacaaacttactagcataatcatattattggcaaacataatcatgtccatatgtatattatgctaattttacctcaattctaaattcaagtatattggtcaacctgagtgaaaattggtgctcgatgattagtggtcctaagtcacaatagcgtaaaatagataagtgtttactctagaatactttctaatattagtaaatactttagggtttcctatcgaactatgcgatgaaaatatcctaaaataaatcaaatatttttggctctaaaatatatctcatgctgaagagtttctcaagcgctttgaaacgatttatagaacgactaaaatagatattcgagtgaaaagttatggtcaaaatacgaattttggccgtcccgaaaagtttcaaaatggcaagccgtttttttgctccctgttaaaatggtcgaccgtttctacagtacaaaaaaaaaatgatttttcagcctcaattctaacccaaccttatcaaactctctagaacacctatttagacaaaataaatatgtttcatcaagcaacaacaagcataactcaaagaatttcaaattgttatttttgagccaaatttgagttcataaattcaaacttgctcaacacccacttcaaacacctacagccactctaataggtcttaaacagtcctaaattagtctaggaagcatcccaaaccaaccctacaaaggctcctacacaaaaacacataaccaacctaaacttttctcttaagaaaactaaaaaagaaatgaagctagaattacattattgttccttggcaatggaggcttgtttctcacttaattcctaactagtaactgcaatggctgcaaaatgatgaagataacctagttttttggtttgagagtataggagtttgaatgattctagattaattaattgattaagactaatactcattaggaaaaaaaatgttaaaattaacatctgttaattacccttaatatacaaagacatatagatacgtatatataaaactaactttggaagtaatatgcactaatcatatccttacaacagaaaagaaaaaaaaaaccactaatcatgacatgtatagtacactagggtagcagctagttaatgttataaaaaatgaaaaggatttacttgtctatctcaactatctcttcattatttcgtgcaacatatgcaataaatttaaggcaaaatattaaaagagacgactatagatattgatttacttgccagcttgtttgataatataaaaccatgataaatccaaatagtacttttcagctataatataaaaatctcaattaaaagttattttcaattttttctcttccttagtgttaaagcatttaaaagaattaagtattcaccaaatatgcactccaatttgttatattagtaaatagtaatacttgtgtgagtgtgacattatatattccgtacacatttcctctcccatgaaattaacatacacacctagctaagtaatgagttatagtactcttaatttcttttttcttttacttttctttcttttgaaaagtaatgagttattatttgttgcattattgtgaggctctcttgggagcatgtgagccatccaacacgtgtcactttctaaatggatgtttgaatcattagcaaacatttgcgatgttcgctaagtatctttggatgcaaacaagtatgtattgctccttgaagagtcaagtaagcaagtctctggccgctttcttgcgaggatagtctaaaggacaactcgagatgtcaatgagaatattgcatccgagttgttatttggcaagaaagctatagccatgcaagtagaggaagaacaagaggtgaaactatactggataaccttacaaggatacgaaatacttttttgttgtaggactaccacaaatcctattatatatttctcttttactatttttgtcaattttaagtgacaatttttcatttatcttactatcattttgagtatgttaatacttaatgctcgaagttttctttataactctcgaaacttttttaataaggctctatttcatgtcatggggaactcaaagtatatggttaattctattttattattatttgatccgcatctcattaattaataataagattctcaatgaaaaaatatcatgcctcaaaatgtcatttaaaatagcaacctaacacaacactaaaaaagttacaaaaatgaattaatataattatagagtaaataaagaactactattcaaaaaaatagaaatattgatataaatgtaggtaagtttatacaataggctatataggcatacctatctataccaaacccattgtcatctctaattaatatggtgcacgtcattaattataatgtgttttttttttttttggaaattaattataatgtgttacatatattttacaatatttcaaagtgctagaatgtggaatgtggtttataaggtatagtaagtttctattgcccatcttatagccatgtgggttttggcaaatatgataaaaaaagtaatattaaattttattttaaaattaattgatgatgaatgaagtaatttaatataaagattaagatttatcaaaaagatatttgtgaggcgaaagattgtgaaatatattagcaagggcattgttattagacatcaatagtgtctagtactttttagacatgtctctttacgattagttagtgatatttcttaaaaactattatattaaattacatgaggtctaatatttaatt

SEQ ID NO: 23942 - DNA, 1239 bp, Cannabis sativa
atcccctgactaacaagatgaaatcaaaaattactcttactgaagatgaagaatctgtctttcaatttcacgaccaggaagtcactgctactgctacttctattgacctggttttgtatgctaaagttctcaccaagaaaaaagtctggttatctacattgcataatcaaatggcagaacattgggatagtagattccctattaaagtttcagaatcttcggacatgttcttattgactttcggatgtgaaggagacaaaatgagagtccttgatcgtgaaccattccatttccaaaatcatcatatggtcttgcatacaccagaaattggtaaaaaatttacttcggctgacctgaaatttacacctttttgggtgcaaatttatcgcctaccttttcttagtaagactaagtctttggctactgctctgggtaacataattggtgaattcattgaggtttttgaagactcattaaacgaaggttggggacctttcttaagaatcagagttaagattgatgtttcaaagtctttgaaaagaggaaggatgatctctctctctcacatattcgggatgaattttgggtcaaattttgctatgaaagattgcctgagtattgtatggagtgtgggatcattggccatcctttcaacaaatgtcttgtttttcttgaaaaacttgacaatggtgaggagcctgcacttgcgtaccaacctttcatcaaaggatctgctcttcccacttcgagttacgatcgttatcgtactgatttttcgaaaggaaatgtgtggcccttgttaactcggctggccaagaaaagtttttctgtagccattcctcaattggaacaaagaggtgtgcctcaaccccgaaagcttttttgtggtgaatcatctcgggctactgttgctgatcctattgaggatgatattgaagattatgtggctagatttgatagaccccattgcaatgacattacaaacaataatcccatcatggaacaacaatcaccacctgttatcttcgcaccatctaaactggaccattcttccatctctttccccaatcaagcaaaaaataagtcacacaagcctgttgtaccctctgccattaatatgtctggagagttttctgatttatctgcaatttttaacctgttggctgctatgtccaattccaataatatatttgcaacttatcctccacctattacacctatccatatttcttccactgt

SEQ ID NO: 23943 - DNA, 3841 bp, Cannabis sativa
aaaaaagagaaaagacttggtcagaatgttggtcaaggttacaaaatgacgcacaacctattaataatgtctacactgaacttctagaggagcaccctcctaaacaagaagtgaaggaccatgatcatcatctgaggattcttctataatttcttcaatgatcacttttcccttcccttcgacatgctgggccaccctttgtataggttcttcctcaagatccctaagacgaataaattcttccatagatgaagccttgaccctgctggctttggtctttttcatcttggaagaggttgacttgacatgcactaagggcttattgaggaatgcactacctagccttggatagagcctgtacttgagaaaattcttaggagatgtcaacaaaaaaatatgtcaagcagaatcaaacaaattcaagatggcatgggccctatctcttaggacaagtgtaaaagcaagccaaacatatgttttagcacgttgaaagaccaaaaatttagtcttcatcttggtgactatgtaatagtcttggaggaaaccaccaatttttttgacacacttcttgttggtgctgatcggccattaacattccagtagcaaaaataaaaaatatcatgagcatttatgatgtggagaggactttagttcaaataactagtttatattatgagcagatggttccccccatccttcctacgcatagaatacaaacatagtagccaattatttaattcgctttggtgtgaactagtcagggatatttagtaattagccaacttcacaaagtacaagtgaagtggcaagaaggcaccttactcagcatgtgggtcagaccatgcgcacatcccctcaccaagattgttagccagttgtccctcagagggaagaaatatgtgcatgtcaccaagagggggctttctatcaaaatgattaaggtggatggcgaagagacccacattggatcatccacctcctgaggctttgatggtttagcctcatcaaaatctttgtccgtataatggacgcctagggctataggacgaccctgaaagtaaaaaggtcatttgtcctctgaatagccaccaacgccttcaaaaggcatgaaggcatacctatgattttcaccttgcccttctattttttggacttctgggtcccttacgggcatgaggtcttttgcctcggagcttgcattgcctagttcgtgtcgcctatccattaattgaccgaactcccaatcgtctggaccaattttttagacaatttctttggcacgagcaacgtttcttaagaagaatggatagctcgatgaagggtgatctacaatagtgataataatttttgccatgaccctaggctgtagtgaaggttctgattccacttctagtaaaatgtttgggatgcctgcatggacaacgtacgtccaattaaagggcaagtattgcctccaacctatgttatactcctagatgaatctctcatacacgctgcctccgatctattctggataaaaacgatacttcccactcttcaaagctagaggaagagttaccatcaaaagaagactttgcatgggcctttggttgatcctcaaaaagtagttgtagcagatcatcgtcaatgcgattattacctccccaatagtcatccagattcatctacaaaagtaaaaaggggaggtaagtaccaaatagaagtgaagagttcaaatagaaataatccatttattctgtctggacgaatgactggatcgagaaaaagaactccatccaaatgacaaagaacttggtttaaagatgtttaaggacagggtagaacccagaagttgccaaaatggtgtacaggccttgattcaacgaatcctctcaggaaaaacatgtatatgttcaataattttgcaattaaaccctgcgcaagtacattcaaccacgataatttatgaaaatatgaattttaattcaaatagtgaagaacataaatggcataaacccagggttttcccagaaaagtgtgtaaagttgaatgtaaggaagtaaagagaaaatgtatataaaatagatacttactcattgttggagctgctggttggaatgggcaaagccaagagtgaagtcaaaattgggtacttgaagtctccaaatatactcttgaaaatcacagaaaatgcaaaatctatatgatattatgaaagttcgaaaggagtaaaaatgcccaatgaacctttttttttttttaataagagctttaggggtataaccataattttggcacccaagtggaattcttgtttccccctaaaaatttgtaatgagtactcttgataagtacagtcgtcaacgcatgcccctagggcacgataatctatattagagcattaaatccctcaaatatttgaaaagatgcctcaaaggatttgaagtgacatccttcttttccatgcttatccatctaacaagtgtcaccgcattcacctagtatgtgggctgggcaagtccacacaccaaccaaaaagtttccacatggacttgggcgtaaatgtatcccgaatcttgttcgagtgacatggcatgttttttcggtgatacgtatcatgttatcaagacctgagcagaataaatgttcttttgagttcctgcccaggataaacaacttgctcgatgcaacaatgaaataataaggtaaaatgttctgtatagagtaaacatagttaatttggacgacacgaagcaattagcgctttgtgtggttcgaccagggcaaaatgtgtgaagagaactcattaaagtcagttcccattttatatgtaatcaaatccctattttagagtatttccatatgtaattatcacaatttaggaaagttattagttttctatttcatggcttgacaacttttaggaaactattttctattgtaattattcccaataaatacttgagccattccgttatttagagaagggaaatcatactttcaagagagttattaccctactcaaatatctgtaaaagcttttaagagagatcaagttattctttcttctcttctcacaagtgaaatacaactaaaaggtgagtaggctattaccaaataagtggggttgaacctctataaaatctcgtgttttcagtttatgattatcttttagacatgttatctgctttcctggcattggacacgtggactccaagtcagcattcaagacccatcagtgggaccctcatcaatgataaagtgggccaagcccacctggatatgcccttccaggagctatcttggttccgtactcgcaggtcttccaccttcgatggatcaagcccagaagacacttctggtatcatgaggccagaggggtaagatagtgccttcctgaaagacccttctagtttccctatttatttttgcctataaataaggaaatttcaactatcagaacatgtcagaatatcgtatcatgattaaaggggaaacttcccataacaaacactatgcaattaatttagaataatcacccaccattagcggagatggtgttgacctgatcaacgttactccaatttgcctagtcagcagatcgtattcttcatgggctggacatcatgagaaagcccaaagatattttttaattgtaaactccccagtagagggaaaagggaaaaccctaatgtaatcatggccctcaccagaaccgaatttggtctttgtttcaccgatctcggtgccaaagcatgagatacgtgcgatccccaagaggtaactagtcaccaacaaggtcgtcacgacgaagactagaatctagacgctcccattgtagaggatgtagaatcaagagaaa

SEQ ID NO: 23944 - DNA, 1956 bp, Cannabis sativa
  modified_base (552)..(579): a, c, t, g, unknown or other
cataaaataatgaaaaaagtccaaaaaataaacaagattcccatcataaataagacaaaacatcactcgaataaaataaacatacagatagattcaaagcaaactaacctgaagggagaaaaggactcttcaaacactgtgttgaatacctttacttttgttcacatatatgggatacttaaaagaaagaccaatgtaaggaggagaaaggtctgaaataatagaccacgggtctgtggtcaaagaaaatgagcaagagactcaaaataaacaaagcatgtgctttcgtcacctacttttgcactttatatagaattatataattaaattcaacttcaaaagaccttccattattgggcttagcattcaaaatatcatttttacaaatcaaggcccacaaattttagtcaaataaagtcatactatatatacttttcaaactaaaatattaaacatatacattatatgttctgagtacatatatatacatataacaaaatatcaacataaaaatatatatgtacattcttattcttattattattattattnnnnnnnnnnnnnnnnnnnnnnnnnnnnttattattattattataacaaatactgcaattattattttttaccacattatatatctttctctctcacacacacatatacgcatagacatatactacgtactcgtttaaattattctaatacaaattcaatatttatacattctccaagtcaatcgatattgaaaacgaaaaattattatcggtacatatatttcaattttttgccagtaagctagtgcaactacttttcaagtcaacgacacttgattccaagagtaagggacaaactatactggtaaaaattatactaggcccaaatgcctcttacgacccaatttgaaattacaatccttcaagaccaagttagtgaatataacccactcatctaaaatacattgggctttggctaaaatacaaggtccgaacgagcccagtagttataagaccaaacaaatacaaaggataggaacgagtctataactgatccatatgaatcgatcattcctcctaaaaaaggagaagatcacttcccacgttcgttctccagtgtaaaggagcttgtccatcaaaggctctataaaaggagaacccaggagtcctgagggatcatctcatcttcactcactgaacactcactcaagcattcacgcaatacattaatattattattctcagtccttctccatcactctacggtggaaatatttattttctattttctttatttatatttggctattctttattcgaattatttactgacttgatcctcggagacccttcggctggcaccatcctggtgtcccaaggtctcaacggtcctttttcttttgttctacaggttgtcagtgcccgtgatccttctattccgatcattgtaaattttgccctctacatatatgtatatattatttaccatttttaataatataataatacaaatattatatttaattaataaattatttttgtataatttttagtgttgatggttggaatgaataaatatgatactaaaattacactatttttgtgttaaactaacacaattatagtatttatgattggagttgctctaacttatattatatttataaaacctatttatttttataatgttattgtgctcttttgttagaatgaagaaatttatattaatattcatttatttattattatgattgctttctataaattaaaaattaatatttcaaatactataaaaaaaattatttttttaatttgaaaacctttaggggcgacatagtcaccccttaaagtcaaaaatatttttctgacaaggctttttaagggtaattttattgcccctaaaagtcatgttaagaaatttgtagattacttttagggacaacattgtcaccctaactacaagtaa

SEQ ID NO: 23945 - DNA, 2125 bp, Cannabis sativa
ctcgtaaaacattaaaaaaatggaaagcatttatcttttgattttgagatgaatctgtttagtgctgccattcttcttgtaaaagcttgaacttcctttggcttcgttgttgagggcatctccgttagggccttgatttttttgggttggcttcaattcctctcgcatttactatgaagcctagaaattttctcgagaaaactccaaaagaatatttcttcggattaagcttcatattatactttttaagtatatcaaagcattccacgagatcctttgtgtgatctttattccaccgacttcaccagcatatcattgacatagacttccataattcatccaattttgttcttgaacattccattcactagtcgttgatatgttgctccaatatgtttaaaccaaatggcatgactttgtagcaataaagtctcatatttgttacaaaacttgcatattcttgatcaggatatgcattttaatcgggttatatctagaatatgcatccaaaaaagtcatcagctcgtgtcgtgttgttgcatctattaactggtcaatcctaggtagtggaaaacagttcgttaggacatgccttattcaagtctaaaaagtcaatacaagtcctccaagtgttatttggttttggtacaagaactgggtttgacatccacgagtgataaaaggtcttgcgtataaagtcattggtcaataatttattgacctcttctttaagtgtcccttgtctctcgaagtctaagggtcgtcgttttatgtctttttgctgggtagttggggtcaatgtttaaatgatggcaaattatattaggatctatccctatcatgtctgaatggctccaggcaaattggtcctagttcgccttcaaaaaatcaattaactgctattttagtttttcatccgaattcttcccaatgtacacacatgtgggactatttggaactataataacctcttctaattcttcaataggtttaagctggttattctcgtcttggactctgggatctagatcctcatcttctttcttgcattcttctttgagtcagacacagcctaaagaagttggctatgtccctgagatagggatgcaatggcaagagcaccccttgctcaacatgaggaccagaccatgccttctagatggttggcagacgatgcaccaattgaaccctagtgggtctatcacatcgaattcttccaacgagccctcattctttgatctccttgagcttatgagccgacagggaagatggaggagatatctagcgctgttgatctccatactcaaggacccatggctcgagagcctcttcctcaacatggtcaaccccaacctctgacagttgacccctaacatttaaaggtcgcccagcctcatcataagtacccagtggattgccttggatcaccgtacaggtcttatactgcctccaagtagtactttgcccaacaacagatttagcctgctcagcctcagactcactatcctgactagccaagggttactcaccctggccagccataggttgcccagccaaaggctcctcagcctggtcaacctcaagttgtgcaacttgaggttgttcagcctcctcaacatgtcggacccatcctctcgtcatcaactcagtaatatgagggtccttaagaggtgccctacgacatgtttgcttcatgctagccatggtaggatatggctcaaagtatctaggaatggtaacaaggggtgtacgtcggtcggtttagtcgggttatagcatatttttactaacccaaaatagatatcgggttgcaaatatttcattataacccgctcaattaaaaattagaaaaagctcaacctgtccaatgatttcgtcggtttggtcgggttaacctgcccaaaccgttcttcattttttttataattataattgttagtttctactattcaaataattagattttaaaaaaatatatatatattattcatatttcaagctaaaaaatacaatagtttaaattaatttcaataactttaatataagataaatataattgagtaaacataaaataaatgaataaaataataataaaataaagtaataatatagtatagattttaaa

SEQ ID NO: 23946 - DNA, 3968 bp, Cannabis sativa
caaatatatatattaatttgtttgaaggtgttgtctatatatatacagatggcaagcaaaatttaggagtgtatcattgagacttggatatattgggaacatatgttgggcatttcttttctttccagtgacaagaggctcttcacttttgcctcttgttggactcacatcagagtctagtattaagtatcacatctggcttggtcatctatccacagttctctttgctgcccatacagtaggattctttatttactggatcatggccaatcaaatggttgaggtaattataatatgatgtgccatacataacatacttgcatatatatatatatatataacaataccttacaattatatttctgttcctttcaaaagtcttgctgtacatttaactacaatatagaccattatataaaataggttatttaggatttttgtttccaaactatgatctatatatatattattgtattctcaaattttttagtgtgttaaaaaaggtctctgaactatttatactagtgttttaaaatgatcattttgtcaaattttgttacatgtcacaaataaaataatgatgtaattatttagataattttcatatgagcaccatttaaaattaagaatatgtatttttaaaggatcattaaactaaaagttaacattacaaaaaactactatttttagtgataactttttagtcacaatataaattttttgtaactaaatataacttttagtcacaacaaaaacttatttgtgactaaaacatagcatttagacacaagttgtcactaatttaattgtagtcacaagtattgtgactaaaattacatttagtcacaacaaattgtattttttgtgactaatacctttagtcacggaccttttagtcacaatataagaataataatttataattagttacaacatttttacttttagtcacaagttttgttgtgattaaaagtaaaattttttgtagtgcaattaaattagaaaatcaagtaaaattaaataaaataatttaaattatatttttcaaattaattaattacatacgtgacaattgtccaattacaaccatatcattattctatttgctacgtgtaaaaaagtttgacaaaaggaccaatttacaacactgtaaatattagttcgggaaatatttttaacgattgaaaaattcaagggctcaataatttataagtcatagtttagagatgaaaaatcttaaatagcctagttttaaaaatccatatatactacagaaaagcatagccagaattttgttttagagcggacataataaatttttttaaactacatcaataattttctataaatttagtgtgggcattcaaattgagggaatagttttactatttgaccaatgttataatatgtttactaaatgagaatgggaatcaattgtatggaattgattctcattcatttgtttattaaagttttaaaaattagtcgggcccacaaattaaggagaaaacaaaggaaataaggttctccctccattttcataaggaatacattttcctttcttttacttaccttaccttaacttaccttatattaattatatttttattaattaaaaataaaaaagacaaatatgctcttcaaaaatatataaataaaaaataatgatatgttctaacaatggtaatttagttaaattaagtcattctgattcctgattatgtaaacaaaataaaatgattttgattttctttccggtcagtttagcaaacaacaaaataaaatattatttccgattattttatattttaacctgattcattttttccattgatcattctgattccaattacagtttagtaaacgtgctagagaggcacatgttggcttcatcccatcctaatacacctaatctatatattacttattatagctaaatatactataaatttcacatttcttagacaatattacattggaaaggtatacttaattatgacatccatgtacatcatttagtgcgagattattaatttatatacacaatagttttcacgcaaaattaaacctgtaaaatatatattcatattgtaggcattagaatggagccaaacatatgtatcaaatgtagcaggagaaatcgcaatggtagtggccttaattatgtgggtggcaagcttcaacagagtaaggagaaagatgtttgaagtgtttttctacactcaccaactctacacaatttatatcattttctacgtacttcacgttggagcagcttacttttgcatgatactccctgggatattcctttttctcattgatcgatacttgagattcttacaatctagggacagagttagattactctcctctcgcattttgccaggtggtaacttcttcgaaagaaatgacttttgccaaaaccccaggttaatacaatcttttattaacattatatacataataacttattaattaaccctttgtttttattaagtagttaatattattttattgattatttcaggattgcaatataatccaacgagtattttgtttataaatgtgccatccatttcaaagttgcaatggcacccctttacaatatcttccaatagtaatatagagatagataagcttagtattatggtccgaaccgaaggaagttggtctcaaaagctttacaaacaactttcttcttctgtgaatcatttggatgtttctgttgaaggaccatacggaccatcctcattttcctttttgaggttctttttcacactaatatgttgcatatacatcatgtatttatattgtcctataattaaattaattaatgaattgatgttgtgatgttgattcaggcatgaggctctaattatggtgagtggtggaagtgggatcactccttttatctccataatccgagaaattatgtttcaaagcacaatacccaattctcatgttcctcgagttgttcttgtttgtgccttcaaaacctcagctgatctggccatgttagacctcttacttcccatctcaggctcacacgccgaacagatttctcaaatagaactccaaatagaagcctatgtgacccaagagaacgagcagcccaccatagaagcccaaaagactatacaaactacatactttaagtccaacccaatggacaggcccatatcttcaacttttggcccaaacagttggctttggttgggtgcaataatctcctcctcttttgtcctgttcctcctagtgttgggtttggtaactcgttactatatttaccctgtggataactctggagggttttaccactactcttacagatgtctttgggacatgtttttagtgtgtgcctgcatttgcttggcctctagtgtggcttttgtttggtctaagagttgtaatgttgggttaatagacactaagcaaattcaaaatgtggaaatgggaacaccaacatcgtctcctgcagcatggtcttacgttggtggggattacagagaagtagaaagccttcccaatcaatcattggcacaagctatcaaggtccattttggtgccagacctgatctcaagagtatgtcttatttttttatatatcttaaatatattattttttttaattgctacaaggatatggtgtcctcacacacaacattgacattaattagtacaattatgtgtcataacagtaacaatatgttatatatatatgtcacgtggtatcagcgtaccactaatacttagatttttagcactatttagtctgaaatgacttaaagaataagttaattatacttactatttaatatatattatagtagattaattttttttagttttagtttttagccaatatgttatataaacatataaatctaaatatattacttattaatattttaatgcatgcagaaatcttgttcgaatcgaaagcatctgatgttggagttcttgtttgt

SEQ ID NO: 23947 - DNA, 1377 bp, Cannabis sativa
ttaattaaaataatgtatacaaaattgtaaaatgtccttaaaaaaaaatcctaaatttcaaggcacgcttaaaagtctggaataacactataggcgatgcttttaaaccgtagcctatattaaaagccacattttaaaaccatcacctatagtatagaccacgatttttaacagtcggtaattctccttttaaaaaaatttgtaatttttaaggcacgcttaaaaactttcgggaatacatgaggagtgtttaaaatcattgaaaatacccaattttctcgacgattttaagaactcacagccatggtctccaaaaaaaaagtatttttaggaccatcgagaatagtggtttttgtagtactggcgggctccactactattgcccaccgctaatagtattagcgacagcccccgccgttaatacccgtcgctaataaataggcgaaaaagttcatgcctgttaagttcaaaagtattagtggcgagaccctgccgcaaataatgattaaaaaacataaaaaaaataattattttattatttgcagtaggacaatagcggcgggctccgctgctaataatagtatatattttctcccagcctttcttcttcacttttctttccctttttcttcttttttattactaaaatccctaaagtctctctcttctctattcctccaaacccagttgcgcccaagtgtactctaaccgggcaccacccttatccgattgaagaccacttgtggcgtctgcttcattttgcgagtaagtattttttatttttttttttattttagggcttttaaggatatgtagatatttttaagaaagttattgtgtatatgtacgtgtgtattttatttttttttattgtatttcaggtttgattttaaggattttagagatatagaaatatttttttaagagttttaatatgtatatataaattagtgtgtatatatacgtatttatatatatttgtatatataaattaatttctatgtatatatatttatttttgtatttgtgtatatatatatattaaaatctatatatatatatatatatacatgtgtatatctaaattagtttctgtgtataaataggtagtttattgtgtattattttactattttttatatttctaattctatttctatacatatatatatggatttttttcttatatatatattatttttatagtagtttctgttattttttaagttggacaaaaaaagttggatttttagcagcttggagaaggtgctcacaaatttttttttgtgaatgtatttttttattattatatatgttaagtaaaatggaacatacgaaattttttattgctgcattataaatttatgaattgtattt

SEQ ID NO: 23948 - DNA, 5509 bp, Cannabis sativa
  modified_base (4704)..(4710): a, c, t, g, unknown or other
ttgtgattcttggttctttgagtcacgaagaacacaaagaacacgaagaacatgtttgagttcttaaaaaacacgtgttctgatccatgcagatcctgtccggccaaggaggccttgtttgaagcctggccgatcattggtggctttcgtggggtctggccggccatagggactatgtccctatgctggccgtcttatgcctggaattagggttcttggccaaacactagaatgggtattggggtcttgcaggccacaaagacttggaacacctttatggggtgtgcttggaagtaaggccttagtttgcgagatgcatggattaggcatgaggcaagtttttcaagagggggatatctcaactctgcccctaataaccttttacttacatagtaaactggttgctgataccttccctcttctcccactaatgctgcattaatcgtattctccaagtaaaggagtaaagtctctccagttactggtttagccaaaactggaggtgttgatagatgtttctttatgtttatgaaggcttcctcgcgctcgtctttccattcaagttttttgttgcctcacagcacattgaagaatggtaagcacttgtcggttaatttcgagatgaatcggtttagagcttccattcttcctgttaaggcctggacttccttcggctttgtgggcgatggcatttctatcaaagccttaatttttttaggattcacttcaatgcccctcgcgttaactatgaatccaaaaatttctcgaggaaactccaaaggaacacttctttgggttgagtttcatgttgtactttctgagtatctcaaagcattttgcgaggtcttttgtatgatcttcactctttactgactttaccaacatatcattgacgtagacttccatgttcctccctatttgcttttcaaacatttcatttactagtctctgatacgttgccccagcattctttaaaccaagaggcatgactttataacaataaagtcccatgttggttacgaaacttgtatgctcttgattagggacatgcatcttgatctggttatatctagaatatgcgtccatgaatgtcattagctcgtgtacaacagttgcatccaccaactggtcgatccttggtagtggaaagcaatcctttggacatgctttgtttaaatctgaaaagtcgatacaagttctccaaataccatttggtttttggacaagaagaggattagatctccacgatgggtagaatgcctcgcgtataaagtcgttaatcaacaacttgtgctcttcttctttgagtgccccttgtctttcagaattcaagggtagcctttttttgtctcttagctgggtaatgagggtcgatattcaagtggtggcaaataactttagggtcgatccctatcatatctgaatggctccaagaaaattgatcctagtttgccttcagaaaagttattagctgctattctagtttttcatccagatttttcccaataaatacacatttagtggcattttttggatctaaaacaacttcctccaattcctcgattggtttaaactgattcttttcatcttgaattcgaggatctagatcctcatcatgtttctcgccttcctccattatgagtaccattaactgatggccgacttttctattttttagttctatacgatagcatccatgagccagtagttggtcacctcgcactacacctacacctgttggtgtctgaaattttaaagataggtgtttaattaaactaactacgcgtagtccaattagtgcaggatgaccaaatagtatagtataggccgatggtaggtcaacaactagaaaatcttgcattaaggttatggataaaggtggcttgcctacagttaatgggagttcaataattccttgactagtgacactatctccggtaaatccgtacagatttaccatgcaaggttttaattttgcattttgcaatcccatttttttcagtgtatccttgtaaaggatattcactgagcttccattatccactaataccctttttattcttttgttggcgagctgcattataattacgagtgggtctacgtgtggatacctcacgtgcttagtgtcttcctccgaaaacacaattggaggttctttagtcttgactttcttagatgattttggagcaaaaactgaccgctcgttttttatttccttgacatatctcttttgggcattactgctttctttagcgatatgcggcccttccgagatgaccaaaatgtcctctccttctacaggaggaggttgtaatctttggtttcttgggttattgggcgaatttggctagttttgtccattaccttgttgccttacatacatttgaagataaccacacgagataaggctctctatctcgtctttcaactaacgatactcttccattgtatgccctatgtccttgtgaaatctatagaattttgttgtgtccctcttgtgtctcgcatgtctcatggactcaggcttgcaaaatgtaaccatgtgctcatttgcaaggaaaatgctttcccgagtttcattaagctcggtataaatagtataaattggcatgtacttatcgtgcttcttctgttttttcttatctttggctgatttcctagagtcatcttttctcttggggttagagccacctgaattgtcagcctttatcgagacggtgcttgctgagacagtgctgggtttatttcccgaaccagtctttaacaatttcatctcgttcctcgcttcctcttttcgtacgaacacttgagctctttcattgaactcactgatgttttccacagggcgaccctttaagtcatcccacagctcgccccagctgttgagaggtcagttgtaatccctgcctgaagagtagtaagctgaatactattgttcaagtttctaactctagcagcggttatactaaaatgacttaagtaggccttaagtgactcgcctggttgctactttacgttagtaagggaagacgctttaggtcgcctgtctcttgctgcctaaaattgtttcttgaaatccttagacagttgttcccaaaaagtaatttagtgatgggtgaatttattgaaccaactactcgctgctccaatcagcgaggtgaggaataaaatacaacgtaaattattcaatacgttactggctcgcattatagtattgaaattattgaggtgagcgaccaggtctgaagtctcatcgtacggcgagacgtgagggtttttgaatccttggggaaattcagaattcataatgactggatggaaaagcttgatctcttcatctgagtcataaccaagcagtttttcatattccccatcttggtatctcttgaatttattttccaactcactaattcgcaattggattggatcctcttgctttcgattgacattgagttattggggtaaatcaggtgcattcttaagcgctcacacaaattaggttgtttccaatttaaatgttcacgaagatctggctatcttcgttcatggttgctcatggacctcgtatctgagtaactctcggattgactgttcctcgtattactcatactttcttgatcatcactacgccgaggtctatcccctccttgtgtagatcaattgtgagcacatgatcttgaatgtcccgagctagaacttgcctcatcctgcacaagccttctccttcgggaagaattaggtacacatcctccatttgggtatgtgtacgcttcctcccttctagtttgagaaggacgctaggggtgcctcggcgataactcacttttctatggttgtgtcctaggatttctctcgttcttacgagggatctcctgttccctagttttgggctgccttatgttctcgttcctacgagaagattctttctcgtcattattttcattcccctggtttgtgaatccctggggtctccgaggtacctctcgtcgaggtgccttattgtttggttgttcgtcttctggaacatccccagtttccccatgttgttcctcctaagtgtttttgggattttcttgagttgtctcctgcctcctagttctcgaacctcgaggtctaccttgtggccttctcactccaggatcaggttggtttccaactaatcgtttcattggttagcctcagccaaacgttgtcggagttggcaattttctaatttaaccaacgatacatacctagttggatcataggcaccctcacccctaggtacagaaccacaagcattagtattggtttcctcattcccaatttttgggttttgatcatgtccacgttggcttcttctcgaacgtgtggaacgtgttgttcttgaagtgggtggtctctgtgaacctataggttctttcctaggacgacgattagtccttttaggacgactgttatcgttttcatcatgatcagccatgaaaaaaaattttaacacgtgggctttgaccacgtccaattttaacacgtgtatagctaaatgtgggaataaccgtttgttactcttatcttttaagtagtggatacggacgtgggatataagcatctcgctagaggcatctcgctttgtacatagatgaacgacttggtttatatgtattccagcaatggcatgagcactggtgtacggagcaaactttagaactgctctttgaccataannnnnnncagactggacaatcatgtcctccaagttctcaggctacttcacttagtcattataacgtgaattatacactaagtgttccaatagccaattagcctcgtcaacacttccttacacacagcgaggtagatgcctcgctatgcattgtctgtagctccctcgggattatgccttccgaggcaagatggtttctcgtcaatacatgaattgatagttagtgtatccttatctcgcctaaggttgtacagtcaacgagttatgaatatacttaattctataattaatgagttattccattttgcatttaatgatataattatctatgtatctattggttcatatttcacgagattgacacgtgtcactttttgaagtacagtcaaattttggatataacaaatatgaatactctttataaaattaaagaattcaactcctatcattctctgtagggaatgatgaacagaaaatatatgtcttatgtctttaaataagattagtcatgttcattgttattcctatattttgatgtttcaatacaattttcgaaaagtttatttgggtattcaaaatccgctataaaattgcgtcaataataatcatttcaataattttgtagttgtattcatataaataaaatatttttaataaatataaaatatttacttcaagaaatatttacccaaattaatatataacgatattagattgttcttcattgtcatcaaagaatataaaaatatatataaatatgtgtattcatctcttttattatatttcagtcaattatatgacatgttt

SEQ ID NO: 23949 - DNA, 3597 bp, Cannabis sativa
tggtaaaattaattccaacaaatactcagcacaataaacatataatttcatcagaaaggttttgccttgtgtttgtgtgtgtgtgtgcttatgttctttgagttgtgagtgttctcgaattgttcttggagccattcctcacatgtgggattgagctcaaattttaacaggtggtatcagatcataagagatcgatgaggaatcttgttttggctcgaaagttcaagattttggtgatcaagcaagaaaatagaaaattcgaagttcgatcttgaaagtttacaaggaaaaatgattttggtttagggcgtgtaaaaatgagaactttgatagttcaacaaggtctgcaatcaactttgccggaagagaagggtatgtctaaaggtctcacccagaaagagaaaacagagattctcgagaaagcacataatgctataattctgagtcttggtgacaaagttctaaggtaagtgtcgatggaagactcggctgcagaaatatgattgaaactggaaagtctttacatgaaaaaaaatcgttggcaaatagattgtttcttaagcaaaaacttgtacttactcttttaagatgatgctaggaaaagaaattgaagatcatcttgatgatttcaataaggtgatcctcaacttggagaacattagaataaaagttaaggatgaggattgggccatcattgtgctaaattctcttctcacagagaattatgaacactttgtggataccatgatgtatggtaaggattcattgacattagatgaagtccaaatgcattaatgtcaaaggaattgaagagaaaagtagagaaacaagatgaaggtactggagatggattactaatttgagaaaaaggctccaagaaggagaacaacgaccaaaacaacatagggaaaggtaaatcgaaatccaagtttcaaaggagatggttcatctgcaataaaccatctcacctgaagaatgatcgtcaaatcttgaaggattacaaattcatgaaagatggaaatgcagacattgtttcagatgcagaagacattgatggatatgacattaccagtgtgttagccatctcaaagaacaagtcagaagtggaatggatcatagattctggatgttcatctcacatctgccctacaaaaatgttcaaagtagaactgtcaaattgggagacaatagagcttgtgtaattgctggtattgggaagttggaactggaagatggaaaatttgttgagttgaaacagttcaggcatgtaccaaatattaagagaaatttaatttctatgtccatgttagaccaagatggtttcaatgtcaagattaaaaatggcactttgaagggtatgaaaggttttgtaattatcatgaaaggcaagattgttaatggtaactatgtcttacaagggaccacaaagaaaagtcaagctaatgttgttgcaattgatggagaggatcagaccttagtatggcacagaaggcttggccatgttagttatggtggtttgaagatactaggcaagaaaggtgttcttggacaaattcctgtcaaccctataaggctttgtgagcattgtgttcttagcaaagcaatcaaggtgaaatttggggtaggtaaacataaatccaaatcaattttggactatctacactcaggtttatggcgaccatctagaacatgttcaagaggtggagccaggtattttctcacatttattgataatttttctaggcttgtgtgggtctatattttaaagaacaagagtgatgccttcagtaagtttaaggaactaaaaaccatgcttgaaagtcaaactgaaaggaagataaagaagttgagaacagacaattgtttggagttttttgcgaaccagattaatgattattgcatgaaagttggaattgataggcataagtctgttcctagaaaccatcatcgaaatgaccttgttgagagaacgaacagaacaattctagaaagggtaagatgcatgctcatctactcaggactaccaaaataattttaggttgaagttattgttacagcttgttatttaattaacagatgcccctcctctgctattgattttaaaactccaatggaggtctggagaggaagctcaactaactatgatcacttgacggtttttggctgtcttgcctatgctcacataaggcaagacaaacttgatcctagggccaaaatatgtatctttttggggtaccctgaaggggtgaaaggctacaagatgtggaacattgaagattagaagaacatcattagcaaagatgtgattttcgatgagatgacattgtacaaggatcttaatgcttgaggagaaaagcttgcctcagccaataagaaaccagtagagaaaattcagtttaaggtggagttggacaaagaggataaggaaattcaacaactgatgcagaaccagaagttaaaatggaagatgagaatgaagctgagaagtgcaagaaggtgatgatgaaactcaggattatcttctgacaagagatagagagaagagaaccacaagaccaccaaacagatttcattttgcaaatgtggttcactatgccttgaacattgttggtattgactatgaggagccaaagtcttatgaagaagcaatgatgttaaaagataagaatgaatgggataatgctatgagtcaagaagtggtgtttttaaagaaaaatggtatctggattctagtgagaagggctgcaggaagtaaggtaataagctaaaaatggatttatagttataaggaaggaattctaggggttgagaagcctagattcaatgctagattggtggcaagaggtttcacacaaagggagggaattgattataatcaaatcttctcccttatagtgaaacatacctcaataaggctactgctcagaatagtttcaacataagacttagagctagcacagctggatgtaaaaatagcttttcttcatggagatcttgaagaacagatctatatgaatcaacctagaggctttgaggtcaagggaaatgaagaccatgtgtgactttatggactcaagcaaattctaaggcaatggtacaagaggtttaatgactttgttctaaaatctagctttaaaagaagtgcctaagacagttgtgtctatgtcaagaactctaaagcaattgtgtgtcttcttctatatgtggatggcatgcttattggaagtaagaatatggaagagataaataaggtgaagaaggttttgaataaagaatttgaaatgaaggaccttggaccagcaaagaaaattttggggattgaaattattagagataggaagctgagaagcatcaaactggcttagagtggatacatctccaagattctgaatagattttgtttcagcaatgtgaaaccaccagtttctacacccttcacacaaacaacatttaaactcaccaaaagtcaagctccaacaacaaatgaagacctcagttatatggagaagataccctacaccagcgtagttggaagcatcatgtatttgattggtgatttgggatgggtctcctagtgatcgttgttaacacaacaaa

SEQ ID NO: 23950 - DNA, 1878 bp, Cannabis sativa
atggttgagatattctctcaaggtggttgagatttcctcaattggttacagaaaataaatatctataacggaatcagttatactaagtattcaaataactaaatataatttaattaatagatttgaatttaagataaaataactattagtttttattttatataccttataaatcaaattcaaaaaatgagaattattacgtataatttttggaaagcctaaagagataaatctaattaattttttctctctatcactaaaaagaaaaattgttgctcatttgctgagataaactaaagaactctatacactttattatcttactaccccacactggtttttgtgtgtggtagaatatttgaaaggctacaatatgagttttctaatcaaccgaaaaagatacaacttgcgaaaagaatcaaagatatgttgataggcttcaagtggtaaattttctttttatcaatttacttttagtttaacatatatacatatggtgatattaggcatatggtacaatgataatcaatcacaactcttttgatgagtacctgatttagtaccataaaactaacaactggtttatttaatgagtagagattgccgttgctgagatttgcaaaatttggtgtcaagttgtgagtagctcaagtgtcaggatacaaactctcatcactcacagattttggaccaccaacaaattgcctacatctcggctatattgtccattggaggaaagttggtgaaggattcttgtcctgtgaaagacttatcgaagcgataaaaataatgctttataatgtggcccaactttgtggcttttgtccctaattagtattccgacctcgaccataaccagaggaaccccctcgagatgctgtattgtttggggaccacgaccataagagggaccactaccatgccatgggattatagtgaaagcttccactattgttgaaaaagggactgataggaccttaacctgagccaggattgaatctaggaggtacaagcagcgttgagtaagatgatcgaccatggaaattggacccaggagttcttgtttgcgagagattcttggcttttttctctatttgaataaattgagccatcaacaaggcttcaatctctgcaatatgtatgaatcttttcaagtggtgaccgacgtgacaaacacatcatacttcgacaacaacccattgaatatgacttctatacaatcttgaggcatttgagggtggccaatagtagctaggagatcaataatacctatgatcttgagcatataatcattgagtgaccttgtcatatcttagtgtttcgaagctgagttatgtagtactttgtgatttcctgtagattcttgcactagtactgtcataaccaataattttattgatagtctttacagacatagatgagagtagccaagagacaagtagattttcttgttgttcctaatcttcatactgagttaaaattgttggatcactcatttgcaactgtcaagaactttgcaggaactcgagtaggatcaagaaatttttgaagctgattgcctttgctcaagggtagaacttgatgttttcaagaaagaaaattgtgctcattgtgtttaattgatagggaatgattgaaagaaacagggtacaatttaggtagtgaaacttgttgattgttgtgtggctgagtattgttcaatcttaatgctccaccagttgaagaagttgaaatctccattgaagaatgactggagctctaataccatgtgggagcttagtctttgagagagaaagagaaggaaagagtgattgattagttagagattacaaagctttatataccacattaagctaacaactaccccaaactaacttc

SEQ ID NO: 23951 - DNA, 1457 bp, Cannabis sativa
aaaagcagaacatagataaaaataaaacataaatatgaaaatcggtaactagatgccattctgtagctatcaaatgcatctttttcccccaaaatcctcccctagatgcaaccccctaacaccccacaccgaccctaccgacagccaccacaggccgcctaagcaccttcaccatcttagtcgtagaaacacgacccaaaccccacgctacctgaaaatgacccaaaggctccaccccaaaccccaaaccccattccattctcgagcaccaccacatctagaccacaaatgaccaccgaaggcttcttagcacttcacaaaatactactcacgtctaaaagaaatatttcacactccccaccacctaatttatatctatttatttgagtcttggtgcctaacacatgatttatttcgtatattacaaaaatgaacaaaatcaaaggactatatattatatacttaaattgttgaatgttgataatcaaattaattaaaattcatttgagtatctatattgtatttatagatggtgaaactgaaaacagacagtgttaattgatttttatgaacaacatagaaagagaaggcaaaaggagggttatgatcatcacagctactcttgaggagaaagaaggaatggtagagcaagatcgtgaggattttttttttcttttttttagcaagatcatgaggatgaagatgaagtcaagattgagaatatttgggggacgagaaaactagaacaattactaagtaggtatctaagaggaactcgaacatctgaccttgtgagagcaaaccatatggtccttcgaatcctgtatttgaagttgaagattttgcagggcatagaaagataacaacgaaaatataaataaaatcgtttttacgaaaattgagagcagcaaaggaagaatgaaggaaaaagaagagactgggttacatctgaatcactgatcatgcaatttctaataaaatctttagaattttagtactcacattttatgtagggaaataactgtatcaaactattaaactactactgcatagccatatatatttatataatcatagccaaccaagtcttaaggagttgagtgtatatttatcattaaccctgtaattttttgttagtttggttggaaagtatgaccatgaacaaatccataatcattatagtaaggtattctctaaacaattagttcattttttataattaaagtgcttttggtctattcattaaaatttcattggcagtttacggccaaaacaaaatgaaaaataaattcacaagtaatatgacctaatcagctaaacattctccataagcagaatgatgatcaagcttaattttgataggaaacgtcaccaccaactttcataattgccaattaaataaattcctttttcacttatggaatagaccaattaataagtaggatatatacatacaa

SEQ ID NO: 23952 - DNA, 1525 bp, Cannabis sativa
agagagagagagagagagatgcgagaggggaaagagagaggtgagatttgaatgagggggtaatttcagaatatattaattgttgacctatcttacatatattaggtattttaggattaggggaaaaaatttcccctaatgtatgcataaaaaatcaaaattcccttaaaaattgtgtgagttattattgtaatgtggctactgtctagccatgctaaccaacatttttaatttttttaataaaaaaatatattgattggttagttttttttctgtgggtcttctatagcaattgattgtattgcttgccttgatgatggtcttatagagagtcaacttttgcatggttggaacttattttttttatggttggaatttattttttaaagtttcactccctattttagctagagtgtgtttagagaatatagttagagatactctaagtaatgagaataaatagtaacgtagtcattcccttatatttgttttacttacttattaaaattagaaaaaaaggaaaacctaattaaaggataaaataaaaggaatacttccctacaaattttgtaaggaatgtaaggtaggactgaatattttgacctggtttgatctggacccggccaacctccccggacccaactcggtcaacccgtaaaattaaaaaaaaaaactcgttctgttcgggcaggtcaggtccaacccagtacgcttttgggcgggttcgcgggttggttttttatgtcactggatttcgggttgaacccgaacccgcccgccaacccagaccctttttttaattattttttatttttattacatatataattgttaacgcattcgttaaccaaattaatagcctttttgcaataaatatactacataatttaagaatcataaataacaccagatattttacgtggttttgtagttaaaatttacataatccacgagttcttcttattagaaatattttttaaattacagaatacaaatctcaatatttaaaaataatagaatctctcgctatttttttgtcgtctcttttcccatagattatgtccctatttataggatataggtttggcagttattttgttgggattgatttatttacaactgctaatgaaacatggacattccctacgtttaatttgttcacacatagaataatatctaataactactcaaccgcttcttgaatttatcttttagacggttatgctaacttggaaggttgcatcttgtcatatttgagttatccttcttattcgttttgagagtaaaaacactaagccgtttggttggaggtaatgaaatggaatggaatggaaaggaaataattttcattccattcatttgtttagttgcattttaaagtattggaatggcattccaatagaatgctatttccactattttggtggaatgactataccattttaaaaaggaaggaaatatcattccaatgtaacaagagaaaaaatttaatgattttttttcaattttttttatgtattttaaa

SEQ ID NO: 23953 - DNA, 3140 bp, Cannabis sativa
accctattgcccacccctggctcctcacctgtgtctatggaccgtcataccttcattctaagaagaaattatggagtgagattatgaaaaatggagatcgatttagcggcctgtggctaattctaggagataccaattttgtgcttaatgagcttgaaagggagggatctagagggcgagattttttcattccgttcatttcaaacctggtgaattctcaaggtctcattaatctcctgattcaaggagataaacttacttgggacaaccatagatcggacagtgctcatgttaagtctgctctgaataggggcattgctaataaggattgggtcttactctttccaagcgctctttccagacatgtgactcatatcgtaggccgctttgtttatacttttggggacttgaaactagactcaaaaaaaaggtttcaagttcgaagagggatggacttgtgattatagaagcagcctggttgttgcccatgcttgggacactgtgagtttcccttgggccccgacacggttgttcaaaaagttgggggctactcgagttgccctcctccattggaacaagcttcagtatggaaagtttgactctactattaaagaactgaaagctaaacttgacagcttgcaaaaacttcccacttgtactagagattgggaaatcaagaatgctacaagaaaagcccttaacagggtggttgaaatgaaagctctttataggaagcaattggcccgcatctcttggcttaaagatggtgacaaatgctcaaaaattttcatcctctcaaccaaaattaggggtcaacgtaatgctattgaaagcatacttgataaaaatggtatgtaggtacatttgagggatctgatcggaaaagatcttattgagttctttagtggaatcttcataaaaaaaatatctcggtggttaattgcaactatttaattacgaatcacctatccaatgaggatcaagaaaatctagtaagacccccaaacaacgatgaaattcataaatccttgtttaggatgggaaacaacaaggcgcggggtcctgatggtatttctgcaatttttttcaagcattattggtagacagtgggggacgacttttgtgctgtaattttggatttctttagctcgggttcgatgcaccagggagtcaatgctactaatttggttttgatcccaaagatttgtaacccgactataactcatcattttaggcccatctctctgtaatgtgacttataaggttacctctaagatcattgcgaatagaattaaaccccttctccccgacattatatgcccccactgaagcagcttttgtgccagagagagatattcaggataacaatgtgattgtgcaggaaattatccacacctttaacaaaaaaagagtaagggaggggttttttgccatcaaaattgaccttactaaagcatatgataagctcagctgttagtttgtggatcatgtgatgagattcttaggggtcccggataaattctacaattgggtttcctagtgtataacaactactactctcaatgtctgcctaaacgggccatgtgggtagaatttatccctcttgcggtatttatcaaggtgatcctctttccccctacttgttcatatggaccgctgaaatcctttcaagacttatccaagatgccttaaaaatggtagtatcaaagggatcaaacttagtcgtggtgggccaaccatttctcatatctttttcccagatgaccttatcttggttggaagggccaccgtaggggaagctagaggtatgtggaatttcctggagaaattttgtgactggtcggggaaacgagtcaataagcttaaaatgactattttcttcagcaagaatacttcgaatatcttgaaagaggaaattaaattttccctaggaatcggtggtcctgtgggtgtccccaagtatttagggctaccattgtttcgatctagacttaaggatgcaaattttaatttcattgtggagaatctgacgtccaaacttcacgggtggaaagcgaaaactttgtccaagacaggtagggccaccctaattaaatatgtgggcttggcaatgcctgtttatgccatgcaatctaccaagatttctaaccagctgtgcttgagaattgatggtatggtgcgtgattattggtggggatttggaaaaggaaatcgtgggatccatttgagggctttggacaaactctgcctcccaaaatctcagggcgaccttggatttaggaaaacaaaagagattaatcaagcctttctggctaagtgggggtggaagttgcttaaaggatgccagtccttatgttgtaaaattctcgaaggcaaatatctcaaaggacatgatattctcaagtgtaaggctaaaatttcagattcttagttctagaagagagtggtgaaagcagcagacatccttaggaggggagcctgcaaagtaatcactgatggaaaagacacgaatatttgggaggacccctagatcacccatggcaaagagttctacccacaattgactaataacccatctcataattacactacggtgtctaagcttctaactgagtcaggtaactggcacactaataaacttcatgacctctttaatcttgagacggtcgttgcaatcttgaagggggtaaacctttgggataggggaaagatcattgggtttggactaaggaaggaaatggtcaattttcgagcaaatcggcctacttaatccaagcgctgcaacggtcccctcattgtgaggttgccccatctctttggaataaattatggaacaacgggattctttaacgccataaagttatgtggtggagtgtcctttcaaatgctctaccagtaagggtagctttactcaaatgatttcatattgctgacaacacatgcccgatttgtggagttgaggaggaatccatggtgaacctattccttcattgtaacctggccttccacttgtggcgctcatcaccgtggggcattttcccagttttttgaatagggattcatatgtgggactgggtaaaaattttgtggaacctaaaaagtagagacataaatgtagatgaggttttcctttatgcctc

SEQ ID NO: 23954 - DNA, 6347 bp, Cannabis sativa
atggtatgggaggtatgtgttttattgtatttgatgctctaaataaatactagatcttggctttaatgattatgagtaatcgttattttaacagtttatttatttattttttttaaacaaatttatcatatttactaataagattagagagaaaaaaaggaattaattaaaatccttaaatcctaacatcattttagaaatatatcaatagaccatgtgagttttttcttgaaaatagtaataatatgtttttttatcaataaatggacatatctacatgcttttatatatttaaaattaatataaatatatatatatatatatattcattttggttggtagaattaattacaatctccttcatcttacattattaatataatttttattattattatttgttatctaatatattaagaaaatacatttacataatttgcatatgttgttaagcactacttatcaccaatcctcctcattaacaacaaagttgaaaataatattttcatttagtttaattgaaaattaattatttatttttattaatttatttaaatttttaattaaagaaaataataaattggtttgaatgaaaattggggaagaatgggaagttggtttgtttgtattgtccaatcaaatggaagattaagtcttaaaagtcgtttaaatgtcaaatcctttgagaaagacttttttcaatattaattgaaaattgacaattccatctcaccttactcttactctctatatatatatagtaactgaattgaataaataggtttaaatttatttggtaaaaagttcataaaaaaaaaaaaaaatggatgagtgaaaagatgaattgtatatgaggtgtggaaatttaataaagttttcggtctcgattgaacttagtatctcgagttacgtggttcgagatgttagattcaatcgagccttacaattttacttgtgtaaatataagagaaaagaatggattattcttattattgtttgagtcgcagttatttaaataaaatatgataattttaaaaatatatacttttacaataatttttattttttctaattttactgagtggactctaaatacgtgcctaatgacttagccgaagaccaacattggttatgtgtatacttaacatttgtttgataagttgaaaaaaatatagaaaatgataaataattattagcatatttgtaacaatttatgataattagtcatattattttgatttttattaattacaagaaaaaatgtttaatctcatgtcaaagacaaagttaacaaattttttttttaaaaaaaattattgaacatatgatatttttcttttttaccaattctcgaaatagaatgttgtagtcgaaactaatattatataaaagaaattaaaattgtataaaaccataaataaataaataaataacatcaatttagtttgagaattatcaataaggtttatttaaattatttcccccctaaaattaactaagtaaatagaaaatagtgtattaaaagtactaacattattgaccacttgcaaagttaaaagacatttcaaatttatttgagtagagtagaattttatttgtcattgtcaaatttgtttgtctttctctatcaaaatcttttttcaaagctttttctaatttaatatatataaaaatattataaatatatatgtggggttaggtgaagttctataattaatttagttccaacaaaatttattaagattagaagtaatccttactaaaaaaatcatggacactttgattttttacattttctaaattagaggttttaccaaaaggattaaaatgcattttttttttaaaataaataaataaataaatgtttattttcaaaatttgaatttttaattaaatttatatataatttcaaattatcaatatataaactttgacattatatttaaggtaattacccgtttaaattctatgtttaattaaattattttggaccagtatttgacaaaattaaaataataatataaattatatattaatctaaataatttcacatatcacccaataattaaccttataattattatttataccaaatttagtacatggcattatttttaggggaatttttaaatgtacttttttttttatgtttatttacaattttacggtctaaaatctttatttataaaagtatgtttataaatttttaaaattataaaaatacattttacttaacgaaaagtaaaaagaaaaaagaaaaaacaaaaaatcaatctcacgacaactataaaataacgaaaaaaaaacctcaagacaatgataatacaactataaaataaccaaaaaaacgatttattatttcaactgaatagatatttttgtaaattaaaataattaagcgtaaaaatgaaaaatttacgcgttgaagtattttgtaatttttctaaataaatttaggtcaattatgtaaaaaaaatcttatttttatctattttttaaaatgaaaaagaaaattacaagggtcaaaatgtcttttttccataaatttaaaccttattagaaaaagttgcataaagtaataaattaatgaagcacagtccaactaaaatggcatataatttaatgtaacaagattattatggatatatgatttatgtagtaacataatatattgatattttatttttaaataaaatggatattttcaatgattttgaaaaatcagccattcttttaaaattatactttttttttcttctaaacattaagaattatttaattaaatcataattaagatgatataatatcacatgggtcctcaactattagcatataatataatctcttaattttattatttagtaaatataaatactaaatactctgtatttatggattcccaatttattttgctgtcaaattttggtattaaatattaatgtgaataatgttaagggggcatgtgttggatattaaaacaatgaggccttctttcttctttatgttttttcttgactatttaatttttctatctcactttcttttcaatcaaacacaaattaaaattaaaatgacataaaaaaaattaaaataatttaattatatgttcttaatcttattttgaacatcttaaattattaaaaaaaaattaaaacttaagtaatcataatacctataacgtacacgactataaaaaataaaataataaaaaaactctcttaaataccgaaatagataaaaaatctgaaacaccaataaaatatggagaagtatagacatgccctaaaataaattataagtacaagaaccataaatcacacttttatatatataagtaaagaaatcaaatatagctaaagatagaatacaaattacaaacaaattaaattcagaaatctgatttacaaacaaatctcaacccaagaacaaatatcaatatggagtgagtgaggctaacaaaaagaaaaattaaatacataaacatatttatatatatatatatatttatataagtggcaaggactagaagaaccaaactaaagggaattatataacacttttcttcttcttcttcttcttttttataatgtacttttctcaaataggtaaaacttttctcactaaatcaaagccacacccattgccaaagctttcatttcaaacctaaaaagataataatataaacgaattcctaataacaaaaaaagattaaaaaaaaaaaactatacaccaaccaacaaaatgaaaaagatttttaaggatatccaaccgtcttactcgctcgctcgctcattttcatttccaccaccaccaccaccacggccacccataaccgattgcccattgctagtattagcaaagcattgttaagtttttcgtttaaacatgtaaaacccgaaaaatctaaacaggtatcacgtcgtgtttggacgtgtcttcacatctcaaaacaacgccttcaaggttggcgggaaagatacattgaccccattgacatcctgttgttaacggctcgggtggagggacgatcatgagtacattctcgtttctttgtacaactcccatcacgctaaccgtgctaccttctttgatgtacctacaaaaatcatcattttaagattggactcatcaaaggtaacacattcaatgattttgtttttgtttacccttctttcaatcgcattgtacggtcatcactcgaaagatttctctcggtcaaccacctcacgaaacctggagacatgtcttcattgcccgggttaacatcgataacaaaggagtcatcgacataaggtgtcactcttgccccgccacccgtcttgactaatgctctcaagccagattggaaatcggatatgtaaaagtccacaacatgtctctgagataaaaaaaaatgagaaagatttcagttcacacaacacaatatgtgagatttataaagcttccttctttttcttacaaatatagcctaagcaaggttttgtattgagataaaattttgtgtgaattacaccgaaaactaatattgaaacttcaaaatttatcagtgtgttcgaaaaaagatgggctatagaatgatgtaagtaagcaaaatagcaattacacacctcagaggatctaagtccccacgtgaagcgacgatgtgtggaatttgctggttttgaatcccatcctcggtactcgtataaactcgttgatgtatagacacatcttggaacttttcggaaggatgactcgaggggtacattaccacaagtaacaaccttcaagaattacaaaaagagacataatattgtaattggtagcatgccattttgtgcatttgcaaaataatcgaaaatgagatcacattattatgttctttcatgcctaattagccaacctatgaccgaaaccattatcatttttctacctattttctactctataagcctcactaatatacaatacatagttacatttccaacgttaactttttcttcttctttttttctcttgaaattgaaacaagtgtcgatttttttaggggggcgccgagcccatgcagtagtgcaaagaacgaacaatactcaagagccccaatagcaagctcgtgtgagtcaatggcccacacatcagatactaaactgataagaacatatactagcatttcataacattgtagattggattgtatgtagaattatatgaaatttatagagtaatgcaatcaaggtaaagacaagaacatagtgattatgttacttaaacctccaaacacaacaaagattaaataaaagttaaatctatgaatggaagaaaggaaaaaactttatcagatttcggtaagcaacataccccggaaactttgacaagttgtccatttctcgcagttctaagttcagcgtcgggataactagtaatgaaattaatgacagctcttcttccccaacaagtattccaagtgaacaatgcagcaacagcaccgaaaagcaccacaacgacgatgagtagaatccaattgtgaacagctccaagaatgaaaccaccagctatgaaccccattacaaacaacagaatcacagaccatagtatcgactttggaaagttcctcctgaatgaatactcatcatcttggctcaaagtagtaacagcctgattatgaacaaccgaggagccttgtcctttcatggatcccatcgagtctaaaggacccgatacctttctaggagcccccgacgagttcagtggaccagaagttattggtccagatgtaattagccctgttgttggaagaacaggaatagggcctgaattttgtcgagtcacaccgcctgattgaggccccgacgacttctttataggttccccgtgtttgttcaatggtccagaatttgtctttttaactgaggttgaaccaacccctgaagatacaggtcccgaagtgtaaacaacccgagctgaagtagatgtaattggtccagaatgtgaagcagcgccaccaaacgatccagtcctcgaaggtgcattgcttataggcccggatttcctagacttagaaccatccattgggatatcaaacattttccccaattctccagatttttttatatcgccaccagtataaggcatggctaccgagctcatagtgggagtcctttccttaggctgctcaggtcggcctgacacatagagcccattgctgagctgatgagatggaaatcttgaacccatgattccttcttttaagaacaaaaaactgaacaaaaactaggctgcaatgctgcagtgatcctcaaagtcctactgttaaacaaacaaacaccgagctttgattaaaaaccgaacaaaaactaggctgcaatgct

SEQ ID NO: 23955 - DNA, 1337 bp, Cannabis sativa
gcagttgtagagtggacaatgcttgaattactgaaaaaccctaccgaaatggcaaaggcacaagctgaagttcgacaagtagtgttcgaaagaaaattaggtaataataatgttgatgaaacaattctccatgagctaaaattcttgaaaatggttatcaaagaaaccatgagactacaccctcctggtcctttattagtcccaagagaatctagagaaaattgtgttatgaatggctatcacatacctgcaaaaactaaagtacttgtcaatgtatgggcaataggaagagatccaaagtattggagtgaagctgagaagttttaccctgaaagatttattgatagttcaattgattttaaagggaataactttgaattcattccatttggtggtggtagaagaatgtgtcctggtgtatcatttgctatggctgatattgagcttattttagcacaattattgttccattttgattggaaacttcccaatgggatcactcatcaaaatcttgatatgtctgaggtttttggcatgactgtgagaagaaaaggggatctctatgtaattccaattccaatcaataattttagggtagcatgttgatgaataaaagtacaataatgttggtgtttacttttttctttttttttttatttgaaaatgtgctttgtatgttgtataaataaattcaaaataaaatgcttgtcactatgtatagtgactactttgagtagtactaatgagacactactagaaagtagagcttttacatcgatttttactcgatctttcaaatagatagctagaaacaaggctcgttaaagccttgcatgcgtaaatttaaacccactcaaatattgttgggtttcaagttattcttttactctcattttctcttctttttattttttcattcctcacgctcaagcctacttatcccccgcgcactcttctctattgtattttctcttgaggcagtcagtattcatgggagctcgaaatagtgggttaatggaggaggttaattaagatagtcagccttcacgttcatgattcaatttataattattagagagtcctacattgataatatgtaaaaattaataaataacatacataagatgcatgagttaatattctcgctgctcttacattgataataggtaaaaactaaatattactcgtaaaatacatgaattattcctctaagtcccacattgataatgtgaaactaaatatcatatattgatatagagattaggagtaattgctttgttttttaagactttttctttagcaattttaagttaatttgaaacatatttaagaactaa

SEQ ID NO: 23956 - DNA, 3027 bp, Cannabis sativa
ttcaatgctataaccaatggagaagcaagattagtaaccaatctgatattgttgccccaattcagagattcaatatgagacaattacttaagaattcagagagagtgagattgagattcttaagaatgaatactagcatattataaacaagaaccactcaatcgaaccaattgtttcaacatatctaattgatgaaaaattaaaatgcatgcagtcaaccaatacattgattaagctagctaaataacaataatactactaagatcaacacaataacaagtaaatctcacatcaaaatcttttttaccaaacatttcaaacaaaacagagaacatctttcttaaacaaagcaaaaattccacattaattaagatctctcaatgacacccaactcttcaaaggtcctggacactcaaacctacataagaaaaaaaaaacaagcaaaaactgtcaaaattaaccataaaaagaaaaacatcacacaactaaaacaagcatttggtagttaaattaaccccatttcaacctaaaagaacaaactttgagtttgagatattttaaaccgtaaacacataacctaaaacagctgttgttgttcattttgtagggtaatttacatcaagaagaaaaacatcactcaactaaaaaaaacaaacaattgaccctcatttccaattggatttgccattttaacctaaaggaactaccttttagcttgagatattttaagccctaaacacataacctaaaacagctgttgttgtggtttaagaagaaaagtaaagaaattgaggacgttttttttacctgggggaagagattgcttcaacttatcggccttctcggaatcaaagacacaaagagtgtagaggtactttgagcaacgaaccttgaacttgaccacatctttgcttctcttaatcttcaccgaacgagcatccttcctccgagctgtcagaaggaaatccttgatctcgtgaatttgcttcggctgttcggatttcaattccacaataacacaaatcaatcaatcaatcaatcaaattcaaaaacactttctttatcaatcaattaacacagaaaataataagagcgagtgaaggtgagctaccattgttgttcgcgaatgagatctctccttcttccagggaccaaagaaatatggggcagagacagtctctcgcctttatattccacgaaacaaaaccctagctagggtttgggtgagctgggctgggctgggctgtacactctttcttatttgggcttttgagttaatgggcctagccataactacttctttttcttcatctttaacgtaaatactacggtttgtttcaaaaatatacaaaaacaacaaaacaaattataaaaatacaattgtacgattaacacgaacaccacacgattaaataatgtgtcaaaaattgtaattaaacactaacattacatagttataaataggttaacccattatgtaaggaagatgatgcttttcttgacagctcaaagtcgacttattagatctatatggaaccgaaaacagtgctccagctcacaccctactcatagctaattaactaaataactaactcgtacttattttgttacaagttaagtagtcttttgtatagtgaattggataatttcttttgattacttaattgttgtattttttttctaatatttcaattcagtgaagttaataaggatgtttcaattcagtgatatttcatcaatgtttttacatgatttatacttttagaattctggttctctggtttactctcattgttgttaaacttatttggacaagtgatcttgagtgttgatcatcttgatatgagtaaaggaattcaataaatgaaggaaaatatattcctacttaattagctttgcagtgattagtgtctgttatgccaattttttttaggtcatttgaacccctgtatataggtatattttgatagataatagcactaataagtgccccttttatctgtagtttatctggtaatgttttttcgaatttggttcatagtttgattcatattttgatccttaatttattcttgtgtgttgaaagaagagtaagagaacccctcaagaatcacaacaattcaagaaagatgtggaggaaggaagaagcacaatgattgcaccattataaatcaaaataggaataaagctcatggtaaattccacactcatgctactgttattggtgtacattaaattcaagtatgctaactttcaaaacttgttattctaacatatatattatatattcttctaatagcactaatatagtgccttgttaaactctatatagaccatctattcattagtgctcaattaaattggatgtggccactataccaataaagacatatgaaaagtctaacttaaatatcatcatctatataattttcttagaaattttaagaattaatatatgtatagagacaacagttgaacattggaccatgacatacatattcatttatattttgagaaaagttattgttgtgctgcatataggatcaagagtacagtagtaaacaacgaaacaatcatatcctagagctagatttattttattttatatacaaaggttttgatcatgatattttatatatgatataggttttggtaatatgctacaatactgtctctgtttctattatgtatgctagtttatatatactagacttgagttcatgaatgaagagaaaaaacatatccttcgaaatctaattccatttaacagcttacttgattatttgtggtatttcctttttgttgcttgggggcatctttttgatctactatttttttagaaattagtttgtaacatttcttattttaatttaagattattgttgtgtacttactttttttttatatatttattacatattatttaagatttgtaaataatatatttattttggtatagaactttattaatggtcggtaaggattatatacactcactaattataagctaagcttattgtatgttgg

SEQ ID NO: 23957 - DNA, 2514 bp, Cannabis sativa
taaaaataagataaattatgcatcaaaacaatgattttcaatcaatgaacatcacaattagtcaaaccttgttttgggaagttcacaactatagttacataattcttgaactcaattgttcccaatcccaacattaatgaccagaactagcatgaaagttcatttcaattggagatcaatctcatcaacttatatttcaaattattgaaagtacacactacacttgacttgaggaaacccctacatttctcttcaatcatttaatataagtatacatacttctatatagctttatatataaataaaataaaaataaatatatgttactaaaactagtcaaggttgtccaagaagtgatggcctgtagaacacatggctttgtgcaatctcaattcgttccctcggatcgttcaaggtttcatctcttaaggcttcaagaatggcttgcggcgattgttcactgtaaatcaaaacaaaaaaagattgaaaatcaatcacaaaaatttaggtttaagttttttttcgaggggagccctaggctgagtgaaccttgcgcgcaagcctagcccgtcatagcccagaaccgaccctcttaagacttataatcacagtcgaaaaggagccaaacaactttgtaggttacatgaaatattacattggtgcataatatgattatctaaattaggtaagaagctcaggtcaagtaaaatcatagcttgtagaagaagttaccctgttatcaaaattctgtaaagcatcttcaaaatggggcatagctctacaggagcaacatgcttcttctcttcgggatgcaacatgttcaggctcgattgactaagaagttcataaaaagctcccactgcagagacaccctgcaaataaagataccgaatttggtacaagttttcgaacaataaaagtgaagtgaccgaactaaaatcaaacactatccggtttagaaactgatttagttgacaaaactgtatctatactttcttcgtttgtctcaaaatgttttgctattttgaattcagcaacaagttttaacagtttctaaagaatgtagtgagtgaatatacctgaatcattccttttccactgatactatcgcccatatctcggcttagttcgcccttggcaatcatttgtccataccaagcgttacgaccttttagtaaggtaacataagtgtcagccagcaaaggccctgcaagtttctcgggttcttccgccaacaaatgagtaataaaaatcatctccgaagtacaatgagcaaaatatacagatttgctggtagcactctcctttgtgagggctgctaccattcctgagatcaaagaaaaaagatagagaagttaatgcatgtaactttcacagctgagttcaatacaatcactatcgaaatttgaaagtacttttatgtaaccgaacctgctccaatggcatagacatttttcaagccacccatcacctcatgagtgacaagatcactgttgtcccaaacaataaaatgaggttgtcttaggaatttcgccagaggttttctccacttttcggatccacatattcgagcattagcatattctttgttgtagatttctgatgcaatgttcggtcctcctagatatagtatgttctctataggtactccagctgccaatttagaaatctaatgcttagaaataaaacaaagggacatggtttccgaagtggcatagcagacgaaatagctaaaggaaagatctagacaaccgcgaataagcaactaaaattttcactagcattgactttagacgcaagcaacttttgaaacaaagctggttttgaattctgtatagttaaacaacatcaagattaacaatttctcatcaatgtcataacaaaaacaactaaattttcataagcattgactttaggcacaagaaacttttgaagtaaagctgattttgaattctatatagttaaacaagatcaagatggcttatgggaatatatatgcattcttcaagctaatgtttgtatgtttaatgctaataaattagatctcgggtagcttaaagttgttaaataaactctagtactgcaactatatttgtgactcatggccaaatatgtaaatcgtttcgaaaaatgagcgggatgtgactgaagggagatatttacaatgctttttatagtttgagggaacttttgtaacaaaaaagaaagaggcaaaactctataaggatcatagttaagtgggaaaaatcatatttattctgaatatatatatgctgaaatttgtatataagatcagtagctcttgaatttatctaatacagttggattggatataaccgaattcggtaaagcatcttccatcttttgtgttagtcctagcaaaatccaagaacaacaaagagaacaatgagctataaaactataataagaaagaacgaacttgcacgtttaacaactaaattttcactagcattgactttagacacaagcaagctgattttgaattctatatag

SEQ ID NO: 23958 - DNA, 2905 bp, Cannabis sativa
taagaatacaattttcgaaaagtgcatattaaaataaaaaataaatcctggttgagatattctaaggaaaaatgcatattgattaaagatatttcaaattggttgagatattctctcgaagttagttgagagattccctcatctgaaataccagtaactgaattcggttatagatattatttaaataattaaatatgatatgattaatgggattggtacaataggacaaatcaataggacactatagaaatttttccttagaataaatagaataaatagattggtacaatctaacctagtatcagagatatccagaacctaacagatcgcctaccgtgtcttaattaagacaatgatgatgtcttttgtcgtgacaacttttgttttaacaaatattgtctttacaaattttatcttaacaacttttatctttttcctattttaattaatttaaaaaattatttatttattacaaaaataaataattaattgttaaaaagggtcttattaaacaaaattaattttttttgaaatatatagttaattataattaatttaattttaaaaaataaatttttacctatttgtaatctgttattataaatcaaacaaaaatataactattatggttacaataaaaatataaccatttaatagttgcatatagataggatatgtttatggtaggaacatgagttttgttcctatgatagggaagcttttacaaccatagataataaatctaaaggtgataaatcaatgagtgtataccaatagttaatatttagaatgtattagattatatgtaaatttattttataatagtattttaaaattaataataatttattaaattaattaaagtatattatgaattaattaatatattgtttctattttttctattttcctttcacttatcttcaccttcttccattgaagatccttaggatttcttcatcaaagaaactttcatctatggtaaaatattttcttctctatgtttaattataaaatcataatgatcaagtttaaagttaaaatcaatttttaatccatctcattttcttcacttactcttgatattagtcctcaaaagctataaactactttctctatatctcttctaaaaaaatcccaaaaccagaagacactacaaaaaactagaaaaaaactccacaaaattgaaaacggaggaatacgaattgggactaatttgaatcgcataagagattttttgtgtcgtctgagaagatacagaggttagtttgatcaattctttttacccttatcttagttgtatttgttatatatatgggcacttcttatttttacttttattttcaaagaaaaaatgattacagtgaaagaggcatccttagctttaagttgtttattagtttgcttcccatttatggctaacaaacattctttgtttacaatttttcctttttcttttttagactttttatttgtctactaatccatatgatatgaacaaggaaaagaaaataaaaacttgttttgttttgatttgcacagaagaactctttcctgaaattaatggtagttaagccagatttcaataacaaccaattgaagctttttactgtattcattttggtgtgagtattttctttttaatttttgaaaaaagaatatttaatttgatacacttaaaagtcatgtaaatgaatggttaaaacaatgtctctaacaaaaccaatattgttagaggttgaccgatcatatcgctcgaaaccttgttctttacctcttcatatattgattaaattttatcaatcacgattctcaatcagaacttgaacccaaaagaaagtagatccatgcattgcatggaaaagcgaggtcgtagagcttgatggagccattggctatggtagtgacgagtaaggtatcagcgatgttgtacgatcatgatgatcaagatgaccgcaaccacctttcaccttctctttttcaccacttcttcatcaaaatcattagaatcatcatcgtcatcgtcatcggagtcaaaatctccatcatcaatatcgaaatcagcatcgtcgggatcatcgtcctcatcttcatcacgatcaactacgctctttggtcccgcagcatgcaaatcaaaagcagattgaagatcgccgccctggactcggggagcggtttctgagccttcgtagtaagcagagactggattaggtcgccgtttgagggaacaacataagaccgggccaccaggcttcattccaaataagtggatttatattgggcttttgatttcccaaaaagttacttggattgacttgggcctcaaatttgttttcttactggacaattgacaatgcataccattttgtttctaaaaacccgaactatagtacttatttccacatttacccaattcagtattttgctaattgaatttttgaaatgatggtgtttctctctcaccatatttttttaatatagtatatattttttatggtagagatggaatctatggtaagaacgaacaatctgtaaaacaaagtaaaagaatatggaagtttgatttggtaggtaacctgactgagtgtatgtaagtaatggtagtagtgaaatgagttttagtgtgcaagagagaaaattcattaagagaaaatcttattggatgtcctgcacagtgacatatcaaacccaaatatatagtagataatatttagaacatgtataattgcgagtagttaaatcttcttgctaaatatcacctacattgtaagctattatatttcttgattttttatattcattctaccaatcgatttattttagattttagaattgaattttgttacacatgtaaaaattagtcgatatactaaattaattatataccactcacaattctcctaac

SEQ ID NO: 23959 - DNA, 2336 bp, Cannabis sativa
tatatatacaggtttgaagagaactggaaagagctgtagattaagatggctaaactatcttcgtccagatgttagacgtggaaatatcactcttgaagaacaactccttatccttgagctccattctcgttggggaaataggtaaattattactcgattaattaataatctcgattaaattatttttaaaaaaatagtaattaataattgtcaatatttatgtaaaaatagatggtctaaaatagctcaacacttgcctggaagaactgacaatgagataaaaaattattggcgaacaagagttcaaaagcatgccaaacaactcaaatgcgacgtcaacagcaagcaattcaaagacaccatgcgctatctttggatgccgaggcttgttgagagaattcaagccgcctcctcttcctcctcctccaccgcaaccccagcgagcgtcggccctacccccgcgaccacctccactactcttcctaataatgataataatattcaattcaacgcttttctcaataatcagtctacaccactaccaccaccgccgccaccatcagggtcagggatcatgccaatggtaagtagtaataataataataataataataattacacgccggacaattcaagcacggcggcttcttcagactcgttcggggctcaagtttcgccggataataataataattattacgttccaacaatggtgaatactaataataataacaatgatcattacagcttccaagttggtaattacatgagtactgattattataataatcatcatctacaacaacaacaggctaccatgatgagtgatcataataataatcaagtaattcatcaattagggtttgatgatcatcatcatcatcatgatcagcattattataatcaaggttcaacgttggagcaaaataataattattacaacaattggaacagttctactacttctactgatcatctagaccaatgcatggacccttctgatgagaatttatgggatgctgaggatatttggcttcttcaacaagctcacttcaacataaatggcaattaataattataataatatatattttcttcttcttcttcttcttttaatttaattagagagaaaaaaaaaggttaataaattaattaattagatgaatatataaatatatggaggggagagtaatttaagggagtacttaatattagtgtgatcatctcgatcgatcatggatatttttcaatttcattgaaaaaaaaaaaaaacaaattaagataaaatgaaaatatcttaatttatagtacatatattcaaaactcatgtggattattattagtactatactactactactcacacagtgatcagattgtactttgtataccccttgattttttttttttctttcttcctatttttaaattgggtggggaaatttttaatgtgttatttctttatttataatgtattatttcaattctttgaaaataattatgtgagtagtagtacttctttattaatttttttttttatgacatgaaagacgtgcacatataattggttccaccatcatacatacacaataatatatctcaatatatataattatatatgcttgttaataagtattattatagtatatatataatgctatatatactttttgaaaaccttgtccacggggcctgaaccagaattaaagtcctaatgtttctagattgctaaaaggtaataatttgcaatgatttttcatacgtggttcgataatattagttggtttaacaagttattaacttaaccattagctacttttttattattaaaaaaaaaaaaaaaaacaaagttattatctttatcgtgtgtagagccatttagcccacttaagtacgattctaataagggctttttaaaaaagaaaattaataaaaaaaattctttttggtaggatgtcgtacggacaaaatgcttagttagaacccacttaacaagacaaagaaatgcattatatcatcatgtacaatatttccaaaagttatcttccattaatttaattaataataataagttaaatacttcaatatagtgtagttaaggccaactctaatggaacattaaaatattaaatttgataaaattttagactaaatttattttaactacactttaaaacttatcctatttatagcattatttatagtgtcccattattattagtgtaacactataaactatatcaaatctttatatgttagtttttactatttaaataatatatatttatacttaaatttttttatatatttattatttgtattaatttataatttaa

SEQ ID NO: 23960 - DNA, 5035 bp, Cannabis sativa
ttaaggaagttaaccaggaaagcaaattgtcagagtacccaatgacaaattacattacaagaaacaatattacaacataagatgtgatttgtcttgtgtaagtaataaaccaaagatattccacttacaaatgatcaagcattttatagaagacatggtcatgtaaattgatgcctaatataagtttttggctttcattagtgagctgcagtaaggatacttacatactccattccacctaatgaagggtacagccataatatcattgtaagatcagcaatgaagtatccaacagagacctgtaaaacatgcataaatgattttagttcataaagaagaatcatcaaatgagaacttaagttctttaagttaaggaaaactacgaaaaggaatacgatccaagattacagctgagatacataaaactaaaaaaatcagaaaaaaaaaaaagttatacatagtttaatccctgatcaaaggtcattttccagatttaatattgattgtattctttttcttgcatttcttttcacatccattatgattatatgtcctaacttccccctatgtaattaaagactttcctcctatatatgtatattttcagagttaataagtttttcatggacttcacgcggtgccactgccaaactacctgtgtattccacatgcactatgttgaaatgagaggattgatagtgacatgaacatcctgaccctttttatgcctcctagatttttgcaatggtcaataaccaatggtaaaagatacttagattcttatttcatcaatgaagaattggaaagcttaaacatttaagagcagacctaattaagggggggaaaaaagaaaagtaagacattccaacttcagtacacatgtcttagtacaatataactagtaatatagcaatacaaaagataaatgcagaagatataatgtttcacacatatgcagttccttactctcacttagacaccatacacatgcattttttctggtggttatcatggacactcatcctcaccaattgggtgggctgaatgttctgttggagttcactggttgttgactgtagtgaaaacgtagatcactctcatatacgtggtggtaaaattttagcactttcgaaaattagttgaacaaatttaatgtccatcaaattacacaaaaggtttacttaatcccaagcataattaattatggaagtattacaatacgtaacatggagagctgtatagaatggagtcaaaaagttcctgtgctagttagcttctatagtcaagaaactcttccttgttaaaagattggataaaatagtacaaaatcaaaacaatagtccactcaatcaatcagtcataaaaagtaacatgtcaatatttgattcgccatttgcggcaaggttatctaaactagaagtaacaaattcttgcaaatataaactaaagctgagtaacctacagcaacattaatacaaaaagaaattaaacttacccctaatgtaaaagtagagaggggtgagcttcgaaatgtaataaatccagctagtcgttgatcagagaaaagatcagacaagaacacgaagtgcagcgacataactgtgatgaaaaccgcatgaacactggatatacctctgccaaaatcaaattctaacttagcaaccaatgttgtaatgactaaaaaagtaagaaatcttatttattgacatctggaatgaaggaagagaaaatcaccgattgttccactcaatttgttgaatttttgtaagactagcatagttcttgaagtagtacgcactgaggtactgagttagatcataaacctgtagtttataatgagttggtataaaataactaagcagctggccgtgaatgcaaaagggaagcacccaattttcataaaagtcccaaataaaaaagaaataagaagaatagagaaagctaataatataccaatttgcagaaaaatatgccaacaagaacagaagtgtatggaagaaagggatcagcaagtaaatagcttttaacaaaaagtcctgcatgattttggtaagacttgatagccataactgtgtcttgtgagatagccatcatgaatgtattccttgtcagatcttatgcttggccaacagatcttattccttcagtaatttcttctacttttatccactcttgacttatgattttcatttcttccttaacagaaacaaacaaaacatgaggagaaaaatgattaaaacactgtaaatgtaaaaaacttttcatccactttaatactttcaggaaaattatatcaatcaattgcatcaacaaaattcaacattatcaccaaaatttggtttgaattactgggaattgtttccctcaagagtcacaaatacagtaacagtttactttgtacaacattgttagcatgagataataactaattcaagcttcactaaggacaagagaaattcaacttgacttttttctttttttgacaataaagatgtacatctagagcctcagtaaagtatcccattacataaatgtatgaccaagtcacctcataatagcatatataccagcctggtagctaaggtgagatatacagttttatctttgtcttgaaagagatataataaggtcagaaaccaacctatagacttcggccagggttttgaatatctgataagtttaatgatcagaagaagaattgtcattaaacttgaatcaatgtgtatcatatattttttcagaactcgagtctttttttacttttttttgaaaaggagacagctgaaatgtctaggactgacctcctcctaactttattgagaatcgacacacatggtggagtggaggaaaaccatggtaacataaaatccagggagaacctgctattaacgaaacaaaacctctactgactcagaacgaaaaaaaaaagaaaaaaaagcatagtctcctaattacacacaaccagaaaaaacatatggaaactagtaaccgtcagtcttcctaccatccttctaaacttctgtttccttcaaggtaatgaggatttatagtttatgcactaaaaggatcgagattcacatttatatcgagaaagacactctcactactgatattgatgttatttgttcttgttactgatatttcagcatccatctcaataaacccgtcttgaccatgctcataattattacattaaattgtagagaacacaattcatattattacaatcccatgcctttaccttgtgaattaagctataaacaaaaatgaatcagaaactattacaagtcatactcatacaataaaaactatttgaatatagccacagcacttgtattaaattttataaaaacatcaatctcttatgtttttgtcagagaaaaaccaatctttagcaaaacaagtgtttttaccaccggattctttgaacacgatatgcagatagatttaaaaaggcatacactctaactcgaatatcacatccgatgaatattaaggagttaggactacaacaccttcccctaaggttcttaaggaaaagcataaactattttcacacaaagagtatagttgccactaacacctcttacatgtacggaacgagaaaacaaaatggaactttgaactgttagaggactggccatgaccatacttgaactaactgaacaagaaaaagtagatccaacaagtggaaccaaatgggcacatcagaatatacactaaaagaaccaactaaaaacaatgcagtgatgaacaatatgtcctctttaaaatatcataaacctgaaagttcaaggaacccagaacttcaaaagaactaaaatcagcaaagaacctcccaaatcaggtcatggaaaccttaccataagcaggaaagcccttaatattgcagaagaatccaaagtaaccaagtcaaaagatcagacgaaaatgcaaatgggtattggagaccaatgcatagccaagagccaaatcaaccgccaaaatgacgaaaaaacgaaattccagaagaagaaacctgcaaaaatggaggtgggtcaactcaaaagcagtgttaaagaaaaaccaaatgaagcaaagaacaaaaattaatactcaaaacccattaaatgagagaaaaaataaaaagttacaggcaaaagtgtgatcaaacgtaggagtgcttgagcgaaacgaaatcaacaaacaagggaagatgaaatgaggagaggtgggagagaaaggtgaagggaataattagatgaagggggcacgtggagggctgtgattggttggatctctattcgggtcccactagttggtgttttttcctggtttagttttatggttgagtacgagtcatttgagtccttgtggattgaatttcttgtcatctgatcaattcattcatattgggaagttgaaaacaggaataatgtgatctcatctcattaccaaagaaacgttatagcctcaccttcacctaagaataactctacgaagctaagtcttttaatatatactcaaatttaatataaaaattaataattttattttatgaacaaagtaggactttaattaggtatgttattagtgtgtttacctgtgctaaatctctttatgattgaataccacacttcccagctggcttttttttgttattttattgttaaatataatgaatatatttttggtgtggtgtaacttcagcatgaaattgatagaatttattttaccttatcccattaaaaaatgctaaacacatcctgtttataaatacatacaacagattccctaataatgactagtgagataaattaataaattagaccaaaactttaacatttggatgtattactaaatgacaattctcctagctaatattaaaaaatatatggagcccataatggggtggtgtggtgtagtatcagttgctagtatcagtagtaagggataatataataaggcataaattagttattttattactttgaaatatctaaccggttgtttaaaaaaaaattatacatataaataaattatgtattttagttat

SEQ ID NO: 23961 - DNA, 1928 bp, Cannabis sativa
  modified_base (1710)..(1710): a, c, t, g, unknown or other
aaaaaaaaaaaagttaatatcattttaaatcctgtatttataaaagttaccgattggactctatgttttgttaaatgataaaaagaaccttatatttctgaaatagtataattatcaccctgaggttaattttcaacaactttttttaatataactaacttgaagacaatatctagcacgaacagatgtaaaaaaatggaactagttttatcataacacttctatatcaggttattattaagttttattttgacaaaaaatcagttcaaagtactatttagtattgtttaccaaaatatttggaaacaaataatttaaatgtaagagctaaagaattataattcagaaataaaaacactcacgctttttacatggttggggtgttaacaagtcttattccacgagtcaatattattaagttaggttagaaaagtcttagggattacaagaaggtatgagcactctatattttgcctgggcaaatgagtaaagaatttctagccatttgcatgcagggttcgttacatatttatagtgtataaatgtcatactagtcacccatttttcctctaatgggtgtaatatttactttgggtttatctggttaagcccgacccatgggatgccttgtgtatcgctgatgtggaaaccacatcacgataccagttgtcaaaactatgtcatattttcgtgggaaataatgacacattaattacttgattgtcaattaccatctttccttatttggaaagatatgatattctacccgagattcttaaaaagaaatatttgatcttgtgcgatctggtagtaaataggaaactatattaggctttcagatactcgctagaggcttcttccttccgtacactcaccgtgttggatgggatctcgactggacgagttgctcattcttcacccgaaaggactgacaatttatggattcgatctagttatctcaatcgggcccactgttgggccttaagtattttagttttatttattatgtgaatttcacgtgttcctagccgaaaacacggataacatttaccccccaagcttccaaaatttcgagggttgcggaggcttgctccatactgcacggatggacaggtggagagtaaaggtgaaacctttaaaaattccaatttaccttcatctatggttgacatctttctattttttgaattaatgttcactaaggaggcgcgtggaaggaagtcggtaaattgacggttaattattttggtatgaatctcgaggagaatatcatcatttcaattttctctattcaaaatattgcattaaatgcctgggtgatggcgttcccagatcattggatttgtcttgtgttttttaaaacttgatcatggcccttaatcatgtggttttcgtgggcagttgttttatgttagtcagggcgctgacttcgaggttaatcttccttaccgtgacaaactgtcttcgaatgctgacttgtaatttgttccaacagtccactgatcctgactccaactttttgaaccattcctcaagaaaatcgctcaacgttagcggaaagcataaacactttgcatcattgctgaccctcatgacggtcatcaccttgttaaaccgggacaaatggtcactgggattcgaatctcccgtgtaagttgccatttcgggcatcgtaaaatttttagggagtttcgcatccagtatgtgtcnggcgcatggttctcggtcctcgcaattagagtctgaatcatcccttttttgtctccgggagaccttagcaatgtatttgcgtagttatgccaattcagctaaaattccttcgttcaaagtgcctccggagactggcgatgcgtttttttcttttcaagatggtttcttaaatcaccatgcttctcgttgattttcttagatcaatcaggggatacctc

SEQ ID NO: 23962 - DNA, 4350 bp, Cannabis sativa
atatctgtattgattgatgcatgtgattgtagccggggttgttttttttcaaaaattctacatttcacatcatagtttacttaataccgagtaaacccttttacaatctgtcattgttaaactaaattgggtacaacggttttcagggatctatgatgactatggacagatatgcagctgccgaaagcttttataaacttgccatggcatttgcccctgttccagatcttcacataatgtggttacttcatttatgtgatgcacatcaggaaatgcaatcttgggccgaagctgcccaatgtgctgttgctgttgccggggttgtaatgcaggtaaggccgcattattatagcattccaaaaccatttcgttattcttttcaattgggattgatctcttgcttctgattaatatggtcatatttctaaaacgagttttaatttttcttgtaggcccttgtggctagaaatgatggggtgtggagcaaggatcatataactgctcttcgtaaaatatgcccaatggttagtagcgagatctcctcggaggcctctgcagctgaggtagaaggatatggtgcttcaaaactcacagttgactcagctgtgaaatatctacaactcgcaaataagcttttctctcaagccgagctctttcatttctgtgcaagcatcctggaactggtgattccagtttataaaagcaggagggcgtatggacagctggccaaatgtcacacgctacttacaagtatttacgaatcgattctcgagcaggaatcaagcccaattccattcaccgatgctacctactatagggtgggattttatggtgatagatttgggaagctggacagaaaggagtatgtatacagagagcctcgtgatgtgcggttaggtgacataatggagaagctgagtcacatttatgagtctaggatggacgggaaccacacgctgcatataattccagattctcggcaagttaaggctgacgagttgcaggcgggagtttgctatcttcaaataaccgctgttgatgcagtcatggaggatgaggatttgggtagccgaagggagagaatcttctctctttctacaggaagtgtccgtgctcgtgtcttcgatcgtttcttgtttgatacaccgtttaccaaaaacggaaagactcagggtgggttggaagaccagtggaagaggcgaactgttctgcagactgaaggctctttccctgcacttgttaataggctcgtggtgaccaaatccgagtcactcgagttctccccggtagaaaatgcaattggaatgattgaaactcgaacagctgctttacggaatgaactcgaagagcctcgtagttctgaaggggaccaactcccacgtctgcaaagtcttcagagaattcttcaaggcagtgtggctgtccaggttagttgttaaattcatgtaatctagtattcttacccaaaaattgtgttgtgttgaaatgcagtagtcgataagattctttcggtgtatttgcaggttaacagtggggtgttaagtgtgtgcactgcattcttgtccggtgagcctgcaacgaggctgcggtctcaggaactacaacagctcattgctgcgctcctcgaattcatggctgtttgtaagcgtgccatccgtgtacattttagattgatcggagaggaagaccaagaattccacacacagcttgtgaatgggtttcaatcgttaactgccgagctgtcccattacattcccgccattttgtcggagctgtgatgtgcgagtgtagcagcttttcatgtagtaattttaatttcctctatagctgagtgtttgtgtggcagcttgaaatgtgttgatatcttttgtaatttcctctacgttttgtggtgttccattccattgtttgttcatatgtaactttgatccttaactagatgagtaatttgtccatttggggcctttctttgtaaattgtcacattttatgatgcaattagagaacattccttggagtttgatcattaaaattttaacaaaattttttctactgactggagcaccattctgagttgctgtgaattcataacatgttggttaaagagagatgtttctttctgttaattttgccaatgcttctactaagatgattcctaaaggaaaagaacatgtttgtttagaaataccaaatacaagaataataaataaagccttctgccttacacagaacatgactaaaaatctcaatgaatattgaaacaaagtagttgatttttggattattgatacattgaattaatagcatttggtaatgcatgcacagaatttaattgatatgttcaccatccacttccactcgcgtgatgtgctgaatcttaggccaatcttctcctttctctttctgacaccgttgcgttaacaaaggacattggtctatatgtaattgagatagggaagtaggcagcccttcttctggcaagcaccgcaacccttcacaattacgaatgtacaagtaagagagggatgtgagttcttgaaaggcgttgctgtttaggctttcaagtttactacaatcaaaaatcataagtgtagtcagagtgatcggaaggatccctatgtcttcaggaaaagtaccatcttcccacccactgatatttaaatatttcaaacacgagagcctctgtagatcccattgcttatggttctcaatgagctttttggagttgggtaatgtaagactctttactttggagtgtgatccccaatctagaagcgattccaacactgaacagctatgtatacttatctcaacaagagagggagctgtgccttcgactgtctgttgagtagttcctgttctaggcaccaaacccaccattcgttcacatttaaagatttccaaagattccatggatggaagataacaacacggtaacccaacattaagctttggacatctatacagactaagttttttcagaagtgggaatatttgaccttgttgcatagcttcactgctaaatgaccaatctttccactccaacatatctgaaataaataatacttctagacatctgaatagaagaagacccttgtcatcatgaggaatctcatcacctattgagatgacaccattacatcctctaattaagagatctttcagaaatggtagctgcccaagtgagggtaaaatacaacaagtattgcacttgtcaatcctgattgatattaacttaagaaatgcacagtccccaatccagtctgacaatattgtacctctatagtattcaatactaagatgctgcaagtttgtatgtggtcgaagtgcatcaagtatatcgttttctttttgtgaattagcagccacaccaccattacgtttatgtttccacctcaaaatcagcttcgaaagagacttcttatccttcaaattagcctccgaagcttctcctgcatccttgatattttccaacccagatatgctatgtaaattctcaagttctcctacctttttcattttcaatcctccagtactatctctatcactactcaaaatcacatcagataagaaatacaagtgttttatagtattgagttcttggggaagctctttcaggggtacaccctcaatatctagatatcgcaagttgattaaccttcccatcttctttggcaattcatgaagccgttcacacccaaataacaataaagtctgtaaattgtacaaattacaaattgaatcaggtaattcttgaattccagtgtgagacaagtccaggtacctcaaatgctttagattgccaattgaatgaggcagcttcttcataggtcgacattcactaaaagaaagaactcttaaacaacttccacgtgtaagcaacatatcatactttatcatccagtaatacctgtttgatttgaatggcagtgctagaaaggtacgcaagctcttcacttcatgcaatcccttaacttctttgtccttgtcgtatttgtccttcatatatgataagtgacgtgtctttgttgaaagttcaagtaaatcataactcaaatccaacctaaaacaaaaatcatttgatacgagtatagctaaatcatgtaccaagtcatggatttggagcaatgatttttctttatttgaatgttgaaacaaagaccttgataaaagatcatcaaggtattcctccccatgttcctccatatttttgctttttttatcaagcggcagaaaaccttgagccatccacaaaaaaatcaattcttttctcccaaattcgtaatctttaggaaatatggaacaataagcaaaacattgcttgagacgtgtaggtaagtgacggtagctc

SEQ ID NO: 23963 - DNA, 2063 bp, Cannabis sativa
aatcgtgtgcagcatttatttaaccaagtaggaaaattcttagctggtacccacgtacgtacatacgtcagccttactagttacagctcatgctcatgcatcatcaaaattaccaattcacctccccttaaaatatatattcaaaattgtaaaacaattaataaataatttaaaccaataaataatattttataaatataaaatataaataataaatttaaaaaaattaaaacattttataaaacgtctttttagtatgattctttaaatttttatagtatttttaaatatattaagcactatattcaatctagttctagttccaacccatattattttatttggaattaactttaaaacctaggctatattattataccaatcatacatatgtgattttcatgattatgaagtaattcattatatggaaataacgtgcctttccaacaaaatgaatatatatagttttttctggttagtatatatcagtatgcatcgtttatatataaactatatataaggacgatattaattaaaaagaaatattttaaattttctttatttttagggtaagtttatagtatacatataccttcttaaatacatgttactttatatttatttccacatgtagaaaaacatttagtctaatttttttataactatatacattgtaattatataaaattatttgtaaatttttaaaataaaaaaattaaatagtgtacaatatattaaaaataaagtttaaatattttactatacgtatgtttatgttttcttatacgaacagtaaatagttgtttaaatttaaaattttacaaacgatcctaaataaccacaattaagtagactgcaaaattcttgagaatattaaaacaaataaaagagtatataagaataaatttttaaggagtgtactataacttttcttttaattagacttcaaattcttgcaataatagaccgtgtgccgtgtggtctcttaaagtacattattttcaagtgtattagttcttatattaattaaagtttttttgtttatatatatatagtcatgactcgtgatgaagtcaactgttttttttagaatcgtcatcattgttagtttttaagttaattagtatttttccctaataaattttaagatgaattaaattatgctctttaaattttgaagacggttaaaaaattttcttaaactattgagattgttgaatttaaaaatttttgtctaattttaataagaaaaatctaacatggatgaaagttcagtgggcatgatttggcacatgtcaaagttcaagaagtatgatatagtagatatcaaagtccgaatagcatgatttagtacatggacaatagaagatttttcaacggtcaaaaaattttaaaaataatgatttagtacatatcaatattcaaaaaaacaaaaatcctaattaatctaatttttatataggtaaataccattttggaccttatgttttgttaaatgacaaaatagatcatgtattttctaaaatggtacaaataagacccttgattgattttttattaaaataaaatttgataataatctgatctaaaggtgttatgacaaaactgtttacattttatgtatctgttcgtgttaagaattgtcttcaagttggttatattagaaaaattatcaaaaattaagcttaggatcctatttttgtcattttgaaaaatacaggattcattttttcatttaacaaaacaaaaaatctaattaataatttttacaaaataaaagatctaaaatagtatttaacatttttatattgtaatttacaattatcttccgaattccgatgctaaatttcgttaaaaattaatgaattataagttgtaactaattataattgcatataattaattaataactgcatacattgcatttgaatgtctctcgcatgaactgctattgctacatatatattattgattatacgaagggggcggacccacatagaggcgaggtggggcagtcgcccaccctgaagaaaaaaatcgaaaaaaaaaatatatatgcattt

SEQ ID NO: 23964 - DNA, 2706 bp, Cannabis sativa
  modified_base (40)..(73): a, c, t, g, unknown or other
actttatatgtgtttatttaattgttttagaattcatatnnnnnnnnnnnnnnnnnnnnnnnnnnnnnnnnnntagatcctggtaaaatatatctaacaaatttctatacaagtatacacgtggagaaatttcattggtccacctaatatcaataattaaaaaaaatatttaaaaatttcaaaatagaaaaagaaaataattttaaaaaataattatttctttttttcactttttcattttttttctttcccttttcttcttcttctttcttcctcttctgaaaaccttaactcatccctctccccctctcattcagtctctaattctctttcttttcgggtcattctcaactcgacgccgatgagtcccctccaccatcaacgatccaaagcgagttcccatcactaaactcgcgaccccttgaaacccaagaacccaaaccccgagctcctttgcgtcctctgtcacaaaacgaccagcattagttgtaataacgacaaggaatgaactagagatgggtgcaagttccaaattcaaatatgtgttttgtgttcaggtcttggttttgagattagaattgtgttttatgttttggttttagatttgtgcatctatatttacaatttttgagttttaaattttggttcagatttgatgccaaattgaaacattaggtcatcttaaagttgaaaaacttcacccttattatttgaaatcattttctgtgggcttacaatgatggtttgtaattaaaagatgaatggtggcaccgtattttgggttcccgtgggaggtttcaagaatggtggctaacaagaatgacttaccaaaaattcaaggaaaaaaatacatttttaaaataaaaaaattattcaaaataataatcaggtgcttcttatgtgtgggtttttgggtggggatttgtggctcaagggagcacgtggttggggttttatgtgggggtttctgggttttcatcaagttaagggacgatgaaaaagcaaagaagaagaacaaagaaaagagaaagaacagaaaaagactatttttaaaatttttattttttttaattattttataatatttaaataaataaaattatgtggactaataaaacaagtgagaaaaatcatttcccacctaggaattactctagtcgaccactgccataagaaaatggctgtgctctccaattttgatgagcattgtcataaggagatggtagtggtcgaccatgaagagggggaagtgagaacttttgtcaacaatgcattttcatcaataatatgtcaaagccaagtgaaagaagccaccaagtggtaaagaaaccacttggccgaccactgccacaaggaaatggcagtgctctccaattttgatgggcactgccataatggagtggtagtggtcagcccctatacaagaagaagggtttcattggccaagttacatttacaacatatatgtattaaatacaaatgagaaaatccactcaaggctttataaggtccatatccgaccactgtcatatagaaatgacagtgctccctaattttgatgggcattgccacaatggagtggcagtggtcggctactacacaaggaaaggggatttattggccaaactgtattttcaatatccatgtatcaaatacaagtgagaaacaccactcatggcttcccataagacatggccaaccactgccattgtccgactccaactggtggaattaatctcccgttagggtttcggatgttgaaatgaggtttttaggtcccgagaccccaaaatatgactcatcatcaaaaaacaagtcaaaacacacctcgaggggtctgagagcatgcatggccgagcattgccatttggccatgccaatgctcgtaactggtacaagacatcataagctgccttcagtaaaagggacataactctcttaatttttattcaaatgacctggttcaactttcattggaaagataatttcaagacggatcaaagtgtgtatcatagccatggcacgattctgaagtaatcatgtccaaaattagctcacaagacaagctggtacattttactcgggaatcgggtaatgttgttaagcgagggttggttgaggatactaccacaacccatgtggcagtgtatgcaagcattgacactccaaaatacatgttttcagtactccttaccaatgtcatgtatttttaggagagagatgacatcctatcactctatttcaaattggtgcatcctctaccgagaataacagctttcccaatgtttgtgggatatttgtctaggaacaaggggatttttatagattattattttcttgtaatactttattcattaaaaagagtgatatatgggatttgttagtgagatgcccgaacatgtgggggatatcaggtaagaggctgagaaagggacttttggattttgaatctttggaccttcttttctttttgtggagcttctacttcgaaaccttcaccttgagaattacttgacgatagccaaaaacaccacactcattctgttatcctattttttgcactatgacgtggcaacacatattggtgacacgtggctgctattttctacatttggctgaagagatatttcgaacagaccttagccatacatctgtacggaaaaagtcttactgaccgagcagggcaagggtgttggaaattatttt

SEQ ID NO: 23965 - DNA, 7124 bp, Cannabis sativa
ggcctcatcagcattgacgcctttgctgcccaggtcacataagaatttcacccagtcccacattcgaataccggtatcacagatggggaaaataccccagggagttgaccaccataagtgaaaagcaaagttacaagacaaaaacaggtgctcaactgtttcgacctccgcaccacacatggggcagctgtcatcttctataggaaaccttctgccgattgctgaacgaacaggaatagccttagaaaggatacaccaccaaaagaaccttgagcctctcgggaattttactgttccaaagtttgttccacatagaaggggcaacctcgcaaggagttgatctttcctccaccagggctctaagggccaatttgcaggagaagttaccattacgttctaaagtccagaaccatctatcctctccatcacccaacgggttgccccctttcaggatagccgagatagtctcattatcaaacaacttgttaagtttttggatattccatccaccagtgtccagaagaagctctgccacctttgactccccattcaacaagggtcctcttgggtggggaaggaatccctttatatgtgcaatccacggatcatgccataggtcaatattcttgccatccacaactcgcttacaagcacctttgctgataatagatcttgattttgccacattcttctagaaccatgagtccgctgctttagggttgcaatcaagaaatgacttacctttttaagatattttgcttccagaaaatctgacaacataaggattggtttcctgtcagaaggttccacccccatttagccaggaaagcttggttcatttctttggatttctgaaagcccaaacctcctaatgacttggggaggcaaagtttgtaccaagctctgaggtgaagtccgtgattacccttctcggaaccccaccagaaatcgcgaaccaaaccgtcaatcttagcagcaaggcgattggagagctttgtggttttcatagcatacaagggaagagataatcccactgactagatcaatgtcgccctccctgctttagacagagtcttagctttctaaccatgcagtttcgccgtcaggttatctagaataaaattaaaatctgcatctttttgtctcgatctgaataaaggaagccccagataattgaccttgccctccggcgatcctatacccaacagatatttgatcccttgtttcatgctagcaggggtattcttgctgaagaatattgaagtcttcattttattaaccttctgtcccgaccaagagcaaaacttctcaagacaatcccaataacctttggcttccgctaaggaggctttgccaactagaatgagatcgtcagcgaagaagatatgggatataacagggcccctcctactaaacctgatactactaatagctttcttatctagggcgtcttctagaagccttgacaaaatttcgacagcccagataaataagtagggcgaaaggggatcaccttgacgaagaccacacgacggatttatcttgccaatagggcctccgttaagacagatattgagagaggtggttgtgatacattgagacacccacttacggaactcatgaggcacctcaaaacactcaagcacatggtcaataaatctccaactcattctatcatacactttcataaggtcaatcttaattgcaaaccaaccttccctgccttttttcctattaaacgagtggacaatttcctgggcaatcacattattatcttgaatattcctccccagaacaaaagcggcttgggtgggacatataatcttaagtaacatcggcttgatcctgttagcaatgatctttgaaatgaccttatacaccacattgcagagatagattggacgaaagtggtttggtctcttcggattctggatcttgggaatcaagacaatattagtagcattgaaacctttgtgcatacaccctgattgaaagaaatccaggactgcttcacagaagtcgttccccacagaatcccaatagtgcttaaagaagaggactgacattccatcaggtcccggagctttgttactgctcatagtaaacaaggtagccctaatttcctcaatagagggtctccggataagatcagccttgtcgtccattgagattttacccttgattaagtcatgacagttaaggttgttcccaatctccacaccagtgaatatgccattaaagaactccataaattcagtgccaatcagttctcttttcgtgatccacaaattatctttattgagaatgctcttaatggcattccttctacctctgatcgaagcagaaatgaaaaaaaatttagagcatttatccccttcctttagccaagaaaccctggccctctgcttccaatacaaatcttttctcaccctagcctcattaagggagctacgtaaagccctttcagtatcccagtctctagatcccaccgacaatttctgaataaaatcaagtctcctttccaggtctcggatcagagtatcaattttgccaaattgggatctgttccagtgcataagcgcaactcgagtagccccaattttcttacaaatcctggccggggcccaagggtaacttaaagaactccaagcagagtccaccactagtctgcttctctcatccctagtccaggcttcctcaaacttaaagcttcttcagatcttttcctccatcccttcagaatacaggcagagagggcaatggttcgagttagaggtctgggacgagcagagaacagcctttggaaaaaggctaatccaagcaccattaacaaggcctttgtctagggccaatttaacatggttggtcccagaacggtggttatcccaagtcaaactgtctccttggattggcaaagtaataagaccccgagcattcaccaaactggagattaccagaatgaactggtctcttcctttagagccgacccgttccgactcacaaagaacaaagttagtgtcacccaagataagccacggcccgccaaacctatcccagtcttcataaagttctcccagaaagttttcttagcatggaagtaaggggggccatagacacaagacaaaagccaaggatgcgaggaggggtcagagtaaacaagacccgatatatggttttgggaacacgcaatacattcaaactcaaaaccaagtttccaagccaaaataatacctcccgcaattcccacagctggaacaataatatgaaaataaaaatggagcgagtgaagggtacgtaccaaagatgaggcatccactttgagttcggtcagaaagatgaaatccgaggagcgcgaccgtatcagggacttcaactctcgaactgtagaggtctgccctaaccctctacagttccaagcaatacctctcatggctcttgtggaggagtagagacctcctccacaggggtatgagattgagcagacccaaaggaaccagactcctcaaccacgaaagtgccatccattggcctcgatgagatcacatttcttcctttagtattccacacatctgatccactaaaatcactaatggataaagaaatatcctcggagggctcttcctccgcttctttggatgcattagcaatgacaaccgagtcccagggaaagtcgcgaacaacaccagggtgatggcggggaagcttccatggccatgagcaaagggaagcgtaggccccgtcaaattttctcttcttaaaaggagtggttctagcgttggtctccgaggaagtcggaacgccaatatcactgccaatggctttaatctcatataaatccaaattgccaaatttctttagctcttgtacaagagtaccttgagcttgaaaaaaattagccaaggccaatttttcatcatgctgaaagtgaacctcttgcccacaagtagagctctcaaaagaagtagcttttgttggcctattagactcaatcatattcatactattgccccccataaatatttttgtttccacagctggcccaaggtcacacaggcccacccttttaccatcatccatgcacatagcctcttcctggaactcaaaatgccgctcggtcccacaaggtaaattctgggtagttttattattcttgcaaatggtatttggcccactagacaaaaccctcttacattgcacatgactcttttgaccaggcccagaagaggagagtgccggcccaatagcttcaacaaaaggcccaagaccaatacacttatcattcccaatagtcaaccctcagtcagcataattcaaattaaaagagggatcgatctcagcctcctttctcgcgacagactccccaggacgagttgttttgcccagataggaaactccaggcttgcaaaaggcaggctgtgttttgggaacccacacctcctgcctcgacggaccaccctccagagaactacgtccagtcaccttcaattgatgtctcggtttgcgagccaccgctttcagtctaacggttccaagcttgccattaaccatggtcgactgatggctaacagcacgattcaagccaggcctaggacgtgccgatgaactcaatgccggagtaaaagagttggcacccgaaaacacgtccaggtacgaggactccatagaaagccatggtccaaacattgggtaaggaaccccatctccatttaccacagtgacgggagaggatagggagcatcctcttctttgatgacccagtcttccacagttatagcaaaagatacccaacttctcatatttgaattgtaaccaccgctggctacccgattccatttcaaagtaacaaccggagaagagaggttgcagaaaattcaaatcaatcaaaactttgaggaacttactccatagggccggctttccttcatctaactcaactttaataactgtgcctgctctgccccccaagaaattaccattggcagatgagaaatagtctcttgggaggttatggatttgtatccaaattctcactttgtcgaaagttacagtgggggtcttccttggcgtccatgcttgcaaaatgagagtgtaaccacacactcgccaaggtccgttttccaacgcccaagagcagttttcagcacttgagaacccaaactcaaaacagttatggttgttggtagactcattcaaagctaccactgccactttgaaactccaagtcttatccacaaactctatgacagtggcttcattaactaccataggggctactactttcccaagaaggcagaaagttgaaagagcctgctgagaagaagcacaaggaacaagcttaacagatgcttccaaacaagaaaagcatttaccattagtagaggagttggtggcattaactaacgccattacacccgacaacaaaagacaagcctccaaaataaataaagagataaagcccaaacacaatctactccacagacctcctcacgacaccctaacccacgaaaaaaaacagagacagaccccacaaccaaaccaaggaaaagaagaaaaagcaacaaagaccaaatggagactctgaggaagaatggtcaaggaaccaaaacactaaaaaaaccaaccaaccaaaagaggtgagaaaaacttcggatcaacagcagactacaagaaaaatgagacacgaaacacataaaactcagagagaagaaaataaaagggaaggaaagactcaactaagagagagtggtagatgaccattctactattactagccaaacacctgtacagtagggtttgggatttaccaagtatcataatcaaacaatactcgaacaatatcaaattaacatatttattacacacaatcaaaatcatcgagtggagtagtcaaacaataatcgagcacaatcaaatagtcatcttcaaccactagctaaaaaaattacttttgtcaatcaaacacaatggaatactattgaacaacagtgcaaaaactcaaaatatttgaaagtttatcatccaatttaaccataaagattcaaaaaaaaatttatccaagtcaaccaaaaaaataacactgaatctaaacactaaataagatttaactaaaataaacactaacctaaacataaaaatggaaaaatcacaaaagaagtcaccgtagacattgcggtggttctagggtgtctgttcctagtggtgcgcctaggttgggtcatcaccgacatcgcggttggcctttggtttgggttgggtcgtcactagcgtcgtgatcgaccttccatttgggttgggtaacctgcctaggttgggtcttctgcctgagtttttggtgggtttcaatggtgaaaggtaggtgagaatgtgtgagtaagagagagagagagagagagagttggagggagggacttttcaaatgggagtgataattttgggttaggaaaataggtgcacattttttagatggtacaaaaaggtttgtctatctttttattttggtgtaaaattatgcattaaaagtgaaacttctcttgttgattcagaaatctagactagacttctaagccacacccgctcactagattgaagagaatgaataagtagttaagtaatgttatcctaatttttgctcacgtgacgtggcatgtctacgtaggcaaaactgagaccacgtggagtacatcacatcaatagataagaaaagtcaccttgcacaacatgtcaatcaacaagggttccaaatactcgagcaagatcaagttacaagaaaatggccaactagtagggtttggccagaccacaccctggccagccaatgaagtttatgtgtcggccagcccctaagaaaagggtaggctgaccagcacaaacaaagttcctcaaaggggatttgattgaaaggtgggtccacgaccatctttctatatgagtcacagcttggtttcagttacggggcaactctaacaacccataaagatacggattcaacgtcaaattatcttcatatcttttagggatatcaattagggctgtacaaaaaaatttgtaaaccgcctaaaccgaataacccgcccaaaccgaaccgaaaaaaccgataaaaattacaaaccgaaataacccgaaaa

SEQ ID NO: 23966 - DNA, 3721 bp, Cannabis sativa
aaaacatgttcaaatagtctatttcacatgtgtataaaataaaaaagtcacgcatgcaacagattgtttgaaccttatttttagcgtgttaaaattttttaaagttcttaaaattgtgcaggatgttttaaataactgcaacgtacaccaccataaaaaatctagactaaaaaattcttttagataccgaaatggttagagatacatcgatgcactctttaaaataaaatcttcctatattaatatagttcaaaaagttgcatagtaaagtgatatttaactattgtaaatttctctagtacaccttgtaaatgaatgttttggtagaatcttttggtatttagaaaatttttttagtttattttttttataatcacgtgtatattgtagctatttaagaccgtttgtaaatttttaaataattatgaatagttttcagtgtcaaaaataaaaatttaaacagttacataccatttatataagaaaaaataatcttgtgtagaacaaaatatttaaactttattttcggcatagtaaaatattcagattttttaaaaatttacaaattatcttaaataactatgatatatcatcataaaaaaactataaagtctcctaaatactaaaacaaataagaattctaacaaaggggtatactatattgacttagtcacaaatatttaactattaatagaaagagagactagtatgtgttaacttctactgttactatcatgtacgtacgttaaactcttataattatgttgttagagtattagtctaagttttaagtaagagctctctacaatataatataagtgttccatttaatttattaattagtataaaattttttaagaaggagctaaaaaataaaacagtgaatacttaagcccaaaacaatgttaatgtataagaaattgtaccttgtccatagggacaaaatgagtgtctgtatagtagaaatttttatatttcatatatatcaactagagaattaagccgtgcttcgcgcggtgttctcaaatttttgtaatctttatatataaatatatattatacttataatgagtgatataatctaaaatataatattttcatgtggtactattattaattattattaaagaattgattatagatttatcaatttaattatataattagattctattttattattatttataatttattgtattatgtaatttttttagataagtatattaaatatcagagagaaataaataaaaaagatggaaaagaaaaaaaaataataatataaatatataaatttgatttgatgacttaaaataataataaaataaataaattgtaattaagtaagcaagatcaaattatcaattacccatatattttttaacaaatcaaaatgaatgtaagaatactttatttatagtatagaagtatactaataatgtagttcttaatccatgtgaaatttttacaaataataaaaaaaaaacttactaagtcaaatatctcaacatctaaaaatatataaaatgaactaaatttttttttataatagaataaaatattgtaggatgcgaccttattttctttagtacttttatataaatatatagaaagtagatattaacttacataaatacatagactaataatagattttacaataatgtaggagatttggactaaagtaaaaataatacaacctatagtttctataagatttttttattaaaaaataattattatgaaaaataattatatcttaaaaataataaaataaattatataatttttaatcatttatataggtaataatattatacatatttaactaaaattaataatataaataaaaaatctaaaaaatatatgtatttttctattaataattataggttttaattattttatatacgtaataatacaatatatcagaaattaataatttaaaatataaatctaaaaaaatatattttttatttgttaaaatactttatgattttttttttttgattttaaatagttgacaaagattaaaaaaattaaaaaaaaaatatgtgtaaataaataatatcaatcacctacatattttgatcactgattggggaagattatgtttatcaatcacacacatataaaataaataatactaattttgaataaataataataaaatatatattcaataagtttaactttcatgatagtcttatatcactaaaagtattttttaaaattatataattatagagacttattattcttaattctcgtcttttgtttttctttttttttttctttctttttttttaaaaaaaagaagccttattattctaataaaatatgatattaataaattactataattttaatcatttaaatacaaattaaaacaaagaattcaagaaaatactttctatagaaaaaaattaaataattcttttataaatattttaaacttgataaagattgaaaaatgcaaaaatttaatttgaattcaatttttttaaaaaaagtataactaattgggtaagattaaattcatcaatcattcatataaaaaaataaattatactaacattgtgacaaaccaaaataaaagaatattgatctatttaatgtaaaaatatatcattcacaataatttctaaaccatgtgggacttttgtgaagtgactctcatattactaaaagcataaaaaaaagtggaagaataagaaaataaagatatattcaacaagaattaataacgtaaaataaaaattctaaaaatatatattatttttatttgttaaaaaacttaaggatttttttttttaaatttaaatatttgacaaagattaaatagtgaaaaaatatgtaaaactaaataattttaactttgaaacaaataaataattttaattattcaaatacattaaaacaaaaaattattaaaaaaaaatacattttataggaaagaatatttaaatgatttttttataattactttacacttgataaagattgaaaaatacaaaaatataatttgcattcacttgaataaaaaaattataactaattgggtaagaataagttcatcaatcacccacatagaaaataaattaggctaacattgtaacaaataaaactaaaagaatattgatctatttaatatgaaattatatcactcacaatagtttctaaaccatgtaggacttttgtgaaatgactcttacattagtaaaaacataaaaactgtgaaaaaatgaaaaaataaagatatattcaacaaaattaataatgtaaaataaaaattctaaaaatatatatattatgtttatttgatagaaaaataaaggatatttttttttaatattttaaatatttgacaaagatcaaataatgcaaaaatatgtaaaaataaataatattaattttggaacaaataaaatatataaaatctataaatttaacatttagtctcataaacatatataaaaatatatatttaaagagtcttattactctaataaaatattatttattaataaattaatatagttttaattatatatatataaattaaactaaataattatataaataagtaacttttatatgaaaaaataattaaatgattttattaataattattttaaactcggcaaagattgaaaaatgcaaaaatgtatgttgcatttacttttaaaaaaattgcagctaattgagcaaaattaagttt

SEQ ID NO: 23967 - DNA, 2182 bp, Cannabis sativa
aaaaaaaaaaaaaaattatgaaggggcccccttttttttttttttttttttttttttgagttctatgcagtagccgaacttacacaacataagagtcgactcgagtaccgatcaagatcaagaaatattaaaaacgataaatttcccatttttttaatgttttttattgtatttatatattatttttttaaaaaataacactgcatcacaaataaataaacatagaatacaagatagaaagttattaggtttcaattacataaagatgataatccccatgtggttatgctctctctctatgcctaaagcatattttgccagattgtgaagctaaaacattagcttcgtgagggttaaggacaaaatagtttgaggagaagaataaagagaggcatttatgccttcaataaggtcttggaggacgaggttgtttgcattgcttgatctaacagcctccacaagaaatttgtaatctgattcaacgatggcaatgtcaaaatggttttcattgcactaattgaaagcatgcaatggggcatgtgcttcgatgatggaaggtgagtagcagccattctaggatttcgcaattgctactaggactttgccatcactattttgaattacccaacggagccccatcttgtttgaggttttgtcttatgctttatccacattgagctttaacattctgtagggtgggggcatccagtgtattgttttgttggtttgctgttgttgatcgtttgtagagggctcttcgatgcagtgtactacctatagaatttttgcgcaacacaagttaaatttagttaagctaagtgtgctacttcaagactctccctgccagctctagtgccagtgtcgtggctacccctactctagctgagttaaaattgaatgtggacacttccttagatgaaactagaaataaattggtgttgttgtagctactcttttgaagccaattgttggtaactttacttcacatgagatggaagcgaagggtatgttccatagcttaaattgggttctacaaatggagttaccaatcacacaaagagattgatgctttgatagtttcaaatgctttaaataataattactccacgatttcttcttttaaagacttaattgtagatatttctaattttttatcctttctttctagagttgttattgaacatgtcaagcgtacaaccaaatgaccaatatcgttactcacagtttggctaaattctagagttggatgaaacttgcttttggttggagaaatttcttcttctaatatagtctattgttgtaaatgacttacattaatttatgataacaggatatttatctaagaaaaaagtgtcacaaaaatatttgagtgagccattttaacgaacatatggtatgcttataaaataataacagagcataaatttaaaattaagtacaatttgagactatataaaatttggtgaagtccaaaatattaaaagtaacatctgcataactaatatacataaacctacttattcaaaaaaaaaatatacataaacctactagcaaaatcataaaatatacacatacaaattcatgtaaacatataactcatatccaaagcatctctaaccatactttcttaactaaaatagggagtgtgacttgaaaaaatgaactccaactatacaaaaaatgactctctataacggaaaatggatatgaagctctctaaatgtaagagctctctacttttttgctaaacttttttaatagtattttaatcaaaaatactattatttttttcattattttataaaaataatttatgtttgacaaatctaaattaaatattgttaaaataatcaaatattaacaaaagtaaggagcatgattggagcaacaataatatggccctttattttagcattttagctaaaaaaataaagaataccattggatgtactcttgaccatctccaaccatactctatttattaattaaatttaattaaaatagctaaaaaattaaaatagagtcattttttttaaatttttgtccaatcatgctccctattttaattgaaaaatttgattaattatgcatgcattaggggtaaatattaatcctaaacttaaatatatctacattgttaaaataagtacacttaccttaaaccctaaaatactcctcccat

SEQ ID NO: 23968 - DNA, 3243 bp, Cannabis sativa
tatttagggcataaacccaacaatgtccaacccagttcactcccaagggcataaagtacttggctgcactattcgtgttgtatgctaccgaaggatggggccagttgtccgttcacgatactaactggttgttcgacttgaaatctagccccaagcagaagagatcgggatagttctatttttcccagaatgaataccagtggctgaacgatactataaacaaggaagtgttcaagatcattgggtttatcgaatattactactttgtcaaagatatgggtaccaaacacatttctttttagcatatcccttacttctgccatcttccttttaccctgggtctcaagacaagagcccaaaaaattctccaactcccgaagtcagctctgaacaattctcttttggccactgtgggtaatttcatcaagtatgggctctactcgtttgatgaggttcagcagcctgaacaagtgactgaggaggttacaactgagcaagaggcgctgaagaagaagaagacaaagaagattcctcaaggtgatcaagtgccaattgaacggtccatcagattagggatgatccctaggaggtttctcatcctttcaactaggttgtaaggaaggggaaggatgtggtggtcgaggaagaaggtgaggattcttctaatgaggatgcccccacattacttgttcggaagggtgctcctactgacatacatgttagttatttttcacttaaccttgtttgtccttgtttgtttatattttaactagtgttttctttttatgtagccatatcagagagaatgttgtgtgctttgaggtagaggtcgggcaatgcttccggtcagaagtctttggtcaagcgtctgaaggtagatgatgctttacctaagagcattgctctgagctctaataaaacatatttctagagactttgtgtggtgactgattttttgccatatatggtagctaatatgtaccttgatagagggttgattgtgccatgtttttttttaattttaaatttaattaaaatttttagactatctaaaagaaaatttggtttgatgaccatgctgattgtttgcactattttttgatagttttgatgtcttttatggtatttgtgcttttttttatggataacctgtaattcttatggtagaaatatggtaaggccgatgagtaagagaagtatttcattttgtactcatggcttcaacaaacgatatttaaatgtgataaataagtgtttcaagttttgatattataatatagattattttaccatctttattcacattatctattttttcattaaattgtgtggtactagaactttattttttattattttgtaggtcagttttgtggagggtctattgttatagagactttgctgatgagtttatattttacatataatttgtttgagagttgttatcttctaactattgagaaattcttttattagtttttaatatctttataggggttaattttttttttaatttttattttattttattttgtagatgttttgtagagcattttttatatgagttggtgtgtagttttttagtattacaagttgaagctctagctcttttagtgtgttattttgaggatgttatagctttattgtctaaatttctgggggcaattttatcccatgttgctcgcttactttagtaatttatggtttgacaaagcatgctttttggttagacgatgagatatcttggtttgaggagattcctgcgctatttgtggatgtctgcatcataaattcatgagtaattcttatcactttgttaaaaaaataataataagagaatgattaaatatatgctacaacacacataatatacactatacatatttatagatataagaaagctagaagaagaagatgcaaaaaatatagtatataacaagaaaagaatatatatatctatatatactcactcgcaaccttgaatataaattagtggggatcaccatagcttgaacaatatattatcacctttgcaaaaagcttatgttccctatctctaagcactaagggaactctctaggaaatagctttgagaattatcaagctttaagattttctaataaagtgtttttttaatagaaaacttatcatcccaaatgagcattaaaaacctctttatagagtttttgatatcaccatttgaaagtcaaactcataacctttcatggatgttatggactcaataaagagatgtaactcatacacatactaatactcgtatagtagtaaaatttttaaattaagatgtgtaacaccttttacatacttaatattggtgataattgtggaggttactcatagtaacaagtaactcccccatatgttacaaaatgataagtaactcccccatatgttacaaaatgatgacaactaatatatattgtcatatgttacatattattgatttattatacataataaatgttggagtaaacctccacttacactgatacttaaacttaatacaaatgacagaaaagtaattacaaacaaaaaccctaagttggccttcggcctctagaatccctaacagaaattagttagaatggatttggttaatccacacctaactaatttctgtaactactctaactaacaagtacataagcaaaccagaagccctagatctatatatacctgcatcaaagcccagatctacacggttgagtgatttcttcaagatccagggtttgaacacttgaagaaggagagatcaatgctcgtacatgcacaagaacaagaagaaagttagtacagttagagagagagagataaaacacattatatgtaataactaaagagattaccagtcaaaaaaaccatacctgtgacttggaatctccatctttgtacatatgaaccatctttgatagtggaattgagctctcaaattcgaggagcaactcaaacggagacgtagccaatttattggtgaacttcgggaaaatctggtgtattctaactctactctttgtgattttgtgtgtgtggttgtgtatagatcagatcattatagatctgatctttggtttgtgtttaatctgggatttctggggttttctgggttatttaaggtctagcttcgctgagaaactctctgctagggtttcgagcaagacaaagagtgagggattgaatgagaaggttctcgaatccttctttggttttgttcaaagacaaaac

SEQ ID NO: 23969 - DNA, 3366 bp, Cannabis sativa
ctagcatcaggagccccagcgttagcaaccgggaaagggaatttaggtcgagaggttgcctgatccttccccgcttccacccggaggatccgccctgaagtaggttgggcgttgatgtaggccaactcttgttccttcctgaatagatatttcttgtatttgtcttttgcggaggcgatgatgtcatccagaagcaccttctcggtctcagggttgcggacgttaaagcagagaactttggataagttgaaattgtgtactgactggccctcagaaatcaacttagccctcctgaagttagcagtcgtgaccaagtcccctacattcaacccatccttgtcatagttggcgaaaacttttgcatgttgaaggaagagttgggtaggggcggtacggtgcataggaggggccctaacccactcagtgagcaactccggatgctcgatggctttgaagccggaggagaagaagaattggtgacggtactccttcacgttcttctgaaagttgtaaggcaccggaccctcgttggcagagtgggcttggagcttgaaaaatccatctttaagcttgtcccccttcttgggaacagataagagttcgtaaaaaatataaaatttcagccggactgggcggggcccagttcctggcaacgaaaaaaatgtataagcctaaaagcaggcggtaggcttggggaataagttgacacggcgcgaggccaacaaaaactaaaaaatctacaaagtaatcttggagcagtagcatggcctcggacatcatgtgggtttgactcctggccctgaagtcgccgtagttgtggttgggcgtctctttgtccctaaagaggagatgaaaaacttcggtcgtagaaggcttgatcccagcaacagtaactatcttctccagttggtgagcacaggtcagggtcgagtgtaactcgttcgcctcccagttagtggaccggcaggtgtatttctcgtggaccactaggcctttcatcacttcctctaaggtggtcaatttcttgggcaccttgtctgaatattttgctccggttgaggtaggggtagacatgctttgagtttgatgaagcgctgaaatctcttggtcaaagccgaagaaaccgtgctcatgacagtcgcggagaacctcactcatctgaaaatgaactccagcaattagccccctaaccaaaccctaaaataaaagaagggaatgggagtcccctaactgctggaaggagcccccctccggatgtcagccaaagataggaaatccagagtttctcctaggcaaacatcgggcacaaatatcaaaaggcaataaaaaagagaaaaggaaaaatggagaaaagagacaagagtatgaaagtcacttcatactcttgacgatccctaagtaaataaattgaaaaggggaaacgacagtaaacatgcaaggaattacgacacacgacggtcttcaccatgaccgtcttaccatagaaattaagtacgattaaaacgaagacattatcctaagtttttccctaacatgcaaatgaacaataaaaataaagcgtacccagagacttacacaatggtgatgagcatgaagttgatgtcatccgacggtaaaacttggactggcagcggcggaggaatagcagtaacatgccaatgatttttgaaatttttttagatgggttatttgagtcaaaatggcagagtggagaaagtaacccaataaaaggaaagtgttgacttttataggctagaaatggtgcaaggcagctgtgatcaggcaccatcgtacagtgggaattggtatcgatttgcattctatgatccaacggatgggatgaacaaatgtaacgaggagaaaaggcagttaaaacgtttgagtgcctctttgacaccaagattaaatacgcaggtctatcaatagacgggaagcagatcgttgccaggaaaaagaaataaatgtcaatgatgacagtcataaatgcaatccacgcgcctagggcacatgccactatatttacgaggtgaccggaggcccgtacaagcctcatttaccctttactaaatgagactttgggggtaaatgttgcctcaaatttttcccaaaatacgctgcagcggctgcatgtgacatgtagatttcaagaacacctcactcacaaaaactggctaagtcataaatggaccgagaagtgcacctcacggagttagcctcccagagaggagcataaagcacgcctttactctctgagagctggaaatataacaatgcatctccgagaggagaagagctcgttcaagcagtcatttcacatttaatgcggcatgggggaaatgtatcagaacctccataagaggatttgacagatagcgtaagcctcttttactgcaattacatgataatcaacgagtctagtgacggctccattatgaagactcacatcaatcacggaaggataaaagattatgttcacctaatccctaagatacctatggcataggtcgtgtatgtgctattttatatctgctaggaatttgtgtccctaaggggctgacacttaaaggcaagtgatccttttctagtgattctcccaaaaaacactataaatacccaaaaaataaaacgtaaaaggggtcaatcgattaattaaggaatcgaagggagtaaagaagagagagagagagagagagagattcgccaagaacattctctgtacaagaactctcataaataacaaagactcgtggactatagctcattaatgtccgaaccacgtaaaaatcacctacattaaagcttccatagctcttctcattctataatttaattagttgccgaaaaccttggtcagcaagtgtcatgtccaactggcctttgagtgttattggtggatgggatcttggtgccaggagtggtttgatcgggcgacatactggtgttttcagtttcctgtacgcctggtgtgaacccagctagagaggaagttggtctgtggcttaccgttggtggttgtgtgttaatttgttcaaggtttgtccctggtagtcctatcgtgtttctaagagtttgcatgtttggatcagtcaccattggatcaccttgattagccaggcctccccttcgagtttgtacaaccatcctgttaacctgtcaagactttaaaataaaagcttgtgtttttgctctcaatgaaagcactaaaatattgacctcgcttctagccaacgacagtgagtcaagataaagcgattagataaaataaataataaaaaacaaaaataataaggtaaaaataacaccaaattttctagtggctcgacctcatgagaatggtaatacactactccccttttaattttattg

SEQ ID NO: 23970 - DNA, 7501 bp, Cannabis sativa
  modified_base (6781)..(6790): a, c, t, g, unknown or other
  modified_base (7247)..(7251): a, c, t, g, unknown or other
  modified_base (7418)..(7421): a, c, t, g, unknown or other
ttgtgtcactttgtccctgatgaaatgatacttaactcccatatgtttagttctattatgagacaaagggttcttgcataagtggatacaactttggctatcaacataaacggtgggaatttccttgagtagatgcatttctttcatttggcattttatcgaaagagcttatgttatttcctccatgataacaacatactctgcctctgttatggataaagcaacaacatgttgaagttaaacgctccagctaatacaattcccaccaataagaaagaaataagtagaagtagactttctgtgatctttatcaccaacaaagactaaatcactgaagccttaactaatgtactgctcgtttgtttagtgaacttcaatccaagttcaattgttcctttcaagtatctcaacacccacttcatagctttttaacgttctgcccttggttggacatgtacttgcttagaagactcattggaaaagctaagtctagtccggtacaaaccattagatacatctgagattcaacaacaactgagtaagggacattactcatctcttcaattttagcttgggatttgggacactgttctttgatcaattgatattgattgatcataggttgttttgtaacttttgcttctcccatctcaaacttttctagcatcttcttgatgtaacaagtttgacagaagcataagtaacttttgtcccgcttccttctaatgtctattccaagggtctttgaagcttccctaagatccttcatttcgaactcactattaagccattcgttcatcagagcaacccttgatctttcttttcttattattagcatatcatctacatagagtagtaggtaaatcacttcctcaatttgggtacctctgaagcataaacatgtgtcaaagtagctcgtagtaaaccccttcttggtcatgaatgcatcaaatcttttgttcctttgtcttagagactacttaagtccatacagggactttataggcttgcgcaccatgtcttcttttcctttaacctcataacctcttagctactccatgtaaatttcctcttaaagatcaccatgcagaaacgttgttgtaacatccttttggtcaactttcaaattcaactaaacatctagggatagcatgagcctgatggtcttgcaattaaccactggtgaaaacacctttttgaagtcaataccctctttctaagtaaacccctttgctacaagtctatccttgtacttcactgactctttttttgatcttccttatgcttgaagatccatttgtaggtcacaacattcttgcattttgatcttggaaccactttccacgtcttgttctcgataagggaacccatttcctcatccatggccttgttccatttggctggatccttattttctatagcctctttatagcatcaagttcactcttgctcaaacccgtttcacagatgagagcatatgcaaccacttcttcccatgcattgaaattgtacttttggtttggcttgggaaccctcttagatctatcccctgctaattgatagtctgacagctctccaacttcctattgaacttcatagttaggttccacctgagtgttgtcttcttggtccaggtcttgagctatcggagtggtgtcttcctagcatgttccacctgaagtgttttcacctggcctgaatctggtgcttcagttaggttgttggtccttgtacatgagtttagactgactattgcatcaacaagtggcaacaaaagagcaagtccttcatcagcgtggcaagaagacgataactacacagaggactacatgaatctcaatcactcacatgagcccattcacaaaaattggtaaaacttctgaaccactacaaaaatacccatctgtgtttatgaagtgtttgtcctatgtcaataatgaagtggagatgtgacttctaaaaaagttagtccattattttgtgtgctttgacgagtgactactcacaagaccaatagagattccctctcataaaaaaaaatgacaattaacgataaggaatcattcagacaacaaagattcctctggtcctctgaaaattttgtctgtttgtagttataaaaaaaatagagtctggtatgctagagattccctatcagtgttagaaaactgatggtatctatttcaatgaggattagcattctaaattctgtttaaatttagaatttttttggtaagctatcacgtagaatgttagccacgagtttttcctatgaatttgtgtgctttgtcactgagaaattatctatatttccaaaaaagtaaatttgaaataaaatttaaattttgcatatcaaaaattatttttaagacatgattggttgtaattatattttttattctcgagttttaaaaagtttaaaaggtgattgattggtaatcacaaaaacaaaaatcaaaaaaggagtattttaagagtttttgaaataaaatcattatatttattttttagcttaaaactaataaaattatttggatttagattgttttctgctggggatgtgatcaattaaggttgttatccaatcaattaacacatatattatgaattcattcaaactctataaaggcttttattaagatattcataggatgtatgctcacttttggtgagggaagaagaatgatgttaaaaaaatgcattagtatacatgaaaaagactttgtatgcatagtcagaaaggtggtgatatgggttttagagacttgcatctatttaatgaagctaatttgccttctagactctacaattttccttctttgctagctgccagagttctagaaggtttttgcttcaggaaaaataaatttgatgatcttgatcgttctaataagggctcctttgtgagaaaaaacatcttatggagaaataaaatttttgactcaggggtgattcggcgggtttgaaatgggaaggatatctcaaatttttgggttcttactaagtcagtttcactgttgttgactcttctaattttgttagtgaccggagcaaggttttaattttaagagatgcaataggcggttgggataatgatttggtttgtggtattttctttcctaatgaagcgacgactattttataaatccatttgctctcttctaatgtcttcttctttggggtcggcaattatttcatttctcacgtttaattttttgtactattgtaatggaaatctttttttatgaacttaggtacttgggtagaagttgaggtgagaggaaaaagagagttgaaacttctgaatcatgaagagacttatgtgatgaagtcgccaaatcttttattcaagttctttccacctggagttgagtggggaggtagtgatcgactcagatgccttgaaacaggtcttacagctgagctaacctacggaggaagatcctttttaggcctaagaggaactcctagatcaatcaaaggaaagatcttcaattcttattccaatgaaccactttttgagatcaatggccagtgggataagtatgtatagcttatactatattgcattcatattatagatatgtggtcgatcgtttacttttttccactatcattgaaaataatatcataactatgtttaattggtaatgcagaagtgtgacacttaaagatctaaataatggcgaagtcaaagttttgtacagtgccaaagaagcaatttcaggacttaaaactcccattgtcaaagatccaaatgtaagcaaaatcaaccatattaattaattccatttaagatattgcatttatttgcattttgtgtatttttttagggggtttggaaaagtgaatcagctgtagtttggagcgaggtgagccaaggaatcatgaatagagattggggaaaagcaagagaagcaaagaaatctatcgaggaaaatcaaagggtgcttttggcagaaagaaatttaaattctgaaacatgggttcctaaacattttactgtgttatataacaaggaaaatggatgggactgttcacctatagtgaagactgtcccacctgctcctattgttgtaccactaaacaactaacaaaatgtaaaattacaaatgattcattttgttgttttactaaacctacttttaaatattagtcgtagtaattagttagtattagttgtaatatgtgagtaacattcaattacaagttgttgccttttattgttttgacactatactcaactccaaactcagtaatcatctattgaagttgtatgtatagtattaatgcaaccactgtgcatatagttatttgctgaggaaggttctatattaatctaaaaatagttttaaataataagaacctacagatcatgtgttataactatagtgaatcaatagcctactaaaatgagctgagaaatcattacagaaaaataatagtaaatattaagtacaatctcgtggttgagtttgtataaaaagattatgtgacattaatgatgataatgttggtacaaaatctgaatccattcactaagataatgcttaataaaatttctatgggaaacatgcaaaactaaaaggttagagtttattatcattgtaccaccccaaggatctgccataaatgacatacattaaatcagaaagtaaatactgtaaaagaaaaattaccacttaaagcttatcaagaatcatatattacttttttttcatataaaaatttatcacccatctaacaagagagcaaagatgcaactgaaagtgatttttcatgttagtcacggcactcaaggaataaagtgggttaataggactcacactagtgataatgacaacatgatcttcctgatcgctcttctttaccgagattttcagaaaccaatgaaagagaaagctaaagaaatagataaagaatgaagaaataataccatatttttatgtggttgggacataaacgagtcatagtcaacaaggtaatattattacaatgaggcttgaaaagtcttaggatttacatgattgtttgaaccctagaattttcctaagcaattgaaaaatgagatttcaaccatttgcatgggatgatgttcttatatttatagtgctacggttcttatttatctcccttttgcatactattagggtaaatacaaataacatattgacttaggcccatctcgtggagcccgaccaatgaggtgttgattatatgctgatgtggatctcacataatgtttgatagttgtccaattcgtgtcctataaaaaaggcttaaagatacattaaatgtttgatactcaattattatctttccatattaggaagatacgactcacgagtgagatcatgagagttaaatccttatatcgtgggatttggtaattaatgagcatgatacggagttgattgtctggatgtctactgatgacttttccgaacgctccaaataatgtcttctggattctcactgttgttggaggaatacctcacctggacgagttgctgcctatccattatctggaagatcaatcttcgctaatggatgtggcccatcatcttggttgggcctattattgggcccgaagtaactgagctataactggctttggaaattatacgtgtcctcatccaaaaacactgatcacatttaacccctaagcatctagagctctaggggttatataatattgtaccttgaggacaagtggaggctaaaggtgaaacatttttgtaatccaaaccaaatttttttctggttgagagcttcttaatttttgaaatgaagcaacacatggcattatatctttggcttgtcgggatcatttttcttaatggagtacatgcagtagggcttcatgaaacgatgatggattgcattagaatgcataccaaggagaatataatcattagatatcttgttcccaagcatcgcattaaatgcgtatctaacagttttcttagaccgtaggatttttcttgtgtcttcttggacgtgatcttaaccattgatctagaatcatgtagatcacctcttttatttataaatatagtaaaagtttcccatttaccacttttcccgaaatttcaaattgagtacttgttggaaattaatttactttgatctaaatttactaacatgtatgttggattataattctataatttaacattctaaatatgaatttgctaaaacaatgaaataaacacataaaagttgtagaaaacattacattgatggcagcagaataatatgactcaatctttacagatctctaacccttgatcctttctattgcagagtatgatcaagatctaaactaggattctcctttagttaaatatttgaactacacaattttccgcactatgctgagtatattgctttgaattgtgtgggaaatttcttaatactaaggaggacaaatttttgtgaacaaacagtaatagaatttcaaaaaaatagatcgaaaataataagttttctttttgatttaatttgttagacaagagagattatattagggttctacttgaatcaaaagccattatgttctatttatagggattcattaggtttggggttagaacttaatgggctgatttgaaagatccaatggcttaaaatgctccctcacggccgaacccttatgaaggcccatgagttacatttttgccattactttgcttccttaatgaagtaaacttatctttcttcagtattgccattttttagctcttgctatttaaatactaattctatctatttaataatnnnnnnnnnntatcaaataaaattaccatttaaatatatttattaattagaccttcaaagatctcttaattaataaataaaccttgaattctgttttcttctcaattatgtccttccttggtaaaattcacaaataagacatagtctttatttagattcctattgagtaactaaatcaattaattgagactacaaaataatattatcacagttagtgtggggcccatgtgtctatataactaagctctcaataagtaattctagaatttaccaagtaaattttctatcttattaattcttcctgactctactatagaatcaaaattggagtcatgattacatagaatactctatttaccacgaatagatacggtgtaaattatctattgtttcaatctaaataatcaaagatcctctatggatgatttacatcaagtacggataaatttactgttttacccttcaannnnntttatccttaaaacacttagctttatataaatgaaattttattaaactaatataattactgaaataagagctctttcatttatgtctgttagccaagctctaacaaaatcattgtttcacttctaaatagttaaagaagatttagattccttatctatgattagcgnnnncactcaattgcactaccatgttgctaagatgtaagtattgggccgatacaagtggtcagctttaacgaacaagtcaaaga

SEQ ID NO: 23971 - DNA, 2780 bp, Cannabis sativa
tagaactttttcaagaaagctccattccattttatcgtaagccttgtgcatatctagcttcaaagccataagcccccccacaccccttttttgacgaatcttgtgaactatttcttgtgtaaggatcgaagattcagcaatccaccttccagggataaaggaagattgaaaatgggataccaaactattcattagaggtctcaatctattggataatatctttgcaattactttgtatgagaaattgcaaaggcttatcggtctaaattgatccactctcatagggattacaaagcagctccaatgggattacaaagcaccaaactaattctaaattatttatcttcagccgatcaacaaatatatatatatatatcatcattaatgatgtggttctacaaaggtattgttgacaacataaacttttttttttgctactagtgtatatattacatgtgttataatataatgaaattaatattctatttcatataaataaaatctaatccctaatataattttaggtattgtgttgttgaaataatataaaatctattatatactaaaattttacaattttttaatgttgatgcatcgccaaatatatgatggtagttgatacttcattaataaatgtgttgtttagtaatactttttaattaattttctgtttttaaaattaaaaaaataaaaaatattttttaaaaacatgttttataactgacttttcaatgttttaattgaaaattaatttttttttttttttaaaaaggtcacttttactatttttcaaatagtttttttaatcaatattttaaactccgatcaaactgggacccatactcaaactcggccttggccctggtgcaaaacctagcacccaacctgaacccgaactcggccccgaattcagacccgacttaaataaaataaaaaaaataaattttacagatcacacttttgttttctgtctttaaaattaaaaaaaaatggttacaaaatacatttttgtttttcaaaaacataataccaattttatttttatgattaaaaattgaaaaacaaaaatattagcaaacaacaccaaaattagtccttgagtttactaataaacaaataataataacaaacaagtttaaaaaattgaaacataatagtatgcaaactcctagtctagtccttgccgtctttatttattattcaaaaaatactaattattataaaagaaaaatggattctttaaagtttcaatccataaatttaaacatttaaaaaaaaaccataaataaattacaataatgtattttttttttttttttgaaatcatttacaataatgtatctatgctatgctatattattcattgggattttgtataaatatcaagggtatgtggggttttttttccttttctaatagattgagacttgtcatgccttaaatgtaagtccaagtaagacttttggtagctctaatcttaatctgtctccaattttattgtattgtaataaatataaacattatattcatccatattcatgtattttcacggtcataattaataagataaggatattgtcaatgaatctcatcctattaaaataggaaagaaagaaaaagaatagcaaataatctgaacttcacatcaaatttagaattttaaacttatatgtttactatgcctaaatgtatttaaaaaaaaaataagaaaagtatgtttgttcaatttttattatttatttgataaattaaaaaaaaattataattggttgaacatttatatatatatatgtataaaaaaaaaaattaagtttgtctactgagattggcaaggcacaaaggattctaaattttaatatcatatgtaagaatgacaacaaagtcaaaagatgatttagtgttaaaaaaatatagtcggtatactttatgtcaaattttgcaccaactataaatttgtcacaataggttttttgtgttctataataaaacataggcttagtcaaattcacctcaacacaaaataataacaattaatttgtcaatttaagcattagctatgtggattgattttgacagaaatctaacaaaaagaagtttaaaaagtgaagtaatgatcagataatacctacctgctattattgctgcacatctctataaatgaaagaaaacaaaatgtaaatcaaaataaaagttgagtggtattttttttatttttttgcttaactttcttttttctttaacataaacaaaatttaatatttaattaaattaataatttataataatatgacattttatggtagtgttagacaatacttttgtgtatttatttttatcttttataaaagaagattactattaggtattatttatggtgcttagtacttgtggacttatatagagccggaaaaaaaattaggaataaagtgcacaaaaatgatagttttgtattttaattagttataagatatttataattaaaggtgtaatatattatataatattaattttgatttaataattaattacctattataatatttatttttcttgtaaaagtgatgtaataattataatgtaataacgattacattatataagaaaatctaattattttttttttaatttaagcatttatatattataacaataaataatttggaactcaaactcaagatctataccaacacacattcttatagccacttgaactagaggctcatgtagttaaagaaaagttaggaaaagagtattacataactaaataaagtaagattaaa

SEQ ID NO: 23972 - DNA, 3077 bp, Cannabis sativa
tatcatccaatatataattagattagatatggataggcctaaaaacattagatgtggtccaatgaacgccccaaaagaaagagaacatcaacaggcgactaattctaaagagaagggagagagttttttcaaaaaatctgaaatggaaaattaatgtatagtagaaatagaaactcccccgtaaccttcctttcatatccaaagaagaaaattatttttctctaattaattaaataaaaaataaaaacaaaatacaaatagaaaagtaatttccttccttgccagttgccatccaagtaagtggatattgggcttgaactttttcttttcttcacttaagcccaatgcacttaaaattatgtcatcttttcttttttgctatatttaattaaacatttcatatttaaaaactaattttatttaaataaatatatctagataattattaaataaaaaataaaatttaaatattatcattaattatgacaacaaaatgtctttattagtagataaacctttattttctcgtttttaaaatttcaccaacttagtaaaaatatcaaaattgataaaatcaataatgtgaattttaattgattaaaaattcaattattgtaacatactgttaaacattatcctaaatactgctgggaccataggccattaaaatcaagctcctaataagtagatttgaaatttaacaaataaatttcctaacttattaatttcccatgactccactatagactcaaaattgcactcctaattttataaaacgctctgtatacaatatatagatatgttataaattatccattattccaatcaaatcaatcaatgattctctacagacggtttgccatgcatagtttaatgaaggtcactcggccatggtttcatgaaggtcacttgaccatggtttcaacaagtcactcagcccagccatgttttcatgaagatcactactcgaccatggtttcaacaagtcactcgaccatggtttcaactaggttactcgaccatggtttcaacaagtcactcgaccatggttttaactatgtcactcaaccatgatttcaactaggttgctcagccatggacaatgtaagtcactcggtcatgtgacaagctagcacatcccctggccatgcaacatgaaagtcactcgaccatggacaatgcaagtcactaggccatgtgccaagtttgcatgtcactcggcatgctcaaggccttgtcactcgtcattcaaaaggataactcactcgataatgcccttcccgatgacacaaaaaagcttagtgaagttttcccaagagtttaagacgaatgtagcggaggcacgatcacgaggacgaggcatgcatgtaaaggatgaagtgtgcatgcaaagggagtacaaccacacctcctacaagttatgatgacaagcatgtacaaatagtggaagcaccacacatgcgaggcctaacatcctgaccaagaatgcagaaaaactactacccttgcaactcgagaccacctgacaccagacaaaggtacatgcgtaagatcaccatctgcaacctgcaacctgtagaccatggatgtcaccatgtcccttggaaccaccaatgtatcctaggtcattagagcctataatatccctttctcaaatatgagaaagagttagaaaattattgtaacacttcactttcactccaagaaatacaaacatttctcttcttccatcgttgctctgaatattttttttttagctttttgaatttttatatttttattttcgttctaagtcttgttttcaagtttcgattttctagcctttagttgacgagtttttatcgttaaaaaaaacattaatataattattacaaataattataaataaatttattacagaattactatattgttttatattttaaaataatacttattttccataaaaataaattgtgaaagaacttaccataaaaactaagtattgattaatatggagcaagcaagagaagttttttttttctttttgatgaagtaccaagcaagagaagttgcttggctaaaaatcactataaactaaaaaaaaattgttcttgcctcatggacatttattggcacaataaagattgtcatactttttttttctttggtcattgaagtaagaaatctaaactaaatctctaccttacctaaaaggtgattggcattgaatttatttttcggcttacaggcatacctttatatgtggttatttggtattctctacaaaaggacataaattaaatttattattttctcctcttcgaaattgatataaatataaatttgtgtagacacataataagtaaagccgccactattaaactcacccacctccaaaaccaaaacccaattcttccaagaactctaaacatggataactcataatgctgagaaatgaattatatgctagtagtgtataatatttttttatgtgtcaatataattattgttttaatttattattgagtttcatataatttaatataataatttataaaaaatattactaactaatcgtaaaacaacatatttagaggtactataggcgctactagtgcccgaaatatataaacaaagtctttaatagctacaacacgatctgcattgcatggcctttcagttagttggtacatagcaaaaattattcaataatcaattaatttaacagtttaatatatgacccatttaaaagatgtcacgtcaattcaaaataatattctttaatgttgtgtgcaacattatttattgttagtgaaaagataaatattattttagaattatattttatttataaggcttttttcatttatacagttgtagttgattttttattttatcacaaatacgttaactataataattgaatcatttatacaatatactttttttcttttttagcaaaactacatcgtctcctttgtataaatgaaaaagtgcaatttcaacagaagatagaaaaaattattatggtttgagagttcacgaatgacattgtcgtctcctttggctccaacaactttttcgacaaccattgt

SEQ ID NO: 23973 - DNA, 4190 bp, Cannabis sativa
gagagagagagaaagagaaataaacactgtaaaacacaagaattaccattcttgcctgtgatttggaatccagctttgtaactctttaatcttgaagatccaatagtggaaacgagcttttctgaggcgagcttgaagaggatgtacccagaaattattggggaacctctataaaatcctggtgcactctttctcattttctttatgtttttttactattgtgtttatttgtttgtgtatgtttctggagtttattttgatttgggaagggtttgattgttgtgtttctgggttgaatgcagtcttcgagtttcttgagaagaaactcgaagctctactagggtttcaatctgaagttgtgtgcgtgtgtgaaatgaaatgattctagagggttctaggggtaattagggttaagcaaaacgatttgtagtctaaggttgatgactgtcgtttgttcttaactcaaaggagtcaaccaaggtttgactcagggtgaaaggtctattctgaccttgtgaaaattgatttgtttactgttgtgtgtaggataaaagggtaaaattcctacacaagaaatgccacttttatcagcacatttggccaaatgcgttgacaaaagttaacgaatggtcgaaattcgattaaagcttaactgtgagcaaagccggaccaatgaatttagagagctaacacaactgaattaccaactgtctcaaagacatttatggatacccaatgagtattccaaaagggtagtccaaggggtgttgcggacatcaaccttatggggttggtctgacgtggcacgcctctcacacaatttcacactaaattaggggtttgcccccacgtcaaacctgggaatggtgcatctcacaaaaagtgaaaaatggtaaaactgaaattgttacgcttagtaaagtaagtccaagattttaggcccatttattttttcaagcccagcccactaactatccagtatgaagaagaagaagactctagtagcacatttactatagtatatagaatcgaagtaaattaatggaaaaatataatgaaataaatgaagaataatcagaattaacatttataataatgatttatcttgttcactttatctgaaaacgtaatcaactcttttgaattaaattatagtatatgataattatctgtaaagcatattttaaaggataaaattgtcattatatattttaatattaaaaaataaaaaaataataaaaatcattatcacattctttcaaaaattaatagagaaagtattttttttttcatttcttatttcatcaagttttttttttcttttaattttaataaagtaagtaaataaatgtaaggtatggcttattagtaaacaagctttagactctactgagcttcaaagttatggctatggccaccgccattttggctcctctggcattgagaacttcgtttttggatcgtagagagagtggtttccttcattttgtcaagtaccatagcctcgataacaatttcattcgggtaaatttgaaagagatccaaagaaaagacataaatgtaatttaacagccaataagattttacccaataatatttaaagaacaacacaagatggaattgataatcgtattattattattatggatgataattattaaaaagatatgatcaatttatcatcatcaagaacaatattttagagctatataaatatatctaacaatattacttgttccaaggataacaaatagtaaagtctttggttttattatctttcatacaagcgcctgtggaacttattttccaaatgtagtgcttgcattttttgcattttttgtcatctctttcacaatcaaatatgttgaagaaatggtcgatctgacttttgggccattgaaagttacagaagaagagtgtggtgcataggagattgggatggaatactatctcgtaggagctattgtaagggacgacatgtgtaccaagatcatcgtccttggacttgcaatgaagggtcaaatcgcttggatcagaatcgagaccgttgattatctctacatgcgtttttggttgaaaataccatgctctcacatttgttgttttgcatgataaaaacaaaaggaatgcaacaagcactagctgaagtagtccttgtgctttgtgtgacatagagaaaaggtttaagagagtagaactactcatatttaatttagacttatatatttaatttgtagttatggttattggaatttggtttacaagtttttgtggggaagaagaaacacatttatatataataacagagggagaaggtaaatccatacacatttctatcttatccgcttattatgtgaatctagtcaaggattactcatttcattcaaaactaattggaaagagcaataaaatcaaaatccaaaatggaataaataaataaagaaattttcagaaaatttggttgagataagtttcttaatttattactaatatgactaatattaaattacttattaccatttatatagatactatattttttaattatcaattatcttatatttattgtaatatcaatttagaaattaaattattacctcatattatattgtattaaattcttttcatattttaactatttacattcatttttatatattttttatttttaatttagtgtctacaacaatattattattcacatttcaagagcatatttattaccattctattgccccagtttattcccaaaatacgtggccgctgccatgtatgacacgtggacaaagaagacacctcacctggagataagttaaaggtcgtatggaaaaggcgacaagtatggttcagggcgttagttcccggtcaagtgcaaaagggacgccttcttctccgggagttaagatatagtaaggcaacttcgagacgaaagggatctacgcgaactgtcacctaacatttaatgcagcatggagaaagcgtctggaaacgtccataagggaaagtgtcagacatcgtaagcctgacttagcgcgataacacgataatcaaaagagctggtgacgactccattatgaagaatcacatcaatcaaggaaggatgaaggctaatctcacctaacctctatgatacctactgtgtaggtaatggatgccctatcttgtatcttttgggaacttgtgcttatccataggtggctctcaaagacaagttaccccttttcgactattcccaccaatctctataaatacccctgagaaaatgaggaagcggatcgaaaaaaaagtagagagaaaaacataaaaagaacattctctataaggaaatactctcattaataatagagaatcgtggactacgactcattaatgcccgaaccacgtaaaagttatttgtattaattatctcaaagctttcatcattatatcatttaattagttgccgaaaacctcggtcaatattttggtgcttacattgagagctgtgggaagcgttgtttgaaaaacgacaatcaagaatcaaagctataatggtggaaactcgaaacaacacaccccaacctcatcccccataggatcatcaggacccagagggtgaagaggcggcttcacgagtaaatgtgggctctgaggaatgagacgagttgaacgacgagggatacgaagagaatcccgaaggatacgatgcttatgacgatgataggtacactgagttactggtcctaaggaaaaaagcgactgatcacgaggccaaactagctggccaaaaagaacagaatagaaggatgcaagaaataatggttgccatgaaaaaatccatggaaatggctggaattcatgtgcatcccaaagccatgcctgcagaactagaggaaacggaagaagagtcctcgctaagcacccaaagccccaaaattagggaaccaagccccatacgatatccttccgagaaaaaccccaagaaaaatcctactttgatgtccgggagaaacaaaaaggctcaagatccgcgaaaggtccgatctgatttcccaaaagggaaaggtccggagaggggcaagctccctcgagagagtcttgccccacagaaccgagaggactgaaagagtttgtttgtgcatcaagagcccggggaaagagggaggaaaggtcgaaggcatcccccttttgatttaagataaaaaattaac

SEQ ID NO: 23974 - DNA, 2194 bp, Cannabis sativa
  modified_base (104)..(107): a, c, t, g, unknown or other
tttcaaataaatctccgtaattaataaattacgcttatatatccacttattgactctccagggtcgtcgaacctgaaagtatttttattccacatatagctcannnnacattcacacatgctatataaaatctctgtaactaaaaaattatgattatttactcacttatagcaaaatttaaattttatactgaaataaattagtaggatcataatcccgcttattacctgattaactcctaatataaatataaaccctaattatttaccattagacttattgggatattacaagtctcgtaaataactgatacatggacccggttcccaatgaaaaaggatggcgtgccaataaatagctccagtagagttgacctcgcatgatataaacttccgagaaggtgcgaccgagacagtgtctagtcgcacactatgcacaacatagtcgaaagataagcaggactaagaaaaattagtataggtcgtgcatatatcgattatatgcgacgagtaagtacatctctcatgcaacacgtaaagatgacttctttatataggtttggttcgaaagactagtgtgttcaaaaactcgataggaacccacacactactacaaaaactcctttagaggcggttttttttagcccttccagcgtcggttttggcgaaattcgctaccgacgctgatcagggcgacgctaaagggttaataaacaaccgatgccatatgtaccctatggcgtcggttattaactaggaactcacaaacattcattaattaactaagtaggcccgaacgcccattatgtgggcagaacacctcagagaccacgagctcgtgtgttcggaatatggaaagttaaactgcaacttgacatgtcgcacacgtttaggcaattaatcaagaacggacgaaattgttcttacatttattctttaaacatttgtattaattaaattatgtaattaatgtaataaacaatcctatctaaccggttatgtcaaattaaaagatacttgctttctatataaatgagtgatttaaatcaaataaattaggctgaaactatttacaaaagcagactaagcaaaccgagccttaattgaaccactatgcatctttgtgttatttagtgtttactatctttgttttgtctatttcgttgttaattctttgagtattcatcattgtaggtgaatactcgcatatctactagtgtatattcttattttacttgaatagtcgctgctatttttagtgttgtctaattttcttcagcaacattaaatatctattaaaaatatcaaaaatatatcaatgacatcaaatattctttaaattatcccccatcacattgagatactcttgtaacacaagtctcatttctaacttttactcgggacttaacacaatgagagaaggggaatatatgaagattattgatgattatatgagtacttgttattataattacagtttaagatttatgattgtatgacgtgttattataattacagttttagttacattattcagtataaatttaaaatttaaaatttaaaattctttcccaattcccataatacagcactgccatatgcacatcatataaatatagatttatatatacacctgtatacaaaaaaaaaaaggtcatatctttatctagtggcaatacaaaatgatgaataaataacacactgatgtttatatagtatagcactctttgtatttctaatacttatcgttattttcgataaacgtcattttcttcctaaataaacttataattataaattttcaaaccaacataatattttcttaattaatctcaataatgatagattggttagtctaaaaagccttcttacgtataatattattcaattttaaatgcccactgttgttaaattagtaaaattgaatgaaagtggttaaaaaaaatctttaaattcaacaattttaagagaatttttaacggccagaaaaattcaaaagactatatatcaaagttaaggaagtaaaattcttaattagcttgttattattagtacaactaaatatcaagtaatttaatagaataactttttaagaatatctctaattaattatataacttcacatgagtgatagtagacatcactagtatacaatatcaatatttatttattatatgtgaaacatataatataaa

SEQ ID NO: 23975 - DNA, 4681 bp, Cannabis sativa
  modified_base (2215)..(2215): a, c, t, g, unknown or other
gggaaggagtcctgctgggagcttgagaactatgtctcattttgtgttagatcttctcctttttttgttggttgtatttttgaagacattgtaattttgcagctcataacgtggctaagtggccatttttccaccagagatttggcttaataccgatgtcctctatccccgaaaaactcttttgtaacaaccacgaaatctaactacttttatatatatatatatatgaatgcttttctttaaaaaaaaaaatcgtagtcacattggacttattctaactcctatattaattgttgtacttaataacaataaaatgagttatttatataatttgttgttataaacttaattttattagttatagaattaatttaaagtcttggtttgaggtaataaaatagaataaaataaaaagaaaataatttccattctgtttttttatttggttgcatattaaagtattggaatgccatttcaatagaatgaccattcatattttggtggaataactattccattttaaaataaaggaaataccatttcaatacaagaaaagaaaaaaatttacgagtaaatactatttttgatcttgtgttttgcaaaagttactaatttgatcatctgttttgttaaatgacaaaatgaaccctgtataaaattatacaaataggaccataaattgattttttatcaatataaaacttaataataatctgatctagagatgttatgacgaaactaattacattttatatatatgttcgtattagaaattgtcttaaagttgtttataacaaaaaataaaattgttaaaaattgagctcatggtcctatttttactattttagaaaatatagagtttattttgtcatttaacaaaacataagatccaattgacaagatttgtaaaatataaggtctaaaatggtatttacctaaaatttaattataaagattagttatagaattaattgagttctttaatttgtttagttgaagaaatatatgatacctcttgaactaaaccaaaagaaattattttaagaggcatgcaccatttaaaggtgacactttataattttttttttgaataaaatgcaagttttattagctcaaatcattcatgactaagagaagatcgcgtcaatatatgtgcagccttattagcatatcgtttaataaaattgaaagaaattacagagaaatgctaaaatgtaccacatagtacttgacaccctcctcagtgtcatactattattagtgtaattatgtatgagatctcatataatttaagaaaataatttttaaaaaatattactaactaatcataaaacactacctataaactagtgtctaataataatactttaaattatatattgtactaataaaaatattatacttagaactatatacaccattgatacattctaacatttctgttatttgaattgtaaaaagaagaaacgacatgaatgttgggcaatacttatttgatggttttccaaaccaaataccactattttaatgaaatttattaaacaaaatgaataggtgggttttttaaatacaatcttaaaaaaatagagaaacgacaactagaaaatgaatgtgattgcctactacctttgtcgtttgttttattctttttttattatgaaaaagaaaagaaaaatgttgtgattgtgaacacgttttaggacaaaccaagcttcctattataaagtaagatttgtcattattatttatagaatcttcacatttataaaaatagaaataaatatatttataataaagctatgtgtggttactttattttttttttaaaaaaataatatctattattattatcaacatttttttaataactaatgttggtctagcttgaatatttttgtccaaagaaaatatattattcttctttctataaaagtgacaaattatattaagacataaagaccgaccaatattttaaaatttaaacttttaaaaaaataaaaataaaattttaaaaaattaattaaaatataagaaagtgacattaaccgtccataaccaagtctcttcatcatttttttttggatatggataatacattctactaattaatttaattaattaccaaatataatcaaactaaattaaataaattaataaaaagaccgaccacactttttctttctctaaaactttttaaagggtatgtatataaatntttttttttttttgagatatatatacgttgattaaaaatatttagaaggtcaaaactaatatttctttttatttattcatttaattaattaattaataaataggattggatctctcatagtaggatgtcacatgaccccatgttatattattgatttgtctcttacatttgaagaaaaattaatattttgcacaattccacacacaccataaatgcaacacctactctattcttattattgcttattgattaatctaataattacagcacaatttgatcatgtaaataataataataacaattatgatgtaatgcatgataaaatataattacaattgtattgctattatatttccttaaaaaatgagcttaatcctcatttttcattaaaaaactatacaatcttaaataatatgattatattgacattattaataattactaattgccataaaaaattaatagttaaaataaattacatatcattcttttatcttcaaagatagttgagtaatgttgaacacattcacagttgtatataaatttattttaatacatagttaatgtggttacctaataattaatatcaattacacattaatatatataattttgaactcttaattaaaattaactttaatttttgtattaattaaaaagaaaaaattgtaatattaaatttgaaactatgtgtagagtccataggctccttacctctaaacttttcaactaggatattaataaataatgacacaattgatgaaaagtaaagtttaggtgcttctaattaaggtctacctaaaaaataggtgtattcttacactcttcacaaaaaatatatataccttatgtataaatataatataagaatgtatatattatttatatatatttaggatatatcttgcaaattatcacatttttttatcacacatacatataaagactcacatagaataaagtatttcaattataaatttataattattcaaaaaattttaaaatataataaataattataatgtacatgctatatttataacaagaaaagtatcctattatataatagcattgtaagtattattaatgttcaacccaaaaacaatatttccgtaaattcttaactattttgatacttaaaaaagtttcttaacatatttaatttcttttcgtaatcgtgtatgttataattttaaaaattaagttaccaatctacggtgaaaaaccataaacaaacatgtagatttttttttgaacaacaaccaaacatcaagatttaattacacaacaactaacataaacaattcaaaccaataaagattgaaaactaataaattaaaaaatgataaacaccaaaattttaagtggttccaccaaaagctttgcaatccccatttagtccattgtaggaatagtttcaatggaacaatactaaatttgtccaagaactttacaatcaacacacttaatccttagagctcaaacaccctcgacacttcttaaactctctatgttttaataattggattaccctttacaattattttgacaaacccttatatagccattggtacaaattgaaagtaagagacagtcaagacaactaacttaacttattttttgtccgagtgatgagttggctgttaacaccacctactcttataaaaaaaggtcacaaatgaaatgaagtatattttaattttattttatatattgtaaattatttaaaattttcaaaataatttaacaattcatcaaaaattagactgaaaaaattgccgagagagtacaccataagaatgatgaggactcacccataaaagcttaacttgagaggagtggagcgttggtcagtcaacgagtacatatcacgcttcaatggcaattacgtaaataacccaataaagaaagggtaaaaagggaataaaaattgcacctttaattttattttgacttacaaaaaaaataaattaaagtattaattttgggacagtggcagtatttagcagtgtgaggaagaaagaaagagaaagagaatatagaaatatataagaaaacgaaaagagaagagagctcaatcccttaagccgtcttttcgttgtctttaagaaaaggaaacaaattttggaatagaaagtgagggaaatttggcttcaaacatgtgttttttcagctgggtttcaacttaatctgcttattattctctccttgatgtgggtttttcgtttcttcatctttactctgacataaagatagagtctttcaaccaagaaagcatttttatttcatcaggtatctgggtttttcttatcatttatttattgacttgatctagttatcatatggggtttcctgtttttctggtttaatctctttgagtttttgttttgatgctaaacaactaagctttaatgaatttctgggcttttggctgagaaaaaaaaatagggttataaaactagttca

SEQ ID NO: 23976 - DNA, 2475 bp, Cannabis sativa
tttttttttttttttttagagattaaagaaaaaacaaaacaatagtaagggtattttgtttaaaatatgaaaaattaggcttcacgatggaatttgaaaatagcttaatgggacttgattatgttttggcagattaagttagatcgcaaactaatattatcgttggttagatagcagggcggctcttgaaatgaggtgagccactcgtgcgcctcgagctcccgaacactcagaactcaaaattgtgaaaaaataattatcattatataataaaaaatttatatcaaaataatatttgttatagtggtagagagtgttattttaaattaagaggtcatgagctttaaaagattgaatcttagaatttttgagctttaaaagtttttactactacactaaagtactaaaattattattttaaaaataattaaaatattgatgtagggctccaaaatttaattttatttgggccctatatatcttaggaccggccatattagataaaggttaatgaatattaagaaagcttgataactttgtgttttaaatgcaagaatttttatttaaaaggctcaatgaatttgataatgctagatgttatatctttaattttttattttagtttattttatagttttgttttgcgatttacgtgatattatatcttgattaatttgggaaaataaatttctttggggttttggtttggtagttttcggaagaattcggacgacaccaagtagtatataacaataaataattaaaagaaaaactacgaacactcttgtttagaacaatgagtattcaaagagactatccagacaataaaacatatggaaaagtaaaatgaacacaagagaatatagtggttcagtcaaatcacgctttacttagtccactgttgcaaataatttctgcttagtttattcaggttggatcactcatttataataaggtaagtgtccttttagttacccataactgactggtcgcccgttttacaattaataaacttattataattaaaaaattaattactactattgctattagtatttattattatttgttgttttataattaataacaatatattgaattagaataaacgtaaaagaataaatgaataacagtttatttcgttttaataagtgcaacaacgtatgcgacttataaggttgcgagttgtctgttcatattcctgcacaagctcgcaagggttgagatcggagtcatgagtggctttggtttcccgaatttgagactagagagtgagagaagaatgtctcctaagataaaagaaagaattgaagaatatcatatttatatagttgcattattaggaaagaaaaatcgataaatccgtcaaataaatctctcaaaaacaatgttagcgatctcatttgacatattttcatgatttgcaacatattttgtatttattattttaatcgattggactcagcatggttatttccttccaaattaaatcatcttatttcctcttattatataaagtcacaagagagcaagagcaactgagagaatgatgaaaacagtcaataataataataataataataaattcaatcaaaatgatgtatacctaccaaaccatcttcacctccacttgaaaaactgtaaaatcatgaataaggtcaaataactcaatcttcaatctgtacatctttaaagttaagaacgcatttttcttatctcttaaacttgcatgactgccacaaattatctctattagaaaagaaaaggttctcattaatgattttaagtatactctatataaataataaggggatactacaagtgagatgagtccaaactaataccaaagacgacataacctaggaataatcagagttgtatatagttatttactatagatgaacaagggaatcagagtgcaattagattttgaaccaagtaaacatttcaaattcaatagattgcattattggctagaaatataccttttaccaccagggttgaaagccagggcattaattggtccaaaatacccttttactcatccaatctcttcttgaagaatctaaacaaatgaacaataggaatatttgattcaaattaaacaatccaaacctagttcgtttgtgtttcttaattagagcaggacttggatgagtgggtttcaggcagcctgggatgaagctttgtgggtttcgcaaaatccacctgtaatgaggccacttgtaccgaggacataaaataaaataaaataatgtatcctatataatcaagtatacatcataaatatataataaaatattttatcatagtttttatttaataaataatttaaatagtaaaataaaaatacttaaataatataaaattgtttttatcttaaacactaatttatttccttttatttttaagttgttttgtcttctccaaacccatataacccaaaatctccatttcagactgccagaaaactca

SEQ ID NO: 23977 - DNA, 4138 bp, Cannabis sativa
  modified_base (4102)..(4104): a, c, t, g, unknown or other
aaatatttaaaattccgtaaaaccgtatttttgttgtttttttttttttattgtttttgtgaaattaaccctttgatcaaagatagtattttgagatggatttcaacagcaaagctaaacaagtttcgaaggcaaatgtttttagcaacacttgcggtgataatataccatatatggaattgtaggactgaagctctttgaaacatgaaaatttacatatttgatttaccatgttgttagattatatgtaaatttcacttaattactataattgtaatttttgttaaaaggaaatcacttattatattaagaaaatacatataatggtatcattcaaaatttattagatattgtcgtaaaaaatgtaactaaattaattttcattaacttacaaccaaactagagagaaataaattaatgaaggacttaaccaacaacaaaatgactaattaaaaataagattcttacaatatatagtaaggaagtgtgattaatcacaattgtaaaataaactaattaagcaaaactaatgagaatgagtgcttaatgtcttaaacaaaaccatgatgatctctcatcacttcgtctcttccattctactattaatttgtctaattcagcctttaaggtatcaatatctacattatttcggaaacatgattgtacacagcagcaatttcttggtgtcgccataatctcctcctccatagaaattagcttcttcatattcatctcatcgagttgaacaaatttgttactactaaggtttaaacaaagagcatctcgataactaaaattattattattaggtgggtttagagaaggagtctttagacgaacagaattattattattattattattattattattattgaactcttcaacatcaagatcttcatgctcttggcaaaactccattttttttcaatatcaataatcaataataataaataatgaacgctacactatagtatttcttaatgttatttatagggtactgctcttttattttttaatatttataaatatctttgaatttgaattatttttatattgattatctttaaatttaaaaaaaaaaatcacagcgatatttcctattctaattagtttctatcatgcacggtaacaattatggtttgttttagatatttatttaaatttagatttaaaataataaaaaaaattctccataactaaaatctatatattttatataaaatgcttttacgatttttttgtcgttcaaaaaaagatgaataacaacaaaaataacgaaattattgtgatcatgaaagtatatttaataaacattaaatataaaattagttactttatagctaagaaaatatcagattaaatttagtggtttcataattaaagtacctcttatgtaaatacttattaattatactctcttcgatgagtcattccatgatcaaaattagccaacaacataggaatgagttatacagctataaaaacagatttttttttttttaaaaaaaaataaaaacatcatatatatatatttcttaatttattaattaaatccaaacataaaaaaaaaaaaaaaaattaatgttttttggtcgtcataatttatttactgattcatatcggatatgtattatatattattttcattttagatactcaacactattttatgaataatccatgtaggcttgtagctatacttaaatttcactttttttttaatggaaaatttcacttaatcgttactattgtaaattttcttagaacattcttaatggagggtaaaaaagtaatgtattgttatattttagtatatttcaatagtgttctaaagagtgtgttaaatttggcacatgttaaaacttgtgctaaatttagcacaagatatagtattgtgtcaaatgtggcctacaataaattttaccttctttatttattatagtgccactataattattatgattcattaactttcatataatttattttctttatttactatattatcattatttaaacaataaaaaaacaatgatatttatatattttcaatacaatataatggtattattcaagacttattattagatattgtcataatttataaatatttgagtaacttgttgcataaatacttaattaaatttaactttcggttacaaataaatacctaaacataatttttaatgataataatacataagttataattttaaaatttctataggtacgcaaaatgctaccaatctctaattgctcctgttatgaattttttttttttaaaaaaatatttaaatatataccaataaaaaaatattgactacatttaagagtgagatacctataaaattctaaaaatataacttaaatgctaaaaattaaacttgaatatttatttacgagttaaacttaagtatgtaagtcacaaattactttaaatatttcaaaaaaaagtcagtaattaatttctgttatatttatatttggaaacaaaattggtaagtattagccaagtcggtgacaaataataatgaaaaataaagggcttaaccaataaaatgatagctaaaaattaatgttttttttttctttttccatttatgttttagccatgaaattcttcagggagtatttcataaatatacaaaaatactaacaaattataaaaatacagttatataaaattttaaatatttttacaatttttatatttacaaatatagtttgctttgatgttattttcctgttatatatatatttgtattatttttatagaataccgtaaaaatataaaaataaaatgaaaataaaaataatattttatgaaattattttaaaataatacatattctttaatttggccctatatatacgataaaaacaaaatttcaaattgatcatcatattgagaaagtgtgatcaattaaaattaactattaataatgcaaaataaacttaactaaactaatgagaaaattgtgatcaatacataattacttaaataaaagcatagtaaaatatcttaattgatgcactatccatcttctaaaattatatcaatctaatgattgtttagcatctccatatcaacattaatttctcttctatgttttgctattaattttcgcacaacgcttagtgcagttattaagccaccaaatttatgtagtctctgaagatacttctcatcatcatcatcatcatcctttcgagataatggaatcacttgaatcacctcctctgcaaaggaatctaatgtagaaagcttttccgaaagcttctccatattcttcttctctagaagattcttctcatcaaattgttgagaactgttattattaaagtttagagaatgagtgatcttcaaacgatcataacaattattattaacgtttagagacaaattcttaagacttttcatctcttgaataacaacatcttcaccttcgaaatcaacgtcttcatactcaaaatcactttcatcttgtttcatgcattgaacaaaccccattattctatcactttttttttttttataatttcaataatagaaaataatgaaccatacattatatctcataattgtcgtttctatatatagggactacctaggatggctttgttttttattttcctaattaaattcgaattatttagtttttatttcaaaaaaaaaaaaaaaaaaaaaaagatatatagcgatagattggatattatctatactcgtcattatttatatttgttaaaaaaaataaaatcaagggcctagcctccgattatctttattttaaaatactctttatttaaaatcccttacaaaaaatatatgtatttatttaaattaaaattcatttttttaaaaaaaaaaaaaatcaccgtaaatatattttttataattagatgtttttcgaatttgttctaatatctaatcttcaccaaaaaacaagaaaacagccccaaaaaatattaataattgatatataataatttttcaaaatataaataggaaattactttatatgctatttttttttacttttcttttttaaatgtatgttttgggttactccagtagtttatatatgagtaatttgcggcnnnaatacctaagttttatgccgagtagcagataaat

SEQ ID NO: 23978 - DNA, 3505 bp, Cannabis sativa
aaacaaaaacaaagaactgagatcccatttcttacagaaactgagatttgagatgaactcatctcaagaacagcagaaacaaacgaaacacaaatcagagttgagaaatgagaaatgagcagcaggagattgagattaccttatctgaagaaggaaatgcacaggttatggaggctgattccgttgaaagtatcagatggaggcctctctgtttgaagaactgagtagagaagagagagagaaagagagagaagtctttgagagaaagaccgaaattggcaaatttttcaaagtgaaaaatgggcggtattatagatcaaaattccttctccccctaaaaaatttcacgtgttttttttcttttttttttttgaaaaaaatattcaagtgttgagtcgggtaataaggacacgtgtgtttttttttttttttatttaatatttttttatgttatttttttaaaattaaaattattgttttatttattttttttatttggtggtgcgattcaaatttcaaacttgatagtacgagcgggaatgtaagtaggtttataaaacagactgtgcccaagttttcctcagatttcacttgagtttgtaaaacagatttgaaaattacaataatgcccaaattcaaaataccccaactttatagcttttttgaaacttgacaatactttacaaattgtataaaaaaacataaaaaataaatataaataaaaaaaatcattcattagtaatcatatgtggttgatttttaactaatgatagggatgttcgctgtgttggtggtgcagtttttgactatttttttaaaccaacctgcaaaaattgcactgtaaataatggtgcggtacagtttttgcgatttttactatcaccaataaattgtgaccacgacctactgttttagacaacaataacgcacctacacgagtgtgcataaattgatcaaatcaaatgaaaattgttctaattataactgaccgtcaaacattgaatatccaattgtgaattattcagcttagatgttatttttaaatattcaattgaatcggatcggatgttgaatgggttcttcaaaaatctaattcaaccaacatccaaccaaactaattagtatttttatttagtttggatgagtaattaaattgtatattgttatactagttccaaacagcaagacgaactttagccaataaaggctcataaaggtcacaataatcattttttgaaatactaggttcatagaagtaaggatgcataacttcgagatagcctcgcggggacctgcccctaatagggcaaggattccccatctaaatggaaaatggggcgaggacgaggattattttttgtcctcgaatgttaaacgaagtggggacggggatgacactccccgccccaataggaactcacttaatatatctttttattaatattttatattttataatatgtgtttgtgttagttaaagatatacatatgtgcatatagtatacatgttagattgtatgagttatatactaccaacactagtacggttgagatacagagtgtatgtggtacagtatactattaagaggtataacatattgttaccaacactagtacagttgaggtactgagtgtatgtgatataacagccagttgtacttgtaagtaaaaaactatccctactgacactagcacgttagaggtgttaagtgcatatggtaaagaggttggtagtacttcaggcgtacaaactatttgtactcttgtcaagaacgttcgagaatcattatacgcgttggacaagggtcaaacttgtaactagctgtataggaacctgagttatgagacaaattatatgattatatgttttatatttttcttactgagtttgttgactcacagatatatttacatgtataggtaaggacaagacaaaggttgagcaacaatgagtctagagctaaataaagattgtacatatcgaggcggttagacctggagtgttaggatctttgagctcatattttgatagtggttgggcaacactattatgtgtaacattttcaatatagttgtaaaataaaaaaggggatcctagaacattatacttttatgtatttattataaacttattttaatcatgaaaattttaattaatcacgtttttcaataaaatatttgattggcaaaagagtgtacattaattaagagaaaatattgtagcatacctaaacttaagggtattcattggaccacatctaatgtatttaggcattgagaaaccatgtctgtacataaccccgtctaggattagataccgggcagttttcctcctcattttttggcttcattcttgttttcgagcaagactctagtctgcaggtatgctgctatgggtgttatctaagttggactgtaatcgaacatgtatatttcttctagaattgtgatgcttagttcttttaagaactgtatgggcacaaagtttgccttgtcggttagggtgttgcttgctagacgggtgagggcatctgctgttgtattctcttctctggggacttgccttatagtatagcctttaagccaacttaataagtcttgaatcttgcttaaataggctatcatcctttcacatcgggtcgtatactcacttaggacttgatttatgactagttgagagtcgttatatatgtccaggtaatcagcccgcacttcatgtgctagcctagggctagtaatcaaagcttcatatttagcctcattgttggaggccttgaaactaaacttgattgcctcgtgcaactattgccccaggcgtaatgagggtaatccctgcaccgaacaggtggttagtacagcttctgtcaacatacaacttctaggatgaatttttgtgctcttgctcttgcttcttctctggctcttacttttctcccaaatcttgagagattttaggagatatgcatgtacattcagccacaaagtcgagaagagcttggccttttatagccaatcttggttggtatgtgatctcaaattggccgagttcaatggcccacttgagtagtcagccgaatgcttcaagtttctgtaacacctatcgcaatggctggccagtgtatactcttattggatgagcttggaagtataaccttagctttcttgaagctaagagcaagtagtatgtcaccttcttcatgagtgggtcttgactttcagcgttaataatccttttgctgatgtaatatactggatgttgagctccatcttcttctctaattaggactacacttacagcatattctgtaacagccaagtatatgcatgattcctcattatccagagattttgatagaataggaggttgagctaattatttctttagctcttagaatgttgttttgttgggctttgtgccctaaataaaactatttcaatgtaatctttatcatttaattatcaataaagagacagaagtattttcatcacttatttagtgtgtcat

SEQ ID NO: 23979 - DNA, 1960 bp, Cannabis sativa
ggttttgctaatcggctgttggccaatatgtctatgtgggcggtgagagttaacacacactccaactagggtttccgaaaaagaaacccttaactcaaaccctaatttttttttaaacctaatttcgaattttgaatcacaatcctaagtaagctctgatcccatgtagagaatgatgaatagaattgtgtgttttattcatgtaaatggcatattatttatacaacctaggagaaactaaaatgggaaagtatgagagaaaatagggaaataattacaattgaccctattttctagctaatttacaagtaatattctaacacttaccaacaataatttttgtaatcataagattgatactgctaagctattttgtctagttaattgcacataatgttaccaataacacacaaacataatgacacccgattccagatcaggcacatttaaagtagcaaatgttaattgttaatcagcatcctttaagtagcagctttatatgtgtgtattcacttcaataaaaatttacgagacagactattaatctggtgaaatataaatatccataacacatatacatatagaaaagagtgattggtgaaaaaatcctttaaaatataaaaatgacatggtaaactaatgaatgattgtcacctagacattcaaatctcgaatgagtgacaagaagtctcgagaacctacattgcaatgaatgatttaagatctttttcaaaaaaaaaaaaacaccttttaaaaggaggcttgtatagaggggagagaaaaagtatcactttaagagaaagtatagaaaaattaaaataggacaaacaaaatgtcacttggcacataacaaacttagatatgtaggaattgaattaatgataggttatctaccatacaatgtttaaaaaaaatctggagagagggaggtacatatgtatatatgagagagagagagagagagagagggagaataataaaaaatcttagaccattagaggaaaatggcctctgctgcattctccaactaaaacgcaaattccctttcccatgtcaaaagccacgaaaaagttttgtctgatagacatcattttataagcctaaaatactgctgaaactctctcttgtttctttacaccgttgacaatagtcttaacaaaattgtatcatttcttagatcaaaaaccaaattcatgcctaaggaatacatcatctgcaaagtaaactaagactactatttgtttttgaatcattttcagcagcacacagcttgattaagaaaaaatctagtgtggacatttagtacaagttgtcatgttcatactatatgtgtacttgtttctttatttgaaaggaaaaagaaaaaattctaagctaaagtactgaaattagctactcaactatgcattgcatatatacatctcatttcatagaattaaaaagcacaacaatgaaaagacttacataagagcctcaagagcacaaaaatgcagaagccgtttccgtccaatacaagttgtaccaacatccaaaacagcattacaagccgctattaaaactctcctcttcggactccccaaggctgagaccaaagcctttacggtctcactatccgaagcaatttcttcattcatctccagcgacaacagcgatgccgaccccacaatgtctgcgccacaagacgcgattgaggtgtatctgcaattcaggaaagaaaagaaaaattaagaccggaaactgtttgataaaaagtcagtgagaggagaaagggaaattctttacttggaggcgagaagagtcggaaggagagagataattggggtttggatgtgcgagcgacggagtttggctaagcttttgttgattaagggtaggagagatggttgtttgtggaaattagctagggctgcgactaaaatggagaagagggcgtcgaaatcggaggcatattggaggtgga

SEQ ID NO: 23980 - DNA, 16733 bp, Cannabis sativa
  modified_base (42)..(63): a, c, t, g, unknown or other
  modified_base (2154)..(2160): a, c, t, g, unknown or other
  modified_base (4030)..(4030): a, c, t, g, unknown or other
  modified_base (6900)..(6901): a, c, t, g, unknown or other
atcgttttagaaagttcataattagggtgttaatcaacatannnnnnnnnnnnnnnnnnnnnntggtaaaataaattccaacagacgaaccccggttgttgttcctaggggttggccccaaggattcatcattcagttggaggtgcctatggagggtcctcccttggaggtaggggccgattgttcagatctaccgagacgtttctgccatcttggccaactatagtggccagattcgtggtgcttgctatggtgacaggattgaccacatctatagtgttcgtgggaattctagttatggctagaacatgaacatcgagattttccatctgcgagtcttgaggggaacccaaagatgtagatggtgcgattggggttcttcgcgtattaaccatggtatttgatcagacacgatatccatactctcaatgaaaacacaaaatgacatcaaaaagtgatcaatcgatagcagggtcgtatgaatctgatgtttgccacatattaaacgacaagaacagtaaagtaaataagacaaggattttttacagaggttcaacccccttagttagcaggtaatgacttactccccttttggttctattgataactagagataatactattcagatcactataggtgggatctgatatagctctgcataagattacaaagcatggatcaagtaggtaaatcaataatgagagagatgtattgccttagaggcatgagagagagagagggaggaagaaagaagccttttgggcatgtagaagagagagaggaagagaggctagagttttaaacttagagtgacttggaggctagaatcagacttagtttttctaggttagatttaaggcctttatataggaaagcctgaatcctaatttacaattgaaacccttagatgtttacatattaaattgattaaatacaaaagattaaattgccccttgaaaatagatattttccatcagtttgttgggttgttaagggtccaatttgcaagtagcttgccgtccacgtatcaggatgtacatagagtcctaccgggataatcctagccaccgatacactgcaggatatggtctggttggccaaggtctgtaggttgaggtctggccggccatgctcctgccaggacctggcaggtcatctgcctgccaggatcctgctggtcattgtcagttttaccaagaggatgccaacttttggatgtggaggccagcctttggcaagtggaggacagctttgtacaacgtttccttgtggaggtcatgttcccttggtcgaatggaagctcccttggtctggaagtcaccttctagtcggccagcttgtgcccagatcctggacgaccatacaagctcactctagtcggcctataggcttctcttggccagtcagacatgttggtacagcctcttgctggctcgcttcactcatttcggctgctgcttgacggttctgccctaccttgcatggagaccctgtcttgctattggcaaagttgtattctacatatactctatcttcggcttacgtgcaaatgccacgtcaggtggacaaaatttgggataacaattttcatgacttttatcttttccgaaatagtaaaaactgttccttagataaactttatgtctatgtgtaacgccctaacaattaggcacgtcgtgacaactaattatgaaacactaatcccctaaactgggaaagaaaagcacgggaaattttaactttaaactaaaacagaatgaaaataaaacttgtaatagcattaaactttacaatcaaaagcaacaagtttcgggatcacaaaaatcttttacaaaatattataagtcttttcactagccgacctaagcggcaaaatcagagttacaaaagtacaacactggtagaccccaatccgcttggtctagtgtggcctgaacatttacatacattgtccagctctcgcactcatggctgatcagcgactgatttaccctttcctgcatagtagagcacccgtgagccaagcccagcaagacaatataaaatataaataatcataattaatacatcacataaagattaatgccatttcacatttatttgtatgacacagacccgcgtattacgttcacacgcctatttatgtctatgtnnnnnnnacctacgtgttacgctcacacatctaaatacaataaggccttagaactgttcatctcagttctagttaccaagtccagcccaattataccttaaacgtataatccttaatctcaatacatatataacatggcataccatttacacattaataatcactagggtaataaccctaggctaataaactgctcatgttagggtaataaccttaatctcggtttctacttactcacatatatcattttcaatataagcgccaccgcgcataactctacgcgataacttctgtcttacctgatgtcccgcaaacgtggagaatccaaatccccgagtgctcctgaccaagtgtcggtaatcctagtcacaatttctgggattcacaagtatagggttaatccctaaatccacttttacataatataaaattgacattcaaaatacagataatcacatagagctcgaaatgagctttccaacgatatatagaacttctgaaacagagttcggattataaagttatgaatatttaaaaattgcatttgaatcttcccaaaaataagggggcaggccacgacacccccacatggggccgcgacacctaggttcgaatcccaggccatcaacaggaggcgggtcgcggtgttcaaggagctaagccgcgacccctgggtttcaaacccaggaaaccccaatttcagcttcgaaatttcatgctcaaacacaccaaatcatgcccaaaacttaatcaaacttgcaaaccatatatacaaattatcaacattcatacagagagttgaaacatacatttaaggcttaaatcatagcatacaagcaaaaatcatgatatatatcttcatccaaagtaattgcacatcaacaccacaaaaacaacttcaaaactcagcatgcctttccaacaaacttaaaatcaatttcaataatcaaaaccccaaatctcaaccctagaatttatccaaaacatacaaagaatataacacaaccactcaacaattcaatcaagttccaaacaccatatcttaaaccaaattcacctacatgcatctatgaaaacaattacaaataaacataatttccatattcaattcagcaacaatttccaatgaaaaatagtaggaagagctacctcaaatcatttccaaattctagcacaaataccaccaaaatccaagctttcttccaaaggaattcctcaattttgaagttgaaaagatgaagcttaagggagagagaggggattggttttgggtgtaagaaaatcaaaaaaatatttcaatttccatcaaatttcctttttgttgaaagtagtaaattaattgtgcaaaattacaaaaatgcccctagggccatataacacacaattaggcattcaagggcaattatgtcatttccatcacatatacactcaaataaatttcagaatattcacacatcaataaaatgccaacacatagtcccaaaaatgaattttggccccaaacccagtttggcccgaaattctcaattgtgactataccgtcccgacctgtcagaaaacacctaaaaaaagacaagataagtatactatataataatatagtccataagcacatcataatataaattccacagttttacccttctctgatcaaaattactaaaacgcccctggctcactaacgaggtttaacatgtcatatatctgattaatacatataataaattatacaataatataattccataataatacacatttaactagttagggtttgctaatctattttcttaatcatagggtattacactaggagtcaaaagactttttttagaattagccattggaaaaatgccccagcatcttactaaagtaanttgcttgcactagagtaaataaattatcaagtataccacaagccagaggcttagataatctcaaacctatggtaatcgaatcaggaagttttgttaagtccattgaatagacttattatcaaaatttcccttcttgtcattttaataaaaaacttttggttactccatatgaatggttttaaccacatttctcttggcttcgcttcttagttccttatactaacaatccattgattgtttaaaataacaatgaatttttatcacaagtgtcttccaaggtgggttcgttgaaaccctctcactacgacgaggtactgtgactttctatctaggaacaacagtggtattaacgtcatcggttgtgtcaatacaacagaggtagtgtgaccatcttatatagaataagatgatagaacactttggagtagaaaaaatatctcctctactttgctttcagatttagtcacattcttagaaaagtagtatttgttgaaacaaacactttcttatattaatgaccataggatggtccatccctaatcactttagagttgttatcaaacttgcaaacttaagttaacaattctagcttttcttaagttcatgatcaggacatccctaaatctagtaatggtgtacacttagtatatgaccattccatcattcagagtttttcttgggatcacacttagatgggacgacatataatgtcattttatatctctaaggaaatctagaaggacttattaactaatcacggaccttaccttttcatcaatatgcgactccaaaattctggagaggtaagtttggatacaaatttgaagttcaacttaatgatctttgaactgcataaccaaatatttctccacccctatcagtttgtaagatctttaaccacttactttcatgtttttttaacattgctagaaattcatgaaatttgtcaaacatttcaaatttctttgcataaggtaaatatctagagagatcgtctaagaatttaacgataactcatattcacccataaatgtacatccatatgttcgaatacagataaacatacattcagtggatattggcatgctttctctttatagagaataattttgtcaaaaccactatgattaagattcaaatgccatagatgtattaatatggatgtcatcttttgacgactcatgtctagttacagcaaagagttcttagaatagttcaagtagattcttgtcacagaatacaaaactcataatccatacattaacatacaatttggatctattgttagaaaatggatattaacgatttttttgaaattaaatttttatttggaatctaaaatttaaagtcaaagacataaatttatactaaatattgcttgagtaattattctagcttggacaactactactaatctaactctgagtttatgttgcctttactaagaatatataaataggagattttctaagatcaaggatttatatcattacgaaatagaatatctgaaatgtgtagtcatctgtgccactcaatttttatagaagaaaatagagtgacatcataagcagatgatttataaaccttcttgtccaatgatatactatcttaagaaatttcataataaaaaaaaaagctaaaaggaaaactaaagaatattttttattaaaataagaatccaatattgtcccggtaggcgcgagtcaaggttattcttattttataaacttcttcattgttttagcattgtaaacactagtctaagttgtcatcatagagatgagtcaactagattttgtatccacaaacacttatctgtcgagatctaacactaatatgttatcttatggatgacaatctattgaggatgtcctgttaaaaacaacaaactatgttagaccaataatgaagtttcaaaatttatactacataattaataacaaaaaaatacatgttcaatacatcttaaataatttctaaggtttttcaactagatgatatatagtatcccggtaggcgagagtcaaagacatcatcagttgaatagacactattgtagcaaccttttattcgatcaaaataagaattcaacgttgtcacgataggcgagagtcaaggttaatcttattttatgagcttctaccattgttttatatttgtaaatttaattctaagtagtcactatagggttgagtctaatagaaaaaaaaaattataaaatgcttatcttttgagatatttatggtgttaaatgttcaatggatgaccatccataaggggacgaagtctagcatcttgaggtcacattgaaatattaaccatgtaagacaactaatggagatcgaatatcttaaagttaaagctcattattttagaagaaattgtatttttattctgatatctattttaatctatttattttactataaatatatttatttaattaaaattactaatttcgaaaatactaaatataaatttttatttaatatttataaaattatatatatttaggtagatctgaaaataaataaaatttattttacatccttactattaatttttaataaatattatgaaaaatatttaatataagtgggtccaaaattaattaaaattaattttcaattcaaatttaattttctataaatatatattaaaattcaaaatttaatgtatttaataataaatacatttttgaatttattaaaataaaataaaataaatcctaaaaaattattctagtttatgatgatctaaaattaataaataaattaattttcaacataaatataatttatttatttaattaaaatacttgaaaaatatctaatatttacgtatcttgaacaaatcaacttaaatattanntttctatttaattaaatatatatacaatatacaataacacacattgtgggttagcaatattaaacttttaaagtcatataatgcgggtcactaaaaattctctaaaatttttagtgacacgcatcttttgtgcgggtcactatagagtgtcactaaaaatcaattttgtagcagtgactagatcacttctaaacaaaattattctgttctccaaatcaatttgatggatgcctcccttagctactcatgtcctatattccacttgataataccagcaaattaaactcatattgtcatttctttaatctgtttgtcctgtcaaatgagctaccactgagttggttgaaggaccgatacctgagtctacttgagtcataactgacacttgggcaaaaaccatacattcttctcctttaatatcaatctttcttaatagcggacagattctttttaggtgacccactactccaaaataaaaacaagatctggatctacattgacctaaatggcgtcttttacatcttggacacttaggatatggtcgtcatttcttgttctcaccttgactgccatcttagtcaccttggaaccttttgttctatcccataatcggtagtttatttagtttttgatttctgatatgcacgtaagtcggttgcatgtgtttcaccacatctactggcacaacaggaaatgttggtggtacatgaatagacacaagacgagcctattattttcttaggtctcagatatgttcccttttttgtctaatcgtatcctacatagcagcaatgacttgttcccagtgttgaggtgatagaagattctcttccttgccattagccctgagcccaaatagctcgctagtcggattgttcgattgctctgactgcataatttatcacacctatagttcacatcttctaaccatttagaactcagacatatatcaatatcaatatgcatatattatacacatattcttattataatcatcactatgctagttttctcaatatactttataatagtctaggtaggtaatccaatagcaaataatataaacccttactataccatgagttgaccaatctttgcagcaaatgtacatattcaaccagtcttcaagacctttaaaatcgtggctactttgataccaagttgtaacgccctaatttatagagatgccacatgtgtaattttatagactagtttagtactaataagtgaattaattattaaaatctgtgatgatattaaaaactttacaaaaataaagcactaaaaacggatatcataacgatactaaaactgtattctggggatccctattgtaaaagttttacaaaataactatatataacgacaagtccaaatacgaaatcaaaatacacaacaaatataacccaaaacaactcctggcaactcggcacataggccggtaaggtcaatatgtacattgctagagaagactgtcaccttatggttgcactaatttttctttgcctttacctgcaccactgaaaaaccatgagtcataaggactcagcaagaaaactaataaaagataatacataaaataactaattattcattccagtattataaaatgattaaacaattcaattaaagagtggataatataaccagccatatgtatggaaataaaagtaatcatatatcacgttgcctaatcaagaaaacttgtgtcataatctggtatcacacttaatgtcgttgtatcacctaattagataagcccgtgccataacttggcaccaatgtatcgcatcgtccaactagatgagcctgtgcctcaacttggtactaatgtattacatcacctaaatagacgagcccgtgccacaacctggcaccaatgtatcacatttcctaaacagacaatgcatgtgtcacaacctggcaccaatgtatcacatcgcttaaacagacatcattctctaacaactagtaaatgagagactcctttctattgtcatttcgtaacttattcattgttcttcaccaatttgagccatagcgatagagtaccatgcccacacatagaaagtcaagtactcaaccatagtgcagaagacggtggtaaccaacccgaaggagaaaaggacatccggactcaaatcttgttattactctcaacagaaaggaacaagggttagagatttgagggaaggagtcatattattctgctaccatcaatgtagggttttctaaactcttatgtgtttgatttcattattttagagaattcatattgagggtgttaatgaaacacacatgttagtaaatctagatcctgtaaaataaattccaacaaagtggaggtcttcttcatcccttctaaaactgtagcagcacaagaggtcttcttggcgagtgacaacaatgtgttgtagcactcgcgagcagttgcttaattgcctaggagataaccgataccagccgtcgttgggaacttgacagacaagtggtaaactgatgagatggctgtaaggtcagaaaaggtaggcattctgagcatcacattgtacagagacttcacgtccaccattatgaatgtggccatgatggtgatctgccttagggtagtgcagtttgtgagtggtagcttgatcttgccacatggtgggatgctggctctactgaaaccatacttaagttgtttgcattgttctagctcttctaatgttaagcccattctgggtaaggcttgcttgaacatgatgtttgatgacgctctgtcgtcaatcattaccctagccaccatcatattagctatttggatctcaataattaaaggatcattatgagggtaactgacatgatacgattctgattctctaaaggttattgattctttttcatagcgctcagactttggaagtcgttctgctacctccaggactttggctcttggttcttgttgaagtgcccttgcatacctttctaaggccttccttgaattcccagctaagtgagggcctgcaattacaatctctaccctgcatgcaactggcgcacgctagagtgcagcattgtccccagttggagcttcaggtcgcacataccattgaagagcagcatctttctgtctaatgagaaattctatctcgtcccacaactggttacactcgttggtgtcatgaccgttgtaacaccctgacccacaagagcgccacgtgtgtacttttacaaacttatttctaactaatctattagtttaaggaatgtgtggtttaattaaaatttccataattaaattgaaaataaaactttcatacaaaatactgtcataatacggggatcccctgtttataaaaattcttttacatccatttacgactattgttgttacaaaagtaaggttatacttccaaacatagaaaagggattgatcctgcttctcggaagccaagacaccacgactgatatgtacactgctgcaaagacctcaaactcatggctgcccaattttgcctttccctttacctgcaccatttagcacccgtgagtcacaatgactcagcatgaaaagctactaaaatcaaaaacattgataatacaagtattctcatcacaacatagtatatgtgctcgtgattcactgcataatcagcacgcgtacatattttacaatctatacaaacacattcattacatattattagaaagtcatagcaactcataatcaataatttcatcatttcactaacagatattaattcaatacataattacatactaacatacttatacaatttcatatttctaatcacacaatctcggtatttcattaagcacccttacaacttgttaaccacaagctacatatgtcattatcgttgcccgatacagtgaacaataagtaagaaacttatccgcggtttcaagagtaattactcataacggtaatgaccgtttccaacccttaccactcgttaaccatgagctgtgtatgtcactatcgttgcccgataaagcaaccgacaagtaagaaacttaaccgcggtttcaagagtaattactcataacggtaatgaccattttcaaccctcgatcacagccgaggcataacaaacacataaacaggaaattcattatattcaagactataccaatcacaatcgttaattatttaaccataaatgatgtgtatcacttttcttacctcagtccagaaattaggcatgcgggccgacttgagtggaataaagctcgacgatcctaggtcctatgtcacaacaacaaaattcaataaacaacttatccatattctaaacaaaccctaattccataacaggacaaattctaactctcccctagttcaaaataactcaaacctcattaaaatatcctattctaagctctgggaaacaccctgaatagaaactgatttcaaagcataaacctaaggtttcccctgttggcaaaatcggttgaccgatttcacaatacctgtgaaaccggttaaccagtttctcagttgcagaaatgggaaacttgggtttttgcatcaaaacctaaccaaaactccatcaaacctattcaaactctccagaacagtttaacaatataaaatcaatatatccaaacatccaaaactcagaattacaatcaaatcccaaaatcaccatgcttgaaccaaaattaggttcaaaactcaatcttccaatttcaaacttcatagctcactaaaacatcacaaacatagttagacaaccttaaattcaacttagaaatatactttgaatttaactcaacactacagccccaaaatatatgaaaacactacaaaacctaactcaaaacctagaaaattaaagagaagaagaaggagatcttacctcaaggattaaatagctcctaaaccaaattatacagctagcaaaagggtgagattgatgaagaaatcctcttgcttctgttgggtttctagggttcaaaggaaggaaggaaagagagagaggtcaagtactgctattcttagttttaggataaaacctctttttttttttaaataaacattattacttataatctaatataatcttatttcagcaataacacaatcccacaaaagacaaaaccttaaattacaaaaagactattttgcccctccatgagcacttagcctaaaataaaacctaggggtattttggccatttctaattttcctgatttaacctacttctcaatattttaacctagttcggtataattctaatatagcacaattttaaccaccgtgacatttctgaccactccgtcgagtttccacggcctctgaacctgaaaaatattttattctaaaaatggtatccatgatacccccatagtccaataaaatctctgtaattaataaattacgctttatttaatcatttattaaatttacactaattgccacataattagcttaagtaagatcataatcttactccagtatcagcataatcacatatttaataaaatatgtccaattaaatataaatatattttctgggatattacaaccgtagttgttgtggtaatgacataattttttcatgtccctcttccttgactctttgaaaggaagaggtttgtgatacgacactgttgactgagtggtcgtacagatctcctctcttggagccaagagaatggagtaggtggtgaagcaagcctcataatctctcaagggcttgcccccagttttaggcttctttcatgtgggggagttgcattacttgccaccattttggctctctttcctctgttcgaaccttcctttttcccattgtcgtgcgcctcaatagcgggggcttcagtgtcttgcgacttcttcttgccatcctttgagccttgctcgggtggcatcttcttcgagtttgataaagacatctactctatctaagaaatttttcatggtgtatatcgccttgagataaaggtaaaacaacagaggactcatctcattgagcctagctgcgagtgccataaccattgctcctcgctgagacttttggtattagttgctgcctctaagagccattgtatgaagtccttgagggattcttcttctagtttcttaacatctaccaaattattaggctagatctggcgttgttgggaaggagcgaactggttaccaaaagcatctaccagatcttttcaggagtcagcttgaggtactagcgttgagctaggcctgtcagtgtagcaaggaagattctacacctgatgtcatctctcaaaccttacagcttggtctgcacttcgaagtaatggatgtgagatagtgggtcttccttcctagtgtattgatgtcaggaaggattcatgaactttgtaggaatgagaagggctttgattcttttagagagtgttgagcgttgttctctatcgatctcgaatttagacaacttaggtgtcgtgattcccttcactaaagcagctaagatgtcaaaatcagtacggttgatgcatcctagatggagcttttgtcacccagatagggtcttctctagaagttcccacatccaccgttcgtcttttgttcaagagatcatggaggactctttgtcttcaaggtcgatcatgtgcttcgatctgttggggtcttgtagttgtctcctgaccgtggggtcatgaaggtaactctggtgaggcctctgaaatgaactcaggatcatctctggatgaccccctgtgagagtgtttattcagagcattgtagtggctacatccctgcaactagtcttcagcagcatcacaagtgcaaagagaattaaattggccactcaagttcaattcttcgccatgtactcgagggaaatactcgtactgttggtcatcggggccacgttaaaagtaacaacacaactcccctctttcatctcaaaagtacttttgagtatgaagaggctcaattatccttacttgcggaattttgtagcctccgtttttgaagtaacatctcctactacttcctttagtttgagtagtaagtccctttcttgttacaaggtcccgaggcctggtctcttgagaacattgaggaagattttgtggaggagtcctattggttttctcattgttgcgaggtcgatcaacatcaagtggcggacccattggttggtgccctcgagcttgagtcctttcaggctcttgatcgaaggtactttccccctgggagctctccatgcctagtgtttgcctagtgcctgctcggttaccaggtgtagcatttgtaatccgagcatttggggttttgccttggacactatttcccacatgaacagctggtcgacagggggtctgtctcaccaacttgaaaatacctcttcgggaagcagtttcacgattagagcgataagcctctctaatctgttcagacatgttagctctgtactgttcctgctcaatgcgttagctttcaatgttcttccagttttccacgaaccaatgttaaatttgttcgtgttgcttatcgagagagtctcgcaattgttattgcaagtcatccacaatttggttgagttgagctacatgaggattggtctcctcagggtcttctacctccacatgtggttccccatgtggaatctggtggttggtgccaatctcaggagctactagtggtggccttggaggacgagttgaggagttggttccaagacctgctcttggcacctggagtgccaaagtagtcccaggaacaactccatcaactggcgtggccctagttgattggccagctgcgggagtctatctgtcaacacttgtagaacgtgttgcaaccatcttgactagtaacttacttgagttgtggctctctataaaagcactaaaatgttgactcaaaaatcaagactagacttttaagtcaaacccgcccgctagattggcgagaatataaaaagttgtaaagtaattaataagagacacaataatttatagtagttcatccctatgtcgcgatagtaatggggctacgtctacttcgagttcttatttctcatgagatggtgttacagcaactgtttaagtatcaaaaacttcaaactctaaagagagaaagtctagagagagaatctctgaccttgtgggtagttttctgaatgtgaaaaatgaactaagggagctctcattttataggtgaaggaggcccacaaaaataggagataaaaatacaaataaattattttccaccgttgatgatgatctaatagtgaaaaatagcttatggtaaggatatttatttttggtatctaacgggtcctgctctgagatacttagagcttattttcgtaactctcttgcgatgaactttgaagacgatagtttcaaaatttcgcctactgtgtgataaatgacttgatagagggcttaaatagcttcaaaaaacaatttgaatcgcgtcaatcggatgaaaattaagtgagttagagatattttactgaaggcagttcaggttccaccgcccaggttgacatctaacatcaacctgggctttgtaaaagtgtagaaacgtccaagggaagtcttttgagatgcccaagtgatggtttgaaacccatagtctttttatatattttagtcactcgttctcgaaaatattgttgttttgcagaaacagaagactcgaaacttttggattccgaatgagccaaaattgaagttgtgaatttggctgatctgacttcatggctcattgcacttgtgaaaaacttgacagatgatgaaaatggcattagatttggataagcagaacccagcgaaccaggccaaatgttgacctgggcactagggtctttaaactgagctcccaggattttgtttttgatactttcaaggcttctaatcttgaggatgggtctctcctcccgttttcgaccatgccaaattcaatggtcccatcagatttagtgtttgaacaattgaaggcagcgtcctaggttaattgtcaacctgggagctgggccctgtttccagagactcaggtttgtggttttctccccgagtttacttgactctttgttatttctaatgatggtaaagatgcctgagcaccttttactgacttggattgaaaacagccaagtcctaggtgtcaacctaggtgttaggtccctattctgcccctttggaaattccgtttggtctccaaaaatatttgattcccaatattgtttgaagacggagatgatgcttgaaagaattctgggaaaaatccattttttgtggcccatgttgacaaattgtcaacctaggcgtaaggccagcccaaagtgtcaacctaggtgctaggccctgttatttgtgcccagaacttgttgtttttcctctagaggacccatttccctatttttgatgaagaatgattcaatacaaaagttggatcttcgatcagatgcttagaaggcgcccaaattaacagattgtcaacgtgggtgctgggtgctctggccccaggccttgggtgctcaaaaatcaacttgctctgaatctgatcctaatgtctcaaatatgtttatggtatgtcaagtcgatgtctcaatgcaagtttaggccactttgcactaagacggtcccagaaaatgaaatcctagcaaaggatgtcaacctcggcaccgggtggaaaccctaggtgcccgggttagcttctaggttgcaggttcatgtaattttagctcctgtaccttgtgtttgattgctccatgtcttcatggtacagaatactaaaagatagtgagttggattcaagttattaaagtcttaacttccatcccggagatcccagagtcaaccttgttgggttttatgccct

SEQ ID NO: 23981 - DNA, 2055 bp, Cannabis sativa
ctttgatgaaactaaatattgtttgtaatttctattcagaacccatatgggttgatcttcctgaggatcattctatctcgaaaatcgaccagaaaatcatcataagcagcagaactcctgaacttgaaaagggattcaaggacttgtaagtttcttcatcatatggtttagcaaatgcttgctctaatggcttgatgattactgactcgattatcatggtttgagcaggattgtcatagatgtttcatcactgaaaggcggggcaccgggacgaacccgagggctcaacatctattccaccagtccagttttggaaagcctgaatgggattcatgagcttagctgacaattaatctgatggaaggactaacttcaattccttaatttgaaattttttatgctcttcttattttagttcttatatttttctttgaaaagaaaaaaccaaaaagggaattagtgatgaaaatccagctgagaagattatcacacgagtcaaatttttaatactccttaaacccttttcattctttgcttattttacaacagaaaacatgacttttgaattggatccaaaatgaagaagaagaagaattgttatctacacaactgttgttcacatgagcatttatatatttgattttatgattgtcaagacaaaatagtattgagttgaaatttacattatgatcttttctatctttattattgttgttatttgctttaatctaacctcaaaaatataaacaattttaaaaaagagaatgtattgaatcaagtagcaatctagtctaataataaaaaataaaaggctaattaggatttttgctctttgaaaactttgacatgtactaaattatacacttgaacttttaaagttgttaaaaatgtctcctgaattattaaaattgttggatttaaagattttttttttcaattttttttgtaaaaaaatttaacataaatgaaagttcagagagcagatttggtacgtgaaaaaaattctaattagccaaaataaaatagccattaatatttaccaaaatgacaaataaaaaagattgaaagaagcagcaattcttgactgacaaaagtatatattttgtttttgtattattgtaaggggaatctatgcattgtcagaatatatgattttgccaaactctcccatcgtcctagttattattttttgctaagattccatatcattgtagtcatggtcaagtcccattttatcacgtatcatagttaaaaagttatattgggaacgaaagaagtcaataatttgtttatttattcaattggattttgtcaaattccctaatattattatttatgaagctattggggtttggtttggaggaaaatgagattatataatgagatgaaataaaaaaaatatctttaattattttataaatgtaatatctaggtttttaggtcatctataaaagcactcaaaacaacaattataataactaaaagttaaaaagtttaaaattgaactccaacaaatgcttttaacccttagctattataactcatctcaaactttaaaatttttttctctatatttagctcatgaatagacgaatagtgaagagataaaatatattttatattttttctttttctcttttattccattaattatttttttattattatatttactcatttttatatttttctttatttagtatatataaatatataatttttaaataatataaagagaagcataaagaagctaacttatgatatatgtaaatgtatgagttaaaatagagataatgaagttttagtgaggtattttaaaaaatagaatagaatagttattgggagtgctctaagtttaaaagatataataattgtaaaaataatatattttgacttataattgggtgtcacgagatctttaaccgtacgcaatagaatttttatagaggaatattctattatattttttgccagtgttttcctattaccctcctaaaaaggaaatacgaaaaaacaaccaatttcgtgacaccataattccgacaaaaatgtggc

SEQ ID NO: 23982 - DNA, 2018 bp, Cannabis sativa
taaaatcattccaaaatactccaaacaaatgattagccttccaaaatcctaaaaaatcaaaattgcactaatcaaaggtctaaagaataaattcaataataataaggagagaaaataacaaaatttaatagatatatacatgcatttatcaatgtcatcaagaactgagtgtggaacaagctgagtgttggaaagcctctatgtttttggtagctggaaaggaagtactcattaaagcgatcatataggctactccaaattatactatgagctacgaatggttgccaaagaatacaattaataatcttcataaaatggcagttaggttttgggtgggagtcatcagtacaaaagaagaaaatgcattggtaaaaatggtatgttttttgtaaatcaaaggaaaaagatagattggaattcagatatttagaattgttcaatcaagcactactagcaaaaaaaatatggagatgtatccgccttccaacatcgctttgcatcaaggtcctaaaggcaagttattatccaaatggtagcgtgttaacaacaaaatgtggggcgcatgcatcttttgtatggcagagtttgatatggcgaaagaaaattattttgaatggatatcgatggagaataaagaatggaaagtgtctgagaatcttaaaggacccatggctacctcatccaatacacttttaagtgtatgataagccaagtctacatgcggagctttatgttacatatttgaaaaatgtgaatggactatgggatttggaatttatttgagctaatttatgttgagttgatattgcatttgccatgcacgggatgagattcggaagataaaattttatggcactacaacaaaaatagtgagtattcaatcaaaagtgggtatcaaatggtgagagaagtacaaaggaacattgaccaattcgatgacaacaaaacggtaccatggtggaagttcttgtggaagtaaaacaccttgtgtgaaaattggctcactcatggcttcctaccaatttggctttggcatataggaaagtgccaatggaccctagctgccaaagatgtttcactagtgcaaaagaagatatatttcatgtgttatggagttgcaaatcaactaagtcggtatgaaaaatgtatgggttcaaaaaacatatccaaaccgtgagcaaggaagatgtattatctcttctcatgtggttgtctaaggtatggcagagagaaacaattgagtatttcttaatggtatcatggcacatgtggtacattaagaataataccaaacatgaagagacaattcacaaggcagctatgatagttgagtggtgtgcgcaatttgtgaatgatttcaagggcaaagagaagacaagagaagggaaagaagaagagtggagactgtatggactccccatgaggtaggcgagcttaagataaatgtagatgtaggagtgaaatgaggtattgtatgtgcaacagtcaatggtgtggtccgagatcattcagggcatgttgtctttgcttcctttactgtgttgaatcataaatatcagcccttgtatgcggaacttttggccatacaagttggtttacaaatagggatacaataaagaattctaaaatttagtatagagtttgattgactagaagttgtctgattaatccaacaaaaagaggacggttttagggatattgatggtgtattagatcatattaggagtttattatcttttgcttgtgtaacaaggattttgtttgtttatagtgaagcaaatggggtagcccatgttttaatcaattttgctttaaagaataaagctagtgttatgcggattagggttaaacccctttgcctaattttatgtatgttgaatgaagtactttggtttaaaaaaggaaaaaaagagaggataatatatttatatcaatgtcatttgtattggagcattgctattaggcaccagtagtgcttattacattctcgatatgtcgcgttgcgattggctagcgat

SEQ ID NO: 23983 - DNA, 3604 bp, Cannabis sativa
  modified_base (2873)..(2879): a, c, t, g, unknown or other
tcccaagaagtgtgcgagtgaggacaaagcatgctgaaaacacttgtgttggtctgtagagtcagacgtcagtcaaggaagcagccagagttgcgtactcgtgtgtaagagtcattattccgtgggtataagagcccaatagaagattgaagcagggacgttacattaagagttgttaactattaaagtattttttgtatgtaaatggatcaaatctaatgtggatcaaagagaaaataaaaaataatattttcggatgatgtgtttacttttgataactatagataatgccctcattggatatgctcactatctctaatggatagtgcaaaatttgactcaaaaaatgaatcaatgttatagttaactcaaattttatttttgatagaaatgtataaaaaaattaacaaatacattaaattttgattgaaagtatacataaatcctattaaatgtataaataaaatgtaaaaaaattattaaatgtattaataagtaacaaaaaagtaaataaaaaagtaatatttattatggtgtaaatttggcacaagctgcacaatttttagcacgtgctaatcacattaaaatatttccaatggagtactataaatatgtggtataatgtatatgcattttttagctcatatttataaaattaaattttaatggtaatgtataatgtggtttaaatctagcacacactaaaaattatgtcaaattttataccacaataaatatcacttttagatttactattttatcgttcattaatataactagctttttatattgttatttatatacttaggacatgtctatggtaaataccttactttcgtcggagccatagatatttaatctaagggtcataaattgatgagtgcatataaataggtaatacttacaatgtattagattattcttaaaattattttcttaataatatttttaaattaaataataattatttaaatatataattaattttttttaacctcctccaattaattaatctctctctctctttctctctctctcattagaaacctcgtccaattgttcattgatcatcatcaccatccaccaaaacttcccttctcaatctcttcgtcttcatcttgcaaccgaagaatgatggaggtggttttgaatttaaatctttcattcttctcaatgcgttgagtgatcttttaatagtttcaaaagatatgcttatggaccgatcaatgaaaaaagaggttgatatatagttaaacttatcttcataccatttgcattgagattacaaaactgttatgcttgtttggtaatacaatcctcaataatagacctggttttggttcgacccttggtagctttgggagtttggacaagtcaagttcttgagcttggccattaattttaaagctccagcccagaacatagtgattactaataacagggcctgttgatgaagaaaaaccaatatatatggtatcctttataaatggcgaaagatcttccgtcaaagacaaaagaggtttctagggtttaagagcttgaggcggagctaaagtcacattcatctgcttcttaacagtgtcatagtcgacccatactctcagcgtcaaagacaagcaagttatggtaccagggaatgcactctcgttctccgatactgatggtgggcaacttacggatcagttgtacggtccgattacaatggagttaggcaactgttgcagtctccaaatattcacggccgcaaacaatgacgtcaaaggatcgatccctgtagagttgggtcatctccagtcagtagcttcttttctagtttggctgtggctggttcgaaattaaaaggaaaagtgggaatggaataatggtttgttgtggctgtgggtggttcgaaaggtagaaggaatgaagaatgggaatggattatgggtgaaatggggctcatgggaaatgataaataacatttaaaattggttttttaaaagataaaaaaaaaaatattggttgttaattttttttaattggatgttaatttattttaattgagtgtcagattctttttttttttttaaaaaaaaaaaaaatttgataatctacaaacatatacattttttataatcttgactttaaaagtcatataaatcaatcgctaaaaagatgtgtgcatagtataagaacaaaactatagtcactcgctatcatagaatttctctttatatttaatactaaataaaaatttaatatttcaactataaaaattaaatcaaatataatatttgactcatttttaaaccaagtttaacacaaaatttatattgattacactagattaaagtgttatttgaaaaataactgagtcttgaagttgggagcacccagccatcgttggtttaggccacacaacaacctctccaatcattgtacagtagaatctttatctaaaattatatttgaccaagtaaattatattctaattaatagattataattaattaatagattagtagtattaaaaaaattataattaattaatagattagtaatattaaaaaaaaatcaaaacaccaagtaatatcaatgtagcaataataataaaaaatgcttaatactatatcataaaagaattatttttgagtaaatttaatatttatacatgtattataatttggaataaaattattgactttacatgaataaatttataaaatatgtatatatttttatgatgtattttatacgaatattgctattagacactataaatttagagataattattgattttaagcagggccggctctagcataggtggggtaggcccgcgcttatggcacactaaatttaagaatccaaataaaaatatatatttttttaannnnnnntaaaaatatcatttatctttatagtaagaacaaaaaaaatttcttcacccacgaccaattttaattcaggaccaatccttattttaagcacttatttatatctctatataagaattctactccttcaaagaaaaagttgcataaaattcatttcaaaaagcattattctctatctatggaagaagaaggatatgatatactaatttttatttcattttgttggaacatggcaaaacaaataatcgtgtagtgcccatcattttgccaataagactaaagtgatagagccaattattatatctcactaatctcatatgtagcttccatagatgtgttatttttaaaactaaataaatactagatatagttttaaattaatatgacatttcatccgcttaaccacaatttatttttatttatttattatttttattttgggagaaaaatggagatttcattaaaagctaattatgtacaaagttcataacacgatcatatcactctaaaagcataatatgatgatatcgatgaagaaataggttaattaagctatttatataaggttaattaatatatttttatcccccgaactttgatatgtactaaataatagggttgtacattgttcggtttgggcggtttatcctatatattttctaacccaatctaaagttcggattgctaaaatttaagtgcaacccgcccaatttttttttttaaaaaaa

SEQ ID NO: 23984 - DNA, 1781 bp, Cannabis sativa
ttaaatttttttaaatttcttaaattttgcaggatatctaaaatagttataacgtgcatgatcatgagaaaaaaaattgactaaaaagttatttatgatgctaaaacagataggagtacattaatacatccatttaaaattatctttttaataaaataaataaatttttaaattttataaacatgtcaataataatatacaaggaacttttatagtgcatttttttttttacgaaatcaatacacatcctactattttaacatccataataatatacagagagcttttatggtgcacacaatctctgtggcaaagccaaccatgtattttaggggtggcaaattttctttataaatataaatagaatattaataaaagaaaatataaattttgttggagaactttctttaaactttatactatacattttatgaggataaacataaaaatattataaataaaaatttaaaaaaaaaattaaaggataaaactactaaaaattaaattttatgggggcaaaattaaaattatttaaaattttctatatagaaatgtaatttttcaaaacatgagtggggtcatgtgcccccatatgaccccttgttgctccgccactgcacgatataatctacaacttgttgtacatgtgtctcttttattttataatatactatttggaccctatttttgtataatgaaatattctgaatctcttaaaatgtataaaatgactataacacacaagtcttaataactagaataaacatcatcgaattttttttttttttaaaaaaaaacaatatgattatttcaatattataaataaaaaaagtgcattggtacaccattttgagtgtggtgcactataaaagaattcattgtatgtacactgtataaaatttttgaagagaaaaactcaaatttaatcatccatatagaatttgtatttttttttttcttttttcttttttacattcctaatagtttaaaaccgtcacctataacagggtataggtgatgattttaaacagtcaagaagtccacattagtaacagtttttaactgatgcctattttgcccgttttgcgacggtcgtataggtgacagttatagaaaccgacgggaatactttaaacgactgtttaaaacgtcaggaaaaaccatttttataatagtgtctggcaacgattctccagccaatgtctggccccacgcgctggaccattcgagtccccacgtaccggcgacctcaacccccaagcggcaccgcctcttttgccgccattagcttgggatcgaaagtcaaagtttggaggtttaaactttgaacgaattttttggccacctctggtgtccgtctgacaagtcatcttcaccactagactcaacttgctgaggagaacaacctacactaagccatttcacataacctgctactttttttggtgatgtttttgtagctctgtctctttccagtgactttctagcgatatcatgtactgtttcgacaaatggttggcatgggtgcgatttactcgttttgatgtatactatccttatttttgatgatgttttcagtataccaacttttattgccttcgatagttaatgtgcactgcttaggtgaggttttgaagctccaaactttaaatatagtcatattatttgtcgttggacttggttttgaaagtagaatgcaatgataataattatttagccatttgatggtataggtgagagtgatatttaaaattggactaaacaattggagctcgagactt

SEQ ID NO: 23985 - DNA, 2016 bp, Cannabis sativa
taccacacatagttttacataaaatatttcataaaatacaatttaatataatacaatacaatacactacgacctaatacagcgttccaaacgagccctttgtttcttctcatgatagatttttcgtgaaaaggaaagtccaagatgcaaatacatgtacattacaccagattgaactattgagtcatgatcacttatcaaatagggtccatttctcattttaaattaatattccttcatttcatatatgacgtcattaatcctttttctttctcaaattaatgcatgtcttctgcatactgtttctataataatattttgctgctggcctcgccacagtttattctactctattctttaattaatagttgggcagccttaaatccatttatttgtgcttctttcttctcagtacaattcatatattcagtatcctgcgcattgtggaccaccatagttctccttttgatgttattattgttaattacatctttagccttttcaattttgtgtttcacaacaatacttcacatcccatcaaaatctattctaaatttctcattttctttactaaattaaatcaaacagagttgtgcacatactatgataattttcactaaatagaatagaaaacttcatttcaaattgtgtttcatgaaaatcatcaacccaaaaatattgtaagactaaatatacagaggcacagattggtcagatggttagtttctgaagtcttatcatctctctgtgctcataccataaactcttccataataaatcaaagcttttgagtagtttggtgccaaacatatccctaattatttataggtacttaattactttttgtaaccaaatcagatcataccagattaaaaattccaatattttaattggaatctgataaatgcgaaacaatcactgtcatttctataaaactcattattattttgttataacactccttatctcatgttgatttgaaatccaccaatccaaagctcccaatcccaaattagatatatatttttaaattaaaaaaaaatgactttatcaaaaaacgaaaaaaataaaataaaaagtgttggaaaagagtgaggagtgactgtgaaaccgctgtttgaacaaaaactctttaactaaaaactacaaatacaagaccggattcgtggcaatctccttgttcccggtcgtgatcatcttcaacatttttggggaccaaattggacttcttctctttccataattaccaattctgccatcattcgctcactgtttttccccaattaatactcattactcaccgcaaataaaccctttcctaggctaattatcttctctgcgctccgctgttgccaaaaacttcccttttagttttttttttcccgagaaaattgatatcttttctcggaaagtcgaattttttatttttcttctcttggtctgcaagtcttaatgaaggacgacgaaccgttaccggacaatttgcggtgcaaccgtactgacggacgacaatggcgttgcaaactaagagccatggagaatatgaagctctgcgagaatcactacttgcaagggcgtcatcgacagaacaaggagatagtgccggaatcgctgaaactgcaaaggaagacgacgaagaaggtgctgaacagagacaaaagtaagcgcggcgttcaaattagggcaaagaaagaggacattttggcgaagctcgtgaagaagaggaagagatcgggtgagacgttgaggtcagtgaagaaattgaatagagggaattcggagatggagcttataaggatggtgctgaagcgacaggtggagaagagtacagagaagagcatgaagttgaagacgaaaactgaaacgaagaaaaaggaggttgttttggaagaagaagatgaagaagacgatgatgatagtgaggaagaactcacgagagaccttcctaatggtctaatggcgatctcttcgtcttcttcaccttcaccgcgacagtgttccggcaatgtgggttctg

SEQ ID NO: 23986 - DNA, 1209 bp, Cannabis sativa
ctctctctctctctctctgtggtggacattgaacaatcggcccacacctgaatccctcaagaattatccaccattataatgggtaaattgtgttttaactatttccttagacattaggaatagtgtgtagtttgttttcgttatatgtgtgtggtgtttgtttgaactggtattattttgctattttttggtctgaaatgctagatctgttttctctcaaaatctgggttttttttactgttgatcgatagaatatcgatataaaaggtaccattattgacaagatgtcgattatttgtcaatatattatcgacaatctagctaaaatatgatttaagcatcgtttgtcgacagtatgtcgaccttatgtcgataatatttgaaaaataaatatacacacaaattgtcgatgatttgtcgatagtttatcgatactttctcgatgattagtaaaaattttaatttctcatcgtaattgttgtttgtcgacatattgtcgatagaatgtcaacaatattataaaaaaaaaaaaaaagcggctgaaacaagtaaaaactataagtaaaaatgaaacaatcaggataacgattgagaactttaaaactaacccataaacgttaaatttaaaagtcttgatagttgggtgattcatgcaatacaagcttaaccacccaggcatgactggtttgcctttaaccacatatagtttgcaatgatgccacccttcggggaaccccgatagataaaagagaacaccatccctttgaatgtgttcgaacctcctctagttcgctaccttttcatgttaaaatagtttcatacattccctttgctctctttacaaaaagtgacggtattcttaactccattttgctctcaattggatgacttgacattcaacatcaacaataacacgaagggggatgttttgtcctttgttagcatataaattgtgtagccagtcttcatcgaatagcgtatcgctcctaggcctagccagataacgatccactaatctacaaaactgctcgtaatggcttggagaactagaattactagacatgtacaacttaaaagagaagaatactctagggttaaagaagataacttgggaagtataagttttcttttatagaccagaaaagttgttaggaaggtgggataataaattgttatgaaattgtttctgatattagtaggctttgaatt

SEQ ID NO: 23987 - DNA, 2935 bp, Cannabis sativa
aaaaaaaaaaaaaagtagtcgttatgagtgctctctcaaaaatgcaaaacattccaaaatttttttttcttttaattttatgatgcctttcctattaataaaaagataaatattaaaagatattaatggtgtttagtactgtgtcaatattgttattggtccaactaattatcgagtttcatataatttaatataataagttttagagagtatctttagcaaatcgcaagacgatatatacatttaaaggtgctaagagcatctccaatagtaacatcctttcacatcatctaaaaatataatattttattttatctctctttcacatcatttttagcacttttacttttaaagatatttcaatatatagtactctttaaaaatattataattataatctcactcattattatttaatatatatcctaatttttagctacaataattttttaatttctattttttattaaaaaaattgaatataacatgcaaatttctagaattaattttttttctctctaataatataatatctcaaccaaataatatatctagctcttcacttaagtaaagttttaccattaaagattattctaaaaaaaaaaaaaaaaagttacattaaagatgatctaaacaccacttttatctaataaaaagtgaaacactataacattaatgagtaatatctgtaaaagcactacaacattaattgtcgtcttgtttgttagatttctcatgcattatacctcgaacagaccaaaacgtcctatataatgtcagcatattaatccatatttaatagtacccgccgctaatatttttaattatttttaataaaaacctattattggcggaatccaccgtttatgtcccctacttatcttattagcggcggaatccgccgctaattgtccgccgctaataattggggcgggaattttcccgctcattctgttttagttattatttgtaatattttatataaacccccttctcttatcagactccattttattcctttattttttttgtttcctttcctctttcgcttcttcattttcttacgtcccggccgaccaccccttgctccgctacctccgtctccgcctgctattcttgtttcagaggtatgtaatatatatttatattatatagatttgtattctttataaatttattatattaaaatattttattttaattttgttagaaaaatcaatatctaactactactaccagactttagatttggataattaaattttttattctatgttttaaatttatttttgaaattttagggattataatatatattatgtatatattgtttttaaagatttcttagtgtgtgtatatatatatatataaatttgtgtaatttttaggttatataaattgcaatatattaggtgttttaaaatgtatatatatatataagtttgtctagtttttagtatatataatttgtaacattatttttagtatatatatattaaggaatagtatatattgtgtatatatataataatctgtattgtgattatttttaatattttaactattttttgctgagattgatttgttgtttttatacttcaaattcttattttgccactcaaattttggggatttggaacttggagttggagaaagtagatcacaatttattttttaaagaaaaaataccaatatattaataagaaagttagaatacaataggtataattggaggaggccggtaattcctctcaccatgcacaattagaatccaccgagaaagtaaatttggctaacaagtgaaccacattattaacagatctataaatgtgagagatttgagccccaataaaattgaaaactaaaagaaatattatttatccggcaataaaaatctgaaatatgtctttaagaagcttgcactcctttaaccactaatagagaattggtctctatatagtaaactggtaattgaaagtctttaagccactccaagctataaatcaaagctatagcttctataatttttggtctaaagtatatcacatatttatatttgtgaaaatttatgtttttttatcaaatttgtaatgaaaaaaaaaagttggtaataatgaaaaaataaataaaaaaataatagtttataaagataagttgtataatataaatttattattttttattaaaaaaaataaatttcttattaataaaaattatttttttatttaaaataataatagtaaattttatttttttaaataaatttaaaattaataatttacatattatgaaaaaagatatttaaattaaaatttttaataaataagaaaattattaattgaaaattttaaaaatataaaactaaatattatgtcataatgtaagtaattatttaaaatatttcattatttgtttacttaataattctagtaatgtttttatttattttaaataaattatttttactttataaattaataaaaaaatttcaaacaaaaaaaaaaaattggtaccacgattaaataaataaaaaatattttaatttattaatattgttactacatttgttaaaaaattaacttttaaaatttatttaaaataattagtaattgttccataaaaataaattttatatatatgattaataaattaattttaattgtaagtaagatttaaagttaataataaataatacatagtaataagattaataattttaataattaaaattaaatattaataatttaaattcaattaatattaatattaataaatatcattaaataatgcattctctcttttttgtccttttattttaatacattcgttgcctttagatgacggcgatcaataaatcttggaccaaaattagaaatcgtggttgtcttgaattttggaatggtctacaagtttttttaacaatggcgtcaaaata

SEQ ID NO: 23988 - DNA, 6411 bp, Cannabis sativa
  modified_base (2907)..(2909): a, c, t, g, unknown or other
aaaaaaaacataattatttaataaagaaagatgaatgaaacatgcggtatcaaccattttcttcggtattcgatagtgtgttcacaccaatatatactacatatactagttattagttaggcaacaaaaaaaattatatatataaattaataaagatgtttgtaattgtatatatagcaaaccctacttctcatcttcgatcttctctagtactcttctctttctttttacatatttctctctccaacttcactacaactgtctagatcaaaaattccatgcatctagccttcccaataataaggtatacaatattattagctcatgtacatgatcactatatactataagtaacatatatatatatatattaattattaatcagcgaaagtggctgatcgaagagggaattatcatggtgggaagaggccctttccttccgatggtcaatcggaagatcagaaagaggagcaagaacccatcttcccaatttactcagctcgttcccagcaagacatgtcggccatggttgaagcccttgctcaagtaattgggagcaatcaaattaacatcaataataatcatggaaacccttcctttatcacaaccacactacataataatcaaccccaattatctcatgatcatcataataatcaaggtaatataaaagtctactgtcaataatattataattattattaaaattttaacatatatatgtgaagctaattaagctagtatatttatatttatagatagatatatatttactagtatacatgataatctctacaagcaattaatctagctctaaacatttttatatattattttcttgattttttgtgcatcttttctagatctacatatatagttgatatatatcttgttttccggctttttattgcattatagaataagtacttttgcctttcttttattcttttttttttatgtatggcatggatatgttttacaaacttgtaagcttgtaaggaaagaaatattttagaaagttacatgttcatattttctataaatatataactaaaaaaatcccaataaaaagctaatattattagttctacatgatttatctaattagtatctcaattcatttatattaattaattaataattacaattatagattaattttccaactatatcattttagtttaaatgttgtatacttatttatattgtttgaaaagatttgaacttttttctagaatgcaagattttatacatatatgcataatgcgtagtacttcattaataataatttcttcatgatggatcatatatatatatatatatatataatgataatatgcatgctaaatgatgagcaagagctatatatatattgtagaatacacggttataactttttgtcttcttttttttctccctaattattagtgggaaatcaaggttagaacatataggatatatgtatgtacgtagttatcattattttatattagccgaccaaaataataatacatatttcaatatagtgtgcgtacttaaaggtactctttaattatacaatgaattttttcaaaattagttttgagttcaaactatacaatatatacaacacatgataattaatattggttggaacacgtattcatcacatgtgtgtgaagggaacaacaatgttgagaggagaagacactacagaggggtgagacaaaggccatggggaaaatgggcagccgagattcgggatccgaagaaagcggctagggtttggcttgggacatttgacacggcggaggcagccgcccttgcttacgacgaggccgctctccgcttcaaaggaagcaaagctaagcttaacttcccagaaagagttcaagttggaggagtagcaacaacatctagtactagtcctaataataatattattactaatcattatcaattaggtactacttataataataaccttagtaatactactactactaatcaagattatgatcatcagtcttatactactactgctcctcttccatataattataataataataataataataataataataatgttatactttctcatgatcaacaaccgagcttacatcaatatgggcagtttagtgggtttaatagtagtagtttctatggatcatcatcagctggagttgttcctcatgatcatcaatattcatctcaacaacaagaacataataataatgagcttttgagattgaccatgcaatttggatcttctaattcatcatccactatgtcagatcctttcaacagtactagtactagaagcagagactttgatgactcatccactgatcatcagtactggaaatgatagttttatatatatatatatacatatatacatacgaaattatatgtatcctggtcaattataagaagggtccgggaagaaactacatctcaaatatctttaattatctgtgattggatagtacgtttggctttgtttgtgtgttttttaattggacaatttgtatcttatatatgttgtgtatgatcatttaccgtatcaaggtggaagcctttgtttttgcatttattgtttgaattgtgtgtgtcaattaaaacttcaagctagaaagttattaatatatatatgcatgtgcaaaagtttgttgccctatctacttttttatatgaataataaagaaatacttttattgggatttaaactattgatctattatagcttaacattaatacactaaaattaatattattatatttataaatattatttttattataaatatatgtcataagtatatattttggagcattgatattagacaccagtaagttttagtacttttgcgacatgttgcgttgctattagctagcgatactccctaaaaactattatannnaattatatgagacccgatacttagtttgaccaatagcgatattgacacattggaaggtgctaggcaccactggtgtcctctagtatttctctatattttgaggggaagtgactatcacctcgccgactacaaaagtgaagattaatatattaagaataataactgatgtaagatatattatacattttcatattgatctgatcatgtatatatttatatggtataatacatattatgtgtctccatattttcatatatagtactataatatttatatatatacactcatatatttaatcagattatcatttacggttttgtaatcacatatatatacataaaatctatcaagaattttacagcagtctcaaaacttaatattgcacacatatatatatatatatttatataatatatattaccaagcaaaatatatcatatgggtcataataaataaaaattaaaaatattcataagtacattaatattatttcatctgaaatcagaaatatatacatgaaatttaccctttcagttatgtgcaaatgatatacataattataatcatttcaactaagagcatataataagaatgtatgtatatacataccatttatatatcccatatatattaagaaggcagtagtagaatttgtatacgatatattcatatatctttctaaattctaagagaattataagagagagagagagagaaagaagaaagaagaaaagggaagaagcaattagaagctaataaagaaaagaaatgaatgagaatgaacaaatacctcgaaattaaattatgtatatatgtactgagatctgaccattaattatgcacagtacaaatttccttataattaagaatatgtatatatattatgtattgagtgtgtgtgcgaatgctctggtgaatgagcaaagcaatatatatgtaattagctaataatatatacaactagctagctagctgggtagatacgtttcttacgtctcttaattaggacatgtttaaagatcgagagagttaaaaaaaaaaaaaaaaagtcaattgaagttaaccggcaaatataaccatatagatttagattaattattgaacatattggatataattatcattaaaaacacattaattagacataatttaaataataatttttagatagatcgtccatattcagtgaataatatatattgagagatttttatataaatattaacgcgtatatatggtcattgaaatcggcggccggagagagctagaatgatgacaaattacaagttattagagggatatatatatatccgatcatagttataaaaccaagttatacttacatgagatacacatatagatataaatgtattaataattgttgtttaatttgaatggaatcagtacgtacgtgggtttgacgcgtaaagttataaatttgtgtgtgccgaaattttctttttttcttcttcttgattatattactcagtgctactatatatgttttcctttgaccggtctcatcatccatccatcggttaattccttcactcaaactaatgttgttattacaaacacactcatcgtttcatcaatttcgcatgtgatataactacaacgtgatgcctaacaccactcacaatagtttttcaaaaatatacaaactttaaaaaaaattaaaacaactttataacaaatattttaaattctaaaaatattttattaattgttttagattttaaaaattatttttatatagggatatatgtgtatacactacaaaaattattatttttagtaacaatcttttagttacaacataattttattttgagtaaatgtaacttttaatcataataaaaaaaattatttgtaactaaaacatagtatttagatacaacttgtcactaatttaattttgttcataacaaatatattttgactaaaaattaatttagtaacaacaaattgtaacttttgtgactaattattaattttagccatgaatcttttagtcacaacataagaatgctgatttataattagttacaaattttttacttttagtcataatttgttgtgactaaaaattaaaaaaaaatgtaatgatatattaatattatttatttaaaatggataataatataataaaatttttaaaaataaggtttttattttaaaaaatttaatgtatgatatgatgtaaaagtgaattgtaaaatagagaaagtagagttaacagataaggtacataagttattgagagtactaatagtaaattttaaagaagctttaaaatagaaaatagagagatttagagcatgtgtatttttattttagttctttaaatattttaaaataactcaataatgtgagttctcttagtaatttataatatttattaataaaaattaataaacttttgatatatttttaacacaataaatttttgatatttaattatattattaataatatttacattaaaaattaaaatatatatatgcactatcatattattagtatgggtaaatattattttcaaccctgcgttttgcaaaattattaattggaccttctgtcttgttaaatgataaaatagacctagtattttctaaaatgataaaaataggacactgagctcaattttcaacaattttattttttaataaaactaactttaagacaatttctaacacgaacaaatacagaaaatagaactaattttgtcatagcatctctagatcatattattattaagttttattttgacaaaaaatcagttcagggttctatttgtacaattttagaaaatataaggttcatattgtcatttaacaaaacagagggtccaattgataacttttacaaaacacaaagtccaaaatagtatttaccatattagtattaaagactagtatattgttattagataccattttattattatattaaataatgttggatctaatacagtacaatatctctatatgaatattttagttaaaactaacttttttaatatgttataatttttttaagctgcgtattaattgaaagtatacatttatataagaataattatattttaataagacatatacatataatttataaatttatttatataaaatgaataattttatgttctaaataaatgtataaatattatatttactctattatgttataacatgccttaaaaattattttattgttattatattagtattttgactttttttaatgtaattttatttagttataattttttaattagtatataatttactttattttaagtatattcttaaataaagtttgactgtatatataactttttcaaatactgttaatcaaaaaattcttcatcttcctcattaattatagtttaccagtagtctatactttatgtaaagtactttatattgattgcttgagatggaaacattccaatgttttaatttttaatatatacatatataaataatatataatata

SEQ ID NO: 23989 - DNA, 2961 bp, Cannabis sativa
tatactagaaggaatgggtcaaccggttctggcaagtaagaaaatctttggttttcttccccaaaaccgatccaaagctccaccaaacctactcaattgctccaaaatagatcaataacataaaaacaatgtattccaattattaattcacaacaaaatattgcaatatccaattcaccatgttagaaccaaaaattgagttattaaactaaagttcctaattccaaaccaaacaaccataaaattcaaccaattagaacctaaaaaatcttaaaattataccagaacaatctctgaactaagactaaccacacagtcccaaaatcctaaagaacctaaccaaaactttacttaaatcttaagaaatccttaaacaaacacaaagaaagcttacctcaaagcttagacaccttctaactcttgctaaacaagctaaaagtggacaaattgctgaagaaatctcctttggtctactgtccttagggttcgaaggaagaggacggtgaagataggttattttctttgattttctagatttttccttaattactaaatttggtttctaataacttaacaataaaaatcattttcagcctagtaaactctaggtttcctaataaggcaaaagattataaccttaacaaaagactaatctacccctcccactaaacatttacttcaaataaggcctagggttaatttggttattttctagctatcctggcaaaactgacaaccccactttctaaactaatctggtaacaaccaatacatcttaacttttaacaatgtgatatttctgaccactccttcgagtttctacggccgccgaacccaaaattattttatttcaaaaatggtttctactatacctgcataatttgataaaatctctgtaattgataaattacgctttatttagtcatttatcaaatttacactaatttaccctcatttagcttaagtaagattataatcttactccaatatccatatagtcacatatttaataaaatgtgcctaattaaatattaatatattttccaggatattacatccaacttcacggtactagacgtgcttctggatacgagctgtcactggtggaaggtcatctgatcacagacatatgatacgttcatagaaggtcttatataatctggacttggcccaactgtctaccttgggacccactgggggggcctttgacactaccctgaattccacgtgtcccttgctgaaaacgtgaataacatttacccccaagcttccaaaatgttgcgtatggtggaagctttcatcattccattagtgtcgacatgtggaggattagaagtaataccatgactttctaggtgttaatcgatcagggaaggtgacttccatcttcagttgtggttcatctacgtggtagtcgcttagtggtggaagaacacaattattgatgagttgctttccaaaaacacgtttatgttgatggccattcactttttgtcacgaaaattaaaaagtagcaccttcatcattgatctgcgccttgattccagggagcattaagtgtggtgacatgctttgactgctggaatccccaaactgtttgatggagtttgtgtttttggagacttgattcacggatcctccattctcttttacgtggattgcaaatttgggtataaataccttttgcgacttccagttaccattttctccctaattttgaattttcaacttctcaaaacttcaagtttcttctctgcattctatgagagtttaaaccaaaccaaaaaccacacaacctcaatcgatctggatcgttatgttgaggttgcatccaacttcatgttaaggattaggcttcagaatttccaaatcgtcaacccctggtgatcgagagttttatgccagaggaaattacgagtctgaattttaacacagagatcaattcattgatatccttcatcgttcatcttcgtcaaaggtctgatcaacttcgacaatcggacctagcgacaattagcctagtgccttcactctcattgtcaggtatgttactttctcgtcttttggttgtgttctttggatttacggttatatgttgtatttgcatgttctatttttaagtgaaattagggccttatgactatacaattactatcattggtagatttaggcattataggccatgtttcttttagattccaatgttaggaattcttgggattagtcattttgcagcaaaagtgctagaaaaaattttccctatccaaaatccttctggttttgggaactttgttgattttcactcatttcttctattcgttgttcctaactttccatttggaatgaatgacccctgaaggtttttgtttctggatggtaagtttaattgcgacctctccaagcattttatgggggaggaatcccctgattcctttctatattaggtagtttgggtagctaatttcttagtttttcttctttttatagaaactatgtctaagaagattcgacgagacgaggttgagatggaagaggagatttcggagaaggatgatgctctgagattggttttgaatgatagtccatgggagatggaccagcacataaacaaatttataatttacaataatttaaggaagtacaagctccaccaagggctttaaagtgagctaggattgttttgaaataggctctccctccatcagtacatatttgggggcttgatatttgatcttccacgaagtagctctatcttctaaaagtgtgcctgtttccaaatacttgagtattggggctatccaggaggctgagtgatcaatggctaacacttgaaggagagggtggttggtcagtaccctaatggcatgagcttgaaagtatggtgttaacttccatgaagtaattattaagaaaaaggaaagcttttcaatcataggatatctggactccacgcccaacaat

SEQ ID NO: 23990 - DNA, 2471 bp, Cannabis sativa
tacgattttttttttattttatttacagaagatacgatctttttatgttgtaatcttgttaatttattgttaattttttattatctgtatgttattttttgttgttgttttgatgttagttacatgttacttttacgtagttttcttgatgctttcgtgttgtttctatagaaaatcgtaaaaacataaaagaaaattctttaaatatgaaaatgtaattttatttttttaaaaatagggtcttatgtaattatgcttgttttaaccattttgacataatccatacactttctttaattatgagttgaacctgtgaatatatcaattatcaaaagaaaacaaaaaaagaattttaaatatacctttcttggcaaaacagtgacacaagttcaagagatcaaacaatggtgggataggatagtgatcggcatcatgtttgctattggtatgacatttttagactggtgtgcatcttcttttaaagtgtattcaaaggtgcatgatggttattctgtgttaggcaatctagggaacaagatatgataaattcttgaggaaaaaaatctccaaaaattttgatatttatgcatttgtggcaggctatcttggccatggcgggtccctcaaatatttgaataggtggcatcttagattggtttacaagctggtgatggagctgagtggtgctgtgtacctcaaataatagtaatatgtagatgcagttatttttaggattgctcaaggttttggctttggtttggtagttatagagatgactatgtgtaacgttctactaaattaggcacgttattttctttaagggtgtttgcagtgcgggtggtacaggttgtaactcttttttttttttttttaaatcaaagcatagttttgtaatttttcaaaccgtaaccgcactgtgagatcttaaaactccaaaaactacaataagaaaatatgtacgatttacagtatcatcattatcgatcggtgaaaaatgccccactgtagctgttggtgtgaaagtttctctagcatatcctgcaaaattaggaaacaggttgaggggagtcacattagtatgccctactcctcctatgacagcatcaattgagtatgctcctcttcaaaaaatgggaacattgagaggcccaacattaattaaaagatctattgttgttgttcatgtttgtctgatctatagctattttgattctcctccaaaactcttagaaatatttagattcttatagacagcatcaaatattatcgaagaaatttaaacgataccaattttacgcgaataatcaaagataattagaacactcaattgcagatatccaagtacagtactcagactatataggctactaaatgggtacaaaaagcataaataagaaaagataagagaattataatggttcactcaaaatttagactacttaatccacttttagtaatgatttcagcttagtttagtaggtcataggaataaaaatatttttgcgcactttttagagaaaaaatgtggtattttattaaaattgaaaaaaaatgtgtaattttaaaaagaaataaattatttttgggctcctaagctaggtaggccctacacacaggcctaatctgtctatgaccagggtcagacttacgaggcatagtatggaactagatcctatctcaatcacatcttctcacaagttcatgtcaagtgaggttagctcttctggagttatttattgacatgtcatccttttccataaggaactaggtctacgtgtcaatcatttacgagattgcactcgtacttctaagcgaaaaattctcactataacacattaaactacaaaaatggatcaaaaatttgggattggtggtggacctactatacaaatatatattatatctcgattgaagaggaaggtaatggaggaaataagtctcacaaaacaacacaataattctgtctcgtgaactttagaaatatgcatgagttatcatttttctgagacaatttgtcttttagttttaccatattattattagttttggccttttacacatttcacgggctatgtataactcaaccttctttggatccatcctaaaacattttcacatcaaaatataatatataaaaaccataacataatcttaattaagaatgaatattaatatataataatgccaatcaataaggattgggtttttcattggtatatatatatatatatagagaagtagtggttgagcttgagagtttggttcttacataggtcaaaatatggggccatgaccattttccaatgtctccatgatcatcaatcactacatgcatattcattgtatttatttacattaatatatatagagtactctcatgccaattggaggattaattaatttaaatgggaattaattaatttaaattaaagggtggaatacatttttccaaaatccacatataaatcacc

SEQ ID NO: 23991 - DNA, 1819 bp, Cannabis sativa
cgtagtcgaagatggcttggtgcggtggtagctgatcgtggaagtcaaagctttgcacaaaaatgattgccatgacttaggcagaaagaaggaggtggaagagatgtaaactccttagaatattttgtcagtgtcttttttttttttttttttttttttaagaaaatataggattgtttagtttttattttaattttttctatttattaaaatcttaattttttaatttataatgatttttgaaataaattttataatatttaaataattaaataataaaattttatgtggactaataaattttgtcacgtgaatactatatccatgtagacaatccaatataacagttaacagtaaaatttgaaaagaaattgtaaattgctaaaagtatcgtaattttgaagttttgagagttaattgctagtaaaataaaattattgaaaattttgccacaatttactcaaaaacatgcacaatgttccttactgcttgttaatcacaaattatttatacatattttgagggaaatataatcttcaatcaaaataaatatttgtatggtaggtaaaacaagataatatactcttttctttgcttcatgaaaaggtaaaagttttcttgacaatatcattctaaattgaaaaactaaaaccaatcaaatccccccacccttaaatatgtgaaatcgaagataagcaaagttatttgggaaactacacacatctaacaccacaaaacaaatgtcattcattacatgcctgacactacttaaacacagagccctataccacgagcttaatggccattagccacggtggtggcaccaccagaaacttccacaggcttcttggcatagaacctccggtacttggaatcgacttctgtgagatagtatgtgccgggttcaagaagactgcagtccttgttagtaacaaagtccttgcctccgtacctgtgctccatcagcttcaaagtttcaataaatttctctggctccacctgcaataacagtacatatgttcattaaagttttgtttgatttcttgctttttattagattttccgggccctgcatttgctcatggcaaaaaatgaagaaaatgaaataacaaaacaagtacctcatgtcttgacttcaacttccctccaacattcatgacagtggcaatgtttgccaagctaaagggatgttgaccttcacggaattgcaatgagaacattgtagaggttaagccactcccgtatgaaaacatcataactcgtttcccgtcctgcaagttattgaaagatagtttgtaaaactcttttctaattgatatctaaacgctcacttttcatataaaagaaaaaaaaaaaaaaaaaaatcatataatagttatctaaacaataaaaataagtcaaaatttctacttataaatttagccgaacagagtcatagtttcaagacttaccaattcactgcttttgttgtgaataagagatgcaaatgctgcgtaaagagatgcagtgtacatatttccaacttgcttgggtatcaaagtagttggttgcaccttcgcatcatataggggctttgcgacttgctgggatgcctgtcaattaattttgttaagagaatcatcagcacactgaagaaaattaacgatttataataaattggtaaatttcattcttatagttttgtcaatggaccttttcaagatcacgactttggtagctctcgtcactggatagggttgcaaatggtgctagcttttctttaccagcttcatcaatggagctgtaaccagaaacaagtaaaatcaatcacctggaaaat

SEQ ID NO: 23992 - DNA, 3163 bp, Cannabis sativa
tagaccaaacttaaataaaataaaaaataaaaatgaaaatgaactttacagaacacacttttattttctctgttttaaaattgaaaaacaaaagtagcttacataacttatttttgttttcaaaaacaaaatttttacttttattttgtgattaaaaaattaaaaaataaaagtgttactaacggtaccataattaatgctaatatctattttttgttcaaattttttatttttaattagtttttttcaaaaaaaaaaaaaactcatttttaatatatattttgtttaattatataagtactgtatggttttttttttccattggcgggggtagtgtttttgctatttttttgttgacttattctttctcacctaatttgtatatttagtacttttgttttgaacattattaatgattatagtataggatattagaggataatacttcacaggtattcaaaatgaatttatgtaaaattatttttttaatatatattgtagagatattcaaaatgattatatataatataggataatacttgatattataaacgaattaatgtgttattcttttattttatgttgatatttaatatttttttttataattatttgtaaaaaatactattattcttctaactagtcacttctttttttttttttttctttctttcttactctctttaaaaaatcttgaaagttgtattttatgagcaactttaagaacttttagagagagagagtgagggattagaagaaaagaaaagtgacaagaagaatgataatatttttttaaaaataattatatataaaaataataaataaaataacattaatttaatatggatgaaacaagaataaatattaaaaaaaataattttacataaaataatttttaatacctaatgaatcattatcctatagtatagtgatccttgtatatattctatatgtagtttcattcaattatacaatttttgtttcatgatttcaaaattaataatttgaatttatatacatttatcaaatataacaaaaaaaaaaaaaaaatagtgaagaaatagattatcttttattattattttttttttaatgttagtttccaaaataatctttattaataatttcttttgtggcaaaatatagcctccaaattaggtagtctcaagaaattttcaataaaatttaaagtaatttttaaaagtgtcttgataaacaagaaataattaataattttttttttattttactttacacatttaacattacaccatgcattaacttatttatattttttttctatatcatttaaatattatatttttacatatattttactaataaaaaaaaactcactttaaatacaaaagaaaaataaaaaattaattaaaacaatacaaatataaaatatatttacttactattcatcaagctacacgtagagaagagttttttagaatttggaaagatgtataatagccaagagtttacaacatttaatggagcttaattttaaactcttagctattttattttacattttagttattatatatacctcgtagtgagtgtagtgagtatgatctaacttttattattattattgttattgttgttgttgaaatcgtttcaaagcttttagaaaataattgtaagaacactttcaacagcttctttactctatcatttggaatacattattgaaattttatttttttatgttacaactttatattataccatatattattttatttttttttttttatatttttctctacatcattaaattactattatttttattttctacactattaaaataataatttttgaacatatatacaatatacataaataaaatattatttatatattatttaaattagagaatacactattcattctctacatatactagagcaagttatatatattagtatgagttaagtggtactatgtgtaaccacatcttaatttaaaaattttaaaaactacaagagttatagttgtttggaattagaattttaaatgataatatcctaaacactatataaaaaaaatctaaagtgatgattaacctctaattttctatcaacactttgttagaaaacccaataatatccaaagctatttttattatgagtgagagttctctcttcttacacacattcttcacttatatatttatatatgtatgttaatcttattatgagtgagagttctctcgttttatataatatattcctaattttattcttttacttttcttatatagtaagatttatttaatctctttattaatctttgataattattgtgtaatatctctaacatatatatactcacatgtaacaaactaaacacaaaattcaccatgcagtacaatcaaatagtacataatagtttggcagtaattgggtagtaaaattttatcaactctattcaaaataaaaaccaattttatttcctttcaaagaaaaaccaattttatttatatatatatctgtcatgcacgtaatattcaataaaaaaaaaaacaaatatgagtacgtaacgtaactctaactcttgtccacaagtaacataagtttactgtttatagtactaacgaacaaaccgatcataaaggcacgtgcgatccacgtgtcacatacggctccgactccttccacttcccatagctttggccaaatctctcagtacaaacttctgaactttcccagttgaagtcttaggaagctcatccttaaacgccaccgttttaggaaccatgaaatgaggtaacttactacgacaatactcaataatctctttctctgttggctttttctccaatccttcttttaagctcacaaaagcacacggcgtttcaccccaaaactcgtcgggtcgggccacaaccgccgcttccgaaaccgccggatgaccgtataaaaccgattccacctccacactgctcaaattctctccgccgctaataatcacgtctttagaccgatctttaatctccaaatacccatcgggatgcataacgccaacgtcgccggtgaagaaccacccgtcgcgagtcatcgctttcgcggtcgctttcgggtctttcaagtaccctaacataaccgaaccgcccctaagaacaacttcccccaaacttaacccgtct

SEQ ID NO: 23993 - DNA, 5473 bp, Cannabis sativa
  modified_base (47)..(61): a, c, t, g, unknown or other
ttttatattgtactcttattaatttattgttgattttttattatttnnnnnnnnnnnnnnnttgttgttttaatgttatttagatattatactttgatgtaattttcttattatttttcgtgttgtttttatgaaaaattataaaaaatatatataaagaaaaatctttaaacataaaaatataaattttttaggtgtcttatgtaattattcctttggataattcaacaaaatacgtggatatatttatatatatttatattagattaacgtccatgtataattaaattttgttttaaattaaatttgattagatgatattaattataatacattaggtagtgttttttttttttttttaatttttgaaatgaaatttaaaattttgatatttaaggattttttttagctattatatatgtacatattttaggtgcattaattttttgttttcaaatattattatagtccatgtcatatataatttaaataatttaaaataaatgatataattatgaaataagcaacatatttacaaaaagaatacataattaaacctaaagtttaattaagataaaaaaaaaataaacttcaatgaacaatataagaaattattgaagtctacaagaagaaactttaattacaaatacaaaaacataattgatcgattgattaattactcaaaaatataagtactatgtaattatgtacaactcaaatattttccgtttatcacaattactcaataaccaagtttatcatcatgaaatactatacaacttttatattttaaatatatatatatatgtgaaaatttacatagattattaacttttcccaatttattacatttatactttcttacatttttactgtttttttcaatcggcagtatagttccattggttcaaaattcatatattatttgtggcttacacgtgtcttcacggaattttgccacgttttctttttttagaaattcctttaaaaagctgtgatttgacgttttctgtcactttttttaacagttttttttacttttttggccttttttaattttttatattattttcaaatatttaaaggttgtttaataattactttaatcccactccccaactttccctgttcattatcttcttcttctagttttctcaagcgattacccaagtcgtgggtggtttcttttcatttcaaaaaatttcagttaccataccattttgtcaatcttccctctttccccccccccctcatttttcttgttatttctctataaatacttctcatcctacatctaaatggttgttacacgttcatccccatcatccggtacagctaaaaatcccccaaaacaacctcagaaaacgaaacctaaaccaacaatgggtaagaaaaatataaagataatcctcctagccctacttctcctattgcccctaaaagaaaacaaacactcgagggaaacgtcctcgaactgttgtggagaactcggacgattttgagttggagagtgagtttgtgaagtctcctaaatctgtgaagatattttcctattgatcttgtattgtttttgggttttttgcattttcagggtattgttcatttatccgtatattagttggggttttcattttgcatgttaatttttttgtttcttgtattatatgattttccattttttttcttgttatttattgttgttgttttggttttgtttcgtttaattttagcgtaagggtaaatcccctgtgaagattatgccatcaacaggtgttgttgagaaaattattggcaatagggttgtagaggtgtgtgatttgcttcctttaatttgttctattttattataccttgtttttgttattatttaatattttcgtgttgttacgggtttgttttagtagtgcttttgttatttttataggattgggaatccaagtacactcgatctcaatactaccattctagagtagtgacatttggttattacgctgtcattgaagatatcaagaaaattctaactaaaccccaactacaacttttttcaaaaactgtatttggatattttctccagattccaaaaagtacattatccattaccaacttcttcattgtttattgttgagggaggttcaacggcctaatgaattggagttttgggtttgtgtgcaaggaaaatatcttagatttagtatagaggagttttccttagttacttggttagattgtcacattaattctgatctttatcagtttaagcaagatgataatactattgttaaacattgcttaaagggttacaaaaaaattaccaagggtgctattcaaactgcctttattgttgacaatctcaagggtaatgacgatcttgcagtcaagttggctgtgttatattatgttcagtgttatttgttgggtggtcctctgggtaaagctgcttcgatagaggaaataaatgttgttgatagtggtcggtacaatgaatttgggtgtggtaagcactgttttggtatgactattcaatcattgaagggtaagattaattctggtcttaggaaggttgttcggagtgatgaggatggtgggtactatagattattgggttttcctttggcgacacaattttgatttttcgcgtgttgtccttacattattgagaaactttctttgtactcaaatattaacattccaaggcttctgaattggcctaaattaccaaaggataaagattctcagatgaagatgggtgtcatgaacaacctcttgttcaattggtcattgaaagaggtacatgttttgtttttttacactttctctattcttgttttactgttatttttatacatggctattatatttcatgttttcatttttttttttgttattttatttttcagatttatgtgcataattttttttggttgttgttgttgcagttaaaattacgaaacatctgttgagagagtgagtttgaagcttgatgattacttctccggtgacactactccggatgttgttaaattaaaagttaaaggtgtatccaagtctgttggtgaacctgacttgatgggtgcttcttcatcatgtgctcatgagcatgtctcccgacttgagtatgaggaattgaaaaaaaaaacatttctgttgttgtcagccaaaagggattcttatgaaatctttttctgaaatgaacaagaagctagacattcttattgaggtgttttttttttattttacataattgatttttttttattgttttactggtgttttcatattttctaagtctcttatgaattttttctttttgtattttgcagtcctcgcatgctgctcatactcacactagaactcagtttgatgatgctcttcgtacttctgaaaatgatgatgatgaagagtctatttcagaggaagatgatgatgctaaaaatgaggatgacaaaggagatgatgatcatgaggatggtactgatgatgatgatgatgatgatgatgatcttgatgaagctggacttggtgttgggcaggatgaggctgcttttggagatgatcgtaatgatgagggtgttgttgttgctaaagttgtttcaaaggataatgatactgacaaagttgattcttcttccaaaaatgtcaacattgctgatgccaagaagtctgaccatttcaaacctcttgcagaggttaatcgggtatattaattttgttccacttttttctgttgttgttgttttgttgttttttatgttgttttaatatatttttttactgtttttttttttattttcagtctgaacaacatcaaattgatggtgagaaaattgatgttgatgcaactattgcaactgttgttaatgctggggacaatttagtttgttttacattttttatatttttttagtatgtttttgtatttttttattgttgttttgctagtaatttttattgttattgtttatacatataataaatcattttcttattttttttcagatagtttcatcaaatcttgtttctggttttgctgagatttctaagaagaataatcttgaaatggttgtttttcaagagactcctattttacgtccctagaagagggatcggaagaaaggagcagttttgaagtctccatacattgagattgcttctggtgcctctgaatcaggttcatcttctgtttctcctgatgaatgtgtttataaggtggttaaatatgtaggtggtttgtgccccttagacaacaagattggtgaagctgtcgatccccaattggagtctgagtttgacatttggcttggtacagggcttagaaagcaaaatcttaagtaagtcgttttaggtgttttcaattcaatatttgtttttattttcattttttttttgtgttttgttgcctgattttttttttctttttagcacaacaattaatgtgtattgtaagggtaagaacacaatatttcctccatttcgttctggaattgaggaagttagcaccaagatgtggttccacaaccttagctatcctaattgtttccttaccaattctgtaagtttttttctttacatgttgtgttgttctctgtttgtttttttttttctttttttgtttttaagtgttgttctgttaattttttatctgttttaagccattttttttttcttatttgcagcacattgacattattttctactatcttagaaagaaaataaagtatgctgccgaaccaaaaatcagggtcaccacaactgattgtcttttttgttctatcataacaaacttgtatgataagtttgttgagaaaaacaatgatatatatgttttgtctctttctcataatgtggcatagtacatttgtggtggttaggtactatgtgccactcctcggcacttggtcgatcacgttgttatgcctattaatgtcaaactgcaggatcattggatttgtggtcgtttaaacatatccgagcggcggatatacctgtacaattcattgcgttttggcaggtatatgacagctgccaaagaggcttgcaagcctttttttaatgattttaccctattatttctctatgttagactttagaggccttcgcaatgaatctaagtttagcacgatagaaccgtttccgattgttgctattgatggtttacccgagcaggtcacatcgtaagttttgttccataatgctcaatgttttttttgttattttgtaaaattatgttttgttatgtgattttgtacattttttggtgttttgatggtgtttttttgttgttgttgtttagtgattgtggtgttttcgtagcatcttttgctgagtattttattgatggcgaacccttcccatcctctaattttgatgtggaagttcaccgcgatcgtttggctgtgtcattttatcattatggcatgaagaagcaacttgagaacattgaaagtgaatctgaggcccctcccagccttcccaa

SEQ ID NO: 23994 - DNA, 2720 bp, Cannabis sativa
gagtgtaccacataagaagagtacgaaaatattgttttagttatgagaaaacaagttagtccattgttcccctcattttgagatggaagcctatcatgctctcagtattatgttacccattttagtcatgacattattatcgcattgcagctccaattgggggtttttcaaaaattattttaaagggtagtataagttttgtgagcttgcttctctctctattaactttttcttttggacaaataattcattggtgtactataaaggggattagagggagtgaatttcggctgtgatttcaaagagggattggtttgctagttcttgttaattgtgttaaagattacttgttgaaagattttgtccccaagtgctcttcctatagaagaaataatgattacgaaaatgatatctttggtgggtgacagtcaataattgagtggttcatattcaaaatatgctaaacaagggatcattgttgaagtggctattaaaatatgaaagaataattgtttatgttatcaagtagttgtctaatagagaaacactttctatccactggttaaaatttgaacacaacacactgctgtggtgtcttgtccgggcaaagccaccgaatcatccattggtgtgggtgggatttggaaacctagatccatcatcatcaccccattcttggaagtattccaattttttaatggtgtcgttctgttatgaaattattataacactgttgaagtaatttagtcataataatgtattgatattgtataacaaatatatgttatatcaataccaaatatatgtttactctaaaataatagtgctcatcattagggttgcaaatcaaaatatgcaaaacagaataatgctagataaaaatatcaaagtaaatctcaactacacaaaaactttgttatgaaaaacttaatggttataaacttttttgatcactagtgaaaagaaaacaaatgtgtacacatgcatgtatacaaatattattgtgttaagaattctaaagtcaaagtgatcaaaatcctttggtcatagaagctcaccatctccaccattctcaagtaaaactattctctcctgaatttcttttttcgtctatatatgctctaaaattaaaatttaattcaactcgagagagatgtgtatatgtaaatagaacaatataactataatacatatcctacttgtatgaaggctgaattacaataattcgaatgagagagaagcatacgagttaagaaaacctaccaattttgtttatgaataaagaatatatattatatatatactaaaaaaaattagcgtactaaatttacatggttttttcaccttttataagcttgttaatatgaggtggtaattttatactacttcctactaataggagtttctactaataggaggtcttaaatttttgaatccttcctccaacattaacattatgtttggtagaggggagagaaggagggagggagagggatagagggattggagaatctttttgtttggcaagagggaaagaagaaaggagaggagagatggaaggagagggtctccctacaaacacactatttttaatccctcttaatataggaaattcaagaaaaagacaaaaaaattatacaaaatatcttttctacccttaaaaaaataatatataattgtattaaaaatgataaaatggtaattttaatatttattttactctccatccttccacatatactcctaataccaaacaacataaaggagaacaagaaagggtaaatttgttagtaatcagccatgagtacgagagcttgacgatgaattgtacatgttcgggccaaactagaccaagcggggtgtggtctaccaatggttatattttatattatcagattttgccgcttaggtcaacatgtaagataacttgtaatattttacgaaaagttatgggatctcgaaacatgttgtatttttggattgattgtaaagtttaaattattacaagttatgtttttattccattgtaatcaaagtttaaatttttcactcttattttctagtaatcccagtttagcggggttaggttatattactggttatcatagtatgcctaattctaattacggcgttacaactacacatggtaactgatcaggcactaggcaaacacagagcatggagggctcccaaagggaaaatacctttaatcaagagctcagaaggactcgagctcgacgacgccaaccaatggggcatccccctgatgttaaacgacctcagaataatgagagaaccaccgtgactcctccaccatgtcctcctcaacattcttaagaaatcaggcctcgagactctgcaaagagaaatggacctgctactcatcttgaatggggaagtgagaataaaagtagaaaaattagattcacaaattatttatgttatgttttttaacaaaattgactcaaaaacaaaaagaaatattttattttatttacaaatagaaaatataattaaaatgtttgctaatattgaaagattttcttttaattttaaaatttaataacaccaatagattgtttgacttcataacttaaaaattgttttcagttttaaaaaatagaaaacaatttttaaaaactaataggggtcatttggtaaaaaatttcaaaaatagttttttaaaaatcgagttttaaaaaactagaaaacagaaaaca

SEQ ID NO: 23995 - DNA, 2942 bp, Cannabis sativa
atacacttgggtccgtccctgcttatatacaattttttcaactcacagctattttaaaattatatttaccaaacactcagcagctttttttttcacagcacagttacaactattttttctcacaatacagttgtgccaaactggcccatagaaattttattagactatgtgggtaaaataaatgatatttgaaaaataagatatttttcaagtccaacaacagtagaaatctgattgattggccagaaatatcacgatggtattagtgggtgtttaagtgatactaggtggatatatgttaggggagtttacacttctatactaataagaataaataatatcaattttgttaaagaaaaaataatatacccaaaatgtaataataattatcatatatgacaatccaaaataaacttttcttaattaatatttcttaccaccataaaagctttctttaaattctttatatggttttattatatttatattttttttgtattaaccgaatctttaatgcattagacttttattatacatttttttatatgttttgactactaacgaaataaaatgtatatatatataaataataataataataataataattaaatactaatcagtagttaatttagatctttagatactaattaataatttttttatttgaataccttagttaatccaaacgtttagactttaaagactaattagtagtttatttattagatactaatttagtagttaatctaaatatttaaatactaataatttataattttttttatttgtataaataatactttgaacaccaaaaataacatcaataataataaaaatcggtttgaacggattaacttgattaaacagacaaaattattaggcaagttatttttttttttattttttaattagacaggttactaaatacttacaatctaaaatttatattggattgataaaaatatattacaatctaactaaaccggacggaggtacaccccaataggatgagtgttttgggaaacaatgaaaataatagcataaacttattatatggtaatcttgtaaaatattttaagtgatggggtcactctaagcatagaaattcaaattttcctactactatgtttatatatatatctgtgtttttaatgccagctttattgatataagactttacatataaaaatgttagtagaagaaattggattattgaatatattctagtagggttttaagtaaagttccaaaaatggagaggtgaagtcaaatatgtacctccataaataaagacaaagtaagaaatgcagccttaattgctcaccctctcagcccatcaaaaaagggtttgtaccaataacaataagggtgccaatgtataaaaatagcttgattggtcaatgagggaatcactctccaactaccaagataatccaaatcatgcatattttaatttaacgtttgtttttttctccactattataaacattaaataatatgataatgtatatatatatatatatatatatatttttttttttaaagtgataatgtgttctatacagtatttgattgcgctttctttttagtttttttattatttaattggtttagagaccttaacacaataaacaattaaaaacaataataagtattaataatctttcaaaacaacaacaataataataataataattctaaccaattttaactaggagtaggaacatagacatggaaatgagaagaataaaaaaatgctacgaataaacatgctttcttaaggatgtttggagagagtgtgagttgtgacctatttttcaaactaaataatatatacgatttttataattttttaaactataattatatggtgaaatcttaaaattacaaaaattatatccttaaaatatgtggtttaagaaatttaaactataattattatcaaatattataataaaaattcaaaaattaatttaataaaattttaacactacaaagaaaaaaaaagaaaaaagaaataattttttttacatcattacatatatactcatctttaagatattatattgaattatctctaaaaaaaatttataatatataacatatatttgcttatatatttagaaaaaaaaaataaaaattatgttaaaaaattacttactttataatatatatatactgcggtacggttttaacgataactattaaatttgaaatcgtaaattgcactgcaccatgtagtttggcgaaaatacaaatcacaaccgtatcacgaatgatttcattactatatttttatgcggtgcggactatttatacggtgtagacagtttaacgaacaaaacaattaattaccaacaattataatagaaattagactttattcctcaatcatttattaattttaatactaataattaaatggataagtttatacatcccctaaagacttattattgtaaatctcttatttgttttgacattcaaaataattttttatttcatttttcttataattgtatacgtcatagttatttaggtccacttataaatttttaacttttttttgaataatttacaatgttaaaaataaggtttaaatattgggattatttcacaaatacacaaaaacaacaaaaaaattacaaaaatgcagttttacgaaattttaaatatttttatgattttttattttatttacagaaaatacggtccttttatattgtactcttgttaatttgttgttggtttttttgttatttgtatgttattttttgttattattttggtgttatttagatgttattttcatgttacttttatgtgtgacactggtgtgacactggtgttcgggtttgggattgggtgaagttcatttggagccttaatagacggggtatccgagtggaggatgtctttctttatgcctcgcttgtagt

SEQ ID NO: 23996 - DNA, 3537 bp, Cannabis sativa
tgtaattaatggactaaatttgtacaaattaaggaagggtataaattttgatatggcttgtattattaaggccaaaaattgaaatttccctaagacaattattactacgatggtttgcaaattttaacgtactccaacatttaggctatttttgcaaaattttcatatatttattaaatatttgatattaataatttttttctgttattttgtaggtgttggtgggatggaaagtcacaaattagagattttctttttgatattaaagttttattgtatagttttttcctaagtatctattgtatagttccttgattaaaccggttgtttaagacattccacatcacagatgtaatgtctaagtacatgatactgctcttgattttagtagaaaccgactgcaatatccatgacatcaccatttgattaatcttgtctaagaatcaagaaggggatcattaacagaggttaaggaagtgtaccttcaaggaagggggttttgtttcttgctctaatggaaagcttgaagtcacgtttccatagttggaagttgcggtctgtgagaacaggggtaaccaatgctatattgggatgatcagttgtactgaggtagtaaggagatcgaacattctcgtaagctagtctatcgactggattggaacgatgaacgacaagtggaagcacagcaattgaacgacaaggattttcattctatgtgcggaaggcttcactgcattgcttcaaaaatatgaacaaagagggtggcttcatggatgtaaagtggccaatggtgctcctagagtatctcacatgttatttactgacgatagttacctttactgtaaggctacagaagatgaagctcggtgaatccaggaagaattatacaaatttgaacttgcctcgggtcaaaaggttaatttctccaaatattctatcttttttagtgttaataccctgagttccatgaaagatagaatcaattctatcttgggtatgaccacgactgctgaagacaaattatatttgggtttgcctagttcaatggggaggaataaatcgattgctttgggtttcttgaaaaacaaagtaaagaatagacttcttggctatggtacaaagtttctatcaagggcgggcaaggatatattaataaaaacggtggcgcaagtactcccaagctatgctatgagtgttttcttgattccacaagaggtcataaaagatattgaaggcttgatgtcaaagttttggtggcaatcttcaagtaactctcctaaaggtatccattggatgtcttggaaaaaactttgcaaacacaaatctaaaggaggtatgggttgtcgtaacttaagaagttttaacttggctctgttgggaaagcaaggttggaggtttcttacacaacctgatgcgcttgttttaaaatctttaaggcaaggtattatcctcggggttcattttttacagctggtattggcaataaccccagttatgtctggcatagtgttcttgaagctcgtcaattagtgattaaaggtgttcgttggattgtgcgtgggagatggtacttgtatctcagtcttgggtgaatcttggttacctaatgttcaagatctgtttgttccatctcaacaccctgctctgtttggtgttaaagtatgtaatttgctggatgtaaatggatcgggctgggatgaagaaattgtggctgatttgtttgaacagcgggatcaaaggcttatcttacaaatccctgtacaacatggtcacggtcaagacaaaatcacttggattggtgaagtttcaggtttctttacagtgaaaagtgcatatagaatgattcaagaaattattggggagaatactctagatacaacagctcttgaagccttttggaagaaattttgggcattgaaactccccccaaaaatgaaaaatctggtgtggatagcttgtcaaggttatcttccaactatgattcaattaagaactaaaagagtgaatatgtcaactatttgtccagtctgcaactgtcatgaggagtccatttaccatgctcttgttgagtgtccagctgctcaactctgctggaacagagaaggaataggcacgctgctgcaagataatgcagtgtttttggactggtgtaaaaacgattgattgctctttgttggtcaatatggaatgcaaggaatgacaaggtttggaacaacaaattgtcaagtgcagaaagtatagtttttttcggcaaaaacataccttaatcaatggcttgatgctcatagttctactgtgatttacccgtgtcctggttttgtgctaggtgatggggttgagcagtggcagccaccacttgaaaatagcattaaggttaatgttggtggcgttatatttgcttacacgaatcggtttggggttggttttgtggttcgaaatgcacaagggatgttaatcgaaggagttaccaagctttatcaaaggtcggctacactagaatttgtagaaactttgggtgttaaggaagctttaacttggatcaaacgaaatcgatcttcccaagttattcttgaaactgattgcttagtgtttattcaagccttgcgtattttaattgaaatgatttctatgtttgatcaagtggttaatgattgtaaggctttattgaaagaaattcaacatgtttctatcttttttgttaggcgattagttaataaggtggctcataactttgctagagcttctttattttatcatgattgcagtttcaacttggggtttgtcccagttgatttgctacctttgttggtagttgaatttaattgttaataaattatgattttccattaaaatatatatatatatatatatatatatatataaagactcatcatatttcatgggaccaatcgaattattatttctcaattttatttttgttatattcacacaatgagaatacaaacattttcaccctaaaaaaaataccaaaacaaaaaaagcaaacattttatgtacaaacttaatttttagttcaaggtgtagaaattgaggccctcaaaatcaatcaaaattgttgaacaagaattttgacacagcaaaacatatatatagaaattgaaattagtccattttgtctatgtttttttattaaattccaaataataccatgaattttcttcatgaatctcttaacaatttatttattcactaaaaaaaatagtggaaagaagtagaaaaagatcaatatgtgtgtgtataatacatatacaggtgattggatctccttgaaattaaattacacacatatttacttaaaataggagtctttatatatatgatgttcctaaagtgaaattcttcatttacctgcaccaaaaaaataaataaataaataaatcatttgatcaacaacactaaatataattccatcaaattttgcaaaaaaaaataataataataataataataataaatcatttgatcaacattaaatataattcacatcaaattttgcaaaaaataataataataata

SEQ ID NO: 23997 - DNA, 4421 bp, Cannabis sativa
  modified_base (3784)..(3789): a, c, t, g, unknown or other
tgataagaattataggatttcatctcaaaattaattgataatgagtagagtagctcgtgttattatatatgttcttatatataactcaatatttatacatttaatccatgtgggacaatgttatcttatatgcctcctcaaaatggtgactatttttttgcttaccaatcttgaatcaccttatcacaagttgtgccatttgctcgcttatggttgttcgaatctcaagtcatgcgactggctttactatttggataggtgtgaatggaaagcttgttagggatataactctgatacaataataagaattatgggtttttatctcaaaaccaattgatactggctactggtgaagtagcccatgttcttatctatggtttaatattaatatattaaaaccatgtggaacaatggaacaatgttattcaatatattttaatgaataactattgtgtattctttaaaaataaaatttatttttataatacacatgacaaaattaaaagcttaaaaaatatttgttaggatctcgcattgatcaagtatgggattggttagatataattatttgggcaacttcatctcttaggctagttttcgagagtgagttctacccaagtagttgaatcaatataatttacatttacaagatattactttggattaaatttgagttattatgcggattagattagatccaaaatatgaaatctatacttagtacggattggatgtactgtgagaaaaatagtacagattggattggatgaacacccctagacataaagtcttggggaggaatcttacgcttagccgataggcaatcaaagagacaaagacgaatacctttaggggtcatccgagagtggaagttgaaggggtgtccgagagactagcctacgtgtcactcctttgacaagaatcccgagaaatatggcaccctatcccctctgtgaggcctcgaaagggtgcacaacaaaagaaaatcacatttttgtgctaacaaccattactttgacattctccctcacaatgacagttcatgctatgctatgactatcaacatttcaggcacatcagactttctccttcttttcctctaacgttgtcaagcgctattttaccaccgctgtataccagaacttttgactgcacacgcttctcccatttgtaagtcatttaacatattttttttagttcattcatttttatactggtaattgttctgtaaacatagtattcatgttgcatgaccgttgtttgagggtttccactggccattctccgtttaccctttctttgaccaaggctaccctacttgagggttgtaaattgcgctattttcctttcttttttcgcccattgtactgtctttgcatggtgcaattcgtgcccgatgcttggcataagaaattttttatttctagatatgccagtgtttggagggggcctcttctcagcggttagggaactgatattttccctttttaatttagggtttgtcatgggggataactgttgagtacatctattttttttagatgagcgaagttttgagagatctccaagcacatggattctacacgtttgatcgagaagttctcgaactacattttgagaaaaagatgttgattcccagagccccttccaattctttatcccaagaagtggcctcgttgtccctctggtagacgttcttcatggcctagtttcggtgatcgactatgctcaccgagccaccggttgggaggctgatgacctgaactcatctttgggatgtgctcatcatctcgaagtgattatcgaagaaaatgggatcttgccccaggaagctggagtatttcatcgtttagctcgagactcggagattcccaaccataattatgaggggtttggggcatggagccaaactcatctcatgtctggggtgagtttaccacttcaaaactatttcataaatttcttagtttttgtagggttagctccttatcaactcattcctcaaggctaccgtatgttgtcagacctttttatttcttatgtctctcgaggttggagtgctcccagcccgtagaaatcttgtatttttatgaacgtgtgtccatttccaagaagggggacaaatttaaggaaaaattttactcgttgcaacctcattcgcccaacgagactgtagttccattcaatttctaaaataatgtcaaggactttcgtcacgaaattttcttctactttggcttctgagcttttgagtgtttagatctactgactgagtagacccagattccacccttgttgcggatagctcttactcaaatctttcgcaaccatgttgcggtctttgcttcacttagcatggaggagcctaatgttggggacatggtgaccactactaactatcgcaggactggcctcttgaaacctcatcagtcggttgaggacacaaacttgtctagggacacttgccccaatgcctgtgacaaggaggcagagaagatgctctaattcaagataatctaggaagctgagatgaagtacagagcctaccggagattgaaggagtagaaatacatgattgctcgagtccacaacgtagctgactggagatgagagaaaaagcatataaaaaacttatggcttcaagaccgtcctttccttttcctatcccaaactttgggaattttggagcaagtacgtctggcatcagtaagcctcctttatccttaagttatgtaccttcggttcaagattatgctcgtgctaagctgactagctatgacaggaggttatataggttatggatgccccactcccggtggggaaaaagagaggtactttttacctattggagactttttgggtaggtcccaaatgagatcaagccttccaatcttgattcttcttcaccactcctcttatgtcacctcaagctggttcctcccttcaaatagctttttagggtatgacaacaccaacaacttaatttatgaattttttagggaagagttagactatacgggtaggattagttccttccgcttgcttcatttttgggttttatcatgtgattgcatatttctcatgtccttgtctttatcttgaaactcaacccatggatgagactttcgccttgctggacgcactggacagtcctgaagcaggcaagatccttccattgtagatttttccaaggtcatagtgtctcccggaggacctccaaaaattgcctccaacaacctagaggttgtctttttggatgaagacgaagtgtccccaacgaagcgtaaaggcaagtagaaagaacttgttgttgattctaggtttttaaagaggctcaagtcatccaggacaccctctcaagacattgattactcagggatccccactaaagcgactcttttcctgggtgttctgtctattcctctgactcccatccatccagataatgctcacttgcagctttgactagccaagcataatttttccatgaatgagcaaaccaaggaaaacactgaggtggaggctctaaggactgttaaaaattattttaccaagatttagatttactaacatgtatgtttgattattaactatactctaacacctttaatatgaattttctaatacgatgaaataaacacataacattgatgccaacggaataataatgactccttccattcagatctagcccttgattcctttttgtagcagagcattatcaagatctgaacttgaatcttctctccttcagtttggttaaccacagtcttccacactatgnnnnnntacttgacttgatatgagtgggcatggtactctatcactaaaggctcgacattgataaagaacaataagaaggaatttaaaatcactatgaaaaaggctctcaattttctagttgtgtgacaaataatgaaaactaggttattaaagtggatgagaatgagagccatattattccttttatatagtatttcatttcaactagagtttataaattatatggattaaaaaagataaaataataggcaaaaatacactaagtggccgacccacacagggtggattccactagttaaaattttgtcactttatttcataattcatcttttctttcactaatgctatattttctaatttcaatcttataaatgttaagactatttctttaataattatacttaattattatataaaatttttatttatcttatttagtaattagaccttacaaagtctctcaattaacaaataacccaaagcagctagtattggagaaacatggtagagattaaggacaaggttaagaaataggtgcaagctgatgtgtttactgttaatgaatataaaattgcagcaggatattacttgtttgatcaggttcaagaaagagttaattggtgtaatgaagtttggtc

SEQ ID NO: 23998 - DNA, 6682 bp, Cannabis sativa
gataccaattcaactttttatcataatagcattagagctagaaggagtcataattgtattctttctatatatgatgttagaggggtaagaactgaagatccttagtcaattttagtaatctttcttgattattataagatgttgctaggcagcagaatgcagaatagaagaagtgttatcaagtcaattatcaaacaaggctctactatttctaagaataaagtagatttgctagttaaaaatttctcttttgatgaagtcaagcaagcaatctttgatatccctagcaacaaggctcctggaccagatggctattgtagcttcttcttccagggcaattgggatttgattggaactaacatttgtgaagttgtaacatcttttttgcactcgggtaagctgcttagggattttaactgtgttgacacttattcccaaaattaagtatcctaattccattggagattatagacctattgcatgctgcaatgtgctctacaaagcagctataaaattgatctgtcagagactgaagatagtgttacctaacctagtatcacagaactggagtggttttgttcaaggaaggtttattggccataatatcatgatatgtcaggatctcataaggcactgtgggagtaaagctggcaaggctaattgcatgattaagttagatttgcaaaaagcctatgatactctggaatgggacttcattgaagaaatactgtatgcatttaagtttcctgaaaatttcattaagcttattatgatatgtatcagaacaccaagattctcattgatgtttaatggatccatgcatggattctttgaggccaagaggggattgagacaaggggatcccatgtcacccttactctttgtgttgggtatggagtatctatccaggattatgaagaaaatagggtcaaagaaggatttcaaataccatgagagatgtggggaattgaggctaaatcttctcagttttgctgatgatgttctactcttctgcaatggggattacaaaagcatttactttatgctacagggactcaagctcttttctcatacattaggtttattccctaatccttctaagacttctgtctactacaataatatgtgtgatactgatatccaaagaattctagatgcttctggtttcaaaagacatgaaatgcctttcagatatctgggtgtgccaatctgccctaagaaaatctctttaaaggagtgctcaatacttgtggagaaaatggttgccaggattagaacttggagttctagaaatttgtcttttgtaggtagagtggttcttattaactttgttttgctagccatccactcttattggagccaaataatggtgctaccaaagagtattattagagatatagaggctatttgcaggggctttctttggagtggcaatcaacacctaaaaggagttgctactgtagcatggagcaaagtatgccaacctaaatcagtagagggactagggctaaaacaggtttctaaatggaacattgatgctatgttcaagtatgtgtgggctgttgctaaaaaagaggataacatgtgggtgaaatgagtacattgtgtgtatattaaagaagatacctggtgggattacatgccttcatctttgataggaaaacgaccatcccaatgttcagccatttgtttttgtatggttgaaagcgaaactttttttatggtaagtattcgagcgtacacaactcgacctaagagcatatcaaattgaattggttctccaaaattaaactcaaacatagattgttcttcatcagtgagggtgatttttgatttcattttatcattcattgggtccatgattgtaactattattttgcttattatgaggaattacagtaggcgatggagaaaactgggaagaaattagggaaaataggagaaaactgaaaaaaaaaaaacaattaaaatcattaaaggaaaaaactgtcacagagcaaacatgggcagacactcttagtattttattttatttattcatttttctaatatcaacctaatattttattaacatacaaaatcaacctaagtttcttataaactacaattttttttataagtaataaaaatataatttaaaaatattaaaattatttttatggatataaattcatactatggaaaaaaaataattaacaatatatagaaaataaaaattttatatgatatttatacatatatttgtgattataataaattacatcaaaatattatcattattataatagaatcttaacaactcaccgcactttaaaatttataatctactaaacactcagtttaatttttttctatcgttatactttatcaaactagccctaaatcgctaataaaacatgaatttaacagattttaatgtaaaaagaaaaaataactttggtggttaattagaataaagtaaaattttaaagtatttgaccgaaatttactcaaaaagaaaaaattaagatctcatattttaggagaaaaaacctattgttttttaaaatttcaatcacattcatttttacttttttttttacattcatatttattaacaaattaattttggtatttttttaagtaatttaagtaaacattattaaatgtttggagtagtttgtttagaagacacacaaacatcagatctgtcatctgtgatgcgactgttcccttttgttttatgaaactttctggtatataaatatatagaaaaaagagaaacacgactttttagagagagaaagattaggagagagttacgatgatgaagagtacggtggcatttctggtgatcctctgcatggttcgagccactgaatcgatttggctaactttaccctcctccggcaccaaatgtgtctccgaggaaatccagaataacgttgtcgttttgggagattacgtcgtcgtctccgaagaccatacccacgatactcccaccatctccgtcaaggttagttcttcatttcaccttctatgtccatatcaattctagatttccgcttctctctcattataattttttggttgccaagaaaaattaaaagattatatggttagataacgaaatagggatttctaatttagaatctccgacctcgtttattttacaggagggatttttttttttctttttttatagctattttctatttgtttttgtggtgtaattataaataaataaagtacaattttgattctctctaatatttgttctcgttgtaatcttatagaatttgattaatgtagagaaaacaggaaaattaaattaaataaataatttggggaggatttgtatggataccaactaaaggtattagctttcaagctcttcatgaccttgatccaccactgaaactattcaaatctgatttttttttttaccattttagttatgaattacaatttcataattatgctagttatttgtttattttgaatggtctcaaagtaagattgttggtactgtgaacattcagtaaattacttgtgatactgttgtctcacatgacagtgtcagaaagaaaggtgttggttgtaagctaggcatgaatgctttatggttcaatatggatgattatatattcgaaagtcattaagatagttttggtcataaaaatgtattgatgtgagaaaataggatagtcaaatagtaaatgaccagagatagaggaagagcaggaggcaagtgattaataattaagcaggacatatatcttatcttttgcatattctggagatattgatcccttaattggattggatttgatagcaaaaggtatcacatgtggcttcatattccattttttcatgataatttgtgtaattgatcaaaatcaatggtttctaagaactaaggctaattcgtgttctgatctatgtgttatgctcatgtattctttggtgaagaattttttatgctgtaagtgatgataatcttattgaatgattttaaagtctcagaggaacatcaagtattctgcagttgcttagctgtgagttttggcaaacacagtcactctttgtttggtggaaaatttgaaattatgcaaatctgcatagcaaatgatttattccagaaggaagatttatattctttagggacctagaaagtcaatgttgtaatagatactgagtgcttgtgatgcaattgtgtttttggtttttctttgacaatatatgcattttagaaaatgattggtactgcatgatataagctttcaatagttgaagtttttataagttatattttccatatattgttcaccgaacaatttaaactttaaaattttggaatgaattatttaatatggtattagagtgggaaatcttgactgttgagtttaaatttctacatttgcagttttttcaacttgacatgtggtctgtctctttttatcttgcactgtaataatagagtgttttacttaaaagtgaaaatgaatgtcattgacaggagctctctttgagttaaacatgtatttgcttaaaatgtttagttgctgttctccaggtgacatctccatatggtagtaatctccaccatgcggaaaattcaacgcatggtcagtttgcttttacaactcatgaagctggcaactacttggcatgtttttgggtggatggttataatcatgataagggagatgtgagtgttaatcttgactggaaaacgggaattgctgccaaagattgggaatcggtggcaaggaaagagaagattgaggtgagtgctttcacatattttcatgattcttttgagtaatattatatttgataggaaaacaaaacaataacgcttgatccagaagatgaatatcaagacattctagtgctgctttattttgaaatcagctccagaaatggtagccaatgaaattccatttaaaaatatgtttgacaaatagacatatccttctatgaacaataccctagtatgattaccacatgtttggtttttgaaccaatggagggtttcatggaacattagttgacaggttggatagaagcattaatgaagaatactcacaagtcaaaacctacagggttaatcactggttgcaattctatctcgttccttagttgtactgctcactaatctgtgtaggattctactatccttaagttcccacacattaactaagtacgggattggttagtagtatatgactacttggacaccctcctcccttaggccagcttttgggattgagttctacctaagtggttgtatcagtggtatcaaatctatgcatcttcaagtgggaccgacattgtggaaggggcgccctgtggattaggctgccacagactaggtcattgtagagtgggtcgcccacattgagcaagtataagattagttagtagtatataactatttgggcacccttatctcttaggctagcttttgagagtgaatctgtcctagtggttgtatcgcatttcatttctaacatgacatatcattaatattcgagaacactacacaccaactatcaagttttggtattgaaatgatcaagtaattaagtcaagaaaccagtttgtattgtttatctgaaagtaccttatcctttataaaagcaacacattctcgtaactttcttatccatgctattatcacaaaacgaataaaagattcttgtttctgtgcgtgtgatcagttacatgtataagttgaatgttgccttttccttaatttgtctgaactgttgattgttagtcttaaataatttcactgttgttcatatcttcctgcacaaagggtgttgaacttgagctgaggaaactcgaaggagctgtggaagccatccacgagaatctgcttttcctcaagagcaagtaatatttatctgcagtgctagttggataaattttcatttaaattgatattttctattgtttcttttatgtaacttttaatgttttttcggatacattacagagaagcagagatgaggaatgtgagcgaaaatacgaatgcaagagtggcatggtttagtatggtgtctgtatcagtgtgcatcgtagtttcagctcttcagttatggtacttgaaacggtttttccagaagaagaagctcatctagaagatggtggctgcagttgtcttttaacattttcacagcattttttgtcttttaacttttacctttgtagcaaattttgataccagacaacttttaccccttattttagagaactaatgttgcgactgttgccttttctgcttatttatttgaggataaatataatttttcaatttgcaaaaattactgattaaattttttgtttttgtgaaatgataattcagactctatatactaaattattaaaaattgaattcaggaattattttgtacaatttttagaaatacagaatttaaattatcatttaacaaaacattccatccataattttttattctataaattatgtataatatataggaatcttttttaagaaaagtattgctactggaactaatatatagtgcaatcttactgggtattatctatgaataggtaatattgagtttttatgtttaatttttctatttaattagaaaaatctctcatatgttcattatataggttgaggttgttccatcggctgaataaaaaataataaaaaaaaaat

SEQ ID NO: 23999 - DNA, 5122 bp, Cannabis sativa
tttgggagactttacaaactctgaatccaactcaaaatcagaggcagaattctccaccacaggtcgagggcgttttgcttgagtgttcttcaaagttccagcacctagtttccttttagcaacaattggagaagtagggctaagaggattatctttcaaattcatcttacccattgttgctcaaaatttattttttggggttgttttgggggctttttagcaacaggagaggataatgattgggtaacagtcattgtgaataagaggaagtaatatttatagaagaacaagaatgaaaatggggggggggggaagagggaaataatatgaagatggaataactgaaaaaatttgaaataaaaaatagaccacccacaaactgtataaacgcttcaaaaaataaatattagaagaagattaataggaaacatgggagagtgagattttagtaatgattatttaatatttaaaaatatttaaaaataattttaaaataaattaaaacccaaaaaagaagcatgttgtcacaaatggtgacacctcatgtcaaatcaaagtttttttgaaatatttaaaaataattttaaaataaattaaaatcccaaaaagaagcactctgtcataaatagtgacacccacacgttaaataaaagcttttttgaaaaaaaaaatttaaaaattgaagtggcaaaactcggtgaagatacgtgtaagccacaaagttttaatgaactttgtaccaatggcagtatactgccgtataaaacaataatttaatatacagtataaaagtataaatacgcgtgtagtagtatttttgaaataaaatggaaaaagttagtaaagcatgtaaattttccaaaatattagaacatctttaatggagaactatatactattttttagaatattttgctaaaatataattccaatagtgatgtaaaatgtgtgccaaattaagctcaaattttaacccacaataaatactacattttttaattacctttttgctacttattaatactttgaataagatatatttataaaaaattaaaataatataaataaaattaattattttatataatttttacaagcattaataataatattaatttgtgtattgtaatacaaatacaaaaaatagtcaaatataattttatggtaccaaatttaatccaaaatatacagtagattagatggtcttgactaattttacatcaactccgattcaggcctaaagtagtaatttagcgtgcaaaagttttacgccttcccgtaacacgcaaaccaaacattgcctaatgactatagtcatttattacaaattaagagaaaaaaaatggcagagaaagagtgttgtgaaatgtgatgtattcaagcataaaaataaaacccaatacgcgaaccacacacaagtcgtctcgtttaggtgacgacaaatgcatcatttaataagtctacagccttctcctcttactttttcattctcgccacccctcccgaacccagacccaacctcattcctttatcaccaacgcgtaccttcccagctacgacgccgtttaaccacctcccacctctttgggtcccacatcgctagacgatccagattgttagacgaggactacttccttattataaatactcatcacaacaagttcgttgattccttttccagttctctttcatctcttcttcctcgtttctcctttctctcaaaccctttttctttctctgcgtctcagtctcagtctgactctccgatgtcgatcaacgagatggagcccctcacgtccggggccagcaaccgcataattcctatcctcaaggcgatgaggtcagcgttcctgtttgttcacaccttctttgtctctctcctgcttctgatcctccctcgtcgccgtcgccaccatgtgccgatagtactctcccaaaatccgtcttcagagaagtggaaggcgtcggtatggaggaggagggaggttgaggataccttgaggaggaggtccttggctgaaggattggacatgagttttgattacgggaacgaggagggccggtgccgttggaactcgtcgttgttctttggtgttagacgtaacgccctcttttcgcgttcttgggtcccggcttccggcgaaatgaagtaaggtcttcggttttgatttttcgaatatttgattgtgtgaattgggggttttacaatttgttaaagcactctatgctgaaaaatatcctgctcacgaactgtttgagattggagaactcgtctcgacatgtcttttgtaatctattatttttatttggttaattgtttttggtttttgtttgtaatttcaggggaatattgatcatcatacatgggcttaatgaacataggtaaggttgaactgttcgaattgggtcattctatatttttctttctatagttgaaagtagctgtttcatatgttcttgacaaaactttggtcaagcaacattttcttaagtgaaattggcatttgggttttctcattttgcagtggaagatacgttcagtttgcaaagcaactaaattcatgcaactttggcgtctatgcaatggattggataggtatattctgtgtttttttatttgtagtttcaaattattttcagggaaataattttagccttgaagttgtcaattcaaggtgatttaaatttgaaacgaggccgtgattgttatagcatacactgtatttgtgtttgttttaaaacttaagaaatgacagcgtctttttggaatgaactctcctttttactccgaagctagttaatttgagtctttgttaggaagttgaatcatgaatcctgccatctgaaatgacttataattcttataataaatttgttaatctagaacggattttatccaattgatttgtttgcatgatcttgacgatcctattttgttaggtcatggtgggagtgatggattgcacggctatgttccttcacttgaccatgttgttgctgatactgtaagttatctcaatgcaaaccatgacttgaacgttatgtattctgaacttttgattggaactcaaaagcatgtatttatattttaagtttctcatttcgaaaactgaaaattatctctacatatttgtttcccatatatcacttgcatatgtttatagacttgtcaatgcaaattttcagtctcgtatttgacaagtttatagtgcccagaaatctcgtattcatattttccaatttgctgattaacgctggcttggaaattttggctgcatgttacagtatgcaatcaaagggatgtataatctgtgttttctctttatttagggggctttcttggaaaagattaaatctgaaaaccctggagtaccatgcttcctttttggtcattccactggcggggctgtagttttgaaggttaggcattataatttctttatatatgtatgtttagttgatttcattcaactcctttgtgataagcttgctcctataggcggcctcctacccacacattgaagaaatggtcgagggtattgtactaacctcacctgctttgcgtgtgaagccagctcatcccatcgttgtggtaaattcttttccaccttctgcagaaaattttaagatgtttgatcagtcatcttcagctcttgttataattagtctcgttgatttcgtacttgtttatcatatgatggacattgcctcatgttcccgtacaggccgttgctccaattttctcgcttgttgctcccaagttccagtttaaaggtgctaacaaaaaaggcattccggtttctagggatcctgctgctttgttagcaaagtactctgatccactggtctacactgggccgataagggtccgcacagggcatgaaatactgcgcatatcgtctcatttaatgagaaatttcaagactgtcactgttccattctttgttcttcacggaacagccgatacagtcactgatcctatagcctcccaggatctctacaatgaggctgcatcaaagttcaaggacataaagctgtatgatggtttcttgcatgatcttctctttgagcctgaacgagaagacataggtcaggatatcattaactggatggagaagaaactgatgtggccttaatacaagaatatggcaccaatctttggtgtaggtgagttttcctggctctctttcttctactttctaagaaagtgggagaggacaatccacgtggagggaagtgactccaagaagtagaagctgggttggctgtatactatatgtttatatatatatatattaatatttatataaatactttttattaaattggttttgattgatgatcaagaatgaaatttgtagttaagaaaattggtttcgtggaaatgattcccatcaatagagtatgcttataaatatactataaagaaatcaaactgtggaatcgtaggagatatgtatgagtctggaaaaggaaggaaagatatctcaaccacataaataaaaaaaattaaaagatgttcctaagaacactattgaccgtttatatggtatatcttctatttattagtttaaaatttccaaaatcaaaaggaataatattgaccgttttacttgcgtgaaaccatcgatgtgatgtagatggtcatggtctgatcaataataatgcaataatacatgtggtactaatttgttaacaaagtagatacgagtgattgaataattacgatatatctggcgcgctgaccaccataataataatattaatacgagtaataatgatggtgatgggcgcttcaattacggttgccgaaatgtttgttagagcatggtagtatttttaaaagatgcttacaatttataacggtgtttacgtatcggtttagtttagatatttatattttttgaactagactagtataatggttttttgaatattagaaactaaattagacctataaatttttcaaaccaaaccaaaccattaagaacgatttggtttgatttagtgaaatttacaattattcttattttttaagtaattgtactatttttactaagattttaattttatttttcaaaatatatatttaacatgataagtaatagatctataacatata

SEQ ID NO: 24000 - DNA, 2208 bp, Cannabis sativa
tttaaaatgatgagacaataattattacctcatcatatatatttgcaagtcgttcccaactttcaaatcgtagagggttgtacaacaaatcatatttgaagaggtttgcattatgttgtacaaattcttccccttccttggtgagtacgaagccgggccatttatcagttgcactcatctcctcagacagggcaagaaaataatacaggttgctgtaaacctccaagtatggctcagagctgcagtatcaaatcagatagccaactactaaggattatgaggttcatgctttcttgcaaccatagaaaatagcataaggaaaaataaaagattcatacagatgaagcattctactgaactatacctctcaaccaatgacattttgtgttgtttaaaacttcccaaattgggaagtattgcctttgttatggattcaagaaacccatctgaaccagcctcttctgagagttgatcttcacataaatcaggatcatctaagaacttatctattgcattttcagccaaaatgtctattggaggctgtggaaaatgtttacgtatggctcttagtactctgcgaagttttaccaatccagttctctggccaaatacacattaatacattcaaataaaggtcagattctaagataacatgctacatatcccaaaacttgtaacctatgtagtatcaaatacaagcatgcaaagtttcaaacatccaaaagaaaaggctcgcatattataattcagcatgcaagcaagagagagaaagaaagctcacagaagaagccttagcatatgggagtatataaagaaagacatcagcacattgttccttggtctgataatctccacgactagtatttctgtgagtagctagatcatcttcatatgatgaatctgatctaatattaaggccatataagcaaaaaaagcactggtccaaagcattatcaatttttaactcaagttcctctttttcatcttctgttagttcattaccaccttcaagaaattgatcacttactttctcccctgtcttaaatttgtcagtggagttattactgttttgctctgcactacctactactacaatatctttatctaagggtttattaggtgaaacactttgggaaaacacgccttcattagtgtccttttccaagacactcgtttcattctttgtactctgacccatttccacatctagtgtctctgattttgcttcatttagggaaatcttcaaacatgtgtctaggcactcagttttttccttgtttaagaagttattagatttaagcttcatatccaaggccaaaaggtgcttaattgaaaacttaagaaatattccttcctcccctgagccatcttctcccgcacaacagagcccatactcagcaagcaagtcatgcattgcaacaattaagtcaacctgtaatgtgaagtcatgaaatgacatattagaaaagaaagaaagaaagagaaataatagtaatattcaggaaagtttattgaatagcaaactataatacaagtcatacaactcatacaagtaaagattctttgaagaaaaggtttaatttaagataaaaaacatgtacatgactcacttgagttttaacaggtactgtaaggttgagatgctgaagtttgcagaatgcaattgcagcctcaacaaagcaatgtctttctatctgatcagcaatttctagcccagaagctttcttactaagaaatatgccagcaatattgcacattactgacaacagcaaggactgaatatccttaacagtgcttgctggaacaatattgctatcctgcaagcatattgaggaccgcacaagtatattaaaagaaagtgaagcaagtagctaagagaaagtatgtagcagctgaaaatcaactgtactccttgcaatcaaaaacaacaattaataagaaatttctaggtatttcataatattccttgtccatcacagttataccaaaattacaacatgccaagtaaatattaagatccaactttacaattctaatgcagaaaaatgctccaaatcaaaatacattgtaaatgtaccaaaattatgcaccatgcagcatttataaaatttcacttatccttcggctagtggagaacatatggattatattgttctctcacatggtcttcacaaagacagcatggacatggttacaagattatacggc

SEQ ID NO: 24001 - DNA, 4698 bp, Cannabis sativa
ggaaggttaaagacgtatcaaaccgccaataatctttcacgcacgatacaaatatacatgcctgtgagaaccttgttaaattgggcggtggacttcgacttctatgcaggaaggttgaagtcacactacaaatcaagcaatggtttcactttcaagattaaaggtcaaaaccatagttggtgttcaacaaacttcaagcaattcttcccttcgggaatgaaggttgaagacgtattgaacccttaacgatctttcacgtatggtagaaatacacgtggctgtaagaaccatgttgaattgtgcgacggactttggcatccttgcaggaaggctgaagtcgcactacaattcaagcaatggtttcactttcaatatttgaggtgaaaaccctagttggtgttcaacagacttcaagcaatgcttccctccgagaaagaaggttgaagacgtatcaaacccctagcggtcattcatgcacggtagaaacaaacgtacctatgattaccatgttgaattgtgtggcagaatttagcttctgcgcaggaaggctgaagttgcactacaattcaagaaatggtttcactataaagattagatgtgaaaatgatagtgcgcgttcaacaaacttcaagcaattcttctctatgggaaggaaggtttaagtcgtatcgaacccccaacgatctttcacgcacagtagaaatacaccttcctgtgagaaccatgtagaattgtgtagcggagtttggcttccatataggaaggctaaaatcgcactacaactcagtaatggtttcactttcaagattagaggtgaaaactagagtgggcgttaacaaacttcaagaaattcttgactccgagaagttacgttgaagacgtatcaaatccccaacaatcttttcaaccaaaagctttaaaaagtccaaaaaatctccatcaacaatataaaaatagcccgctaggcacccaaacattttagggggcatgcacaacttggcatagtacccctaaagtgaattgagaaatttaaatttcttcgaattctcagtcacttgtttaaaacattacttgtgctgaacactcataactccaaggaatgctacgactttagtacgcccagcctactgataacaccgagaaagctttgtattccaagtttgagtattttaggtctttttttggcaatttagttgtcaaaatattttttaagtaatgtacattttattgagcttttaaattatttttattacattgattttgtgcattttattgcacttttctatcttaggaaagaatcatttttcagctggacttttctttgtttggaaatttcttgtaagagaagaaattctcttatggaaagttgtctaattttgggaaacttgactttccctttttctaattcatgatttcaattttgcctttattagaacaaattaaattatctttatttggcaggtttgaagtccaaatttgtgatcttggttcaatttgttctgatatgctactacaaaacccgaatctgatgctacaaatcagcaatttttttaagaaatttttgtacagctgagaaatcgtttttgtggttgtctagggttgctacgttctataaataggacctagagcgcagccaaaggatttcatctcttctagtctcatattttcatatctttcttagtgagaaaagtgtttcatttgtaaaaacctagagtgttcaattaggtttggttttcttattatgatctcataatattcatagaataggttgaagagaagctttaaacaagcatgtgtcttcgagaagacttttccaagtcttatttcaggaagaagtgagcatatatcttcgggagaagatttgcttaagccttacttcgggaggaagtaagcacacatcaatagttgaaaagagttcactacttggtgtgtttcagagatcaaattagcaaggtggattacaaagggttgcgacaaatcactagagggagtctaaatttgtttaagtcaatttatattgtaatctttgatactttactaattgatttcattctttgggcgtgtccccatgcactagtagtgtttgaaagaacactgataccacgtacaaatctcttttgtcaagtgatttaattttctgcaattatttttatattttgtcagttctggtttgactctgtagtaacagaattatattctactgctgcagacatttacaattttatttttagtatatttctataatatttattaatattggaattttgtgatgatcaattcaaaaacttttgcaagcaagttgggattatgagacacaacattgttataaaaactccccaacaaaattggcttgcagaaagaatggacagaaccatcatggagagggttagatgcatgctcatctattcaagttttcccaagaacttttgggtagaggctgttcctacaacatgtcatctgataaataggtacccttcttcagctacaaacttccaaactcccatggaaaggtggtatggtcatcatgcaaactaccaaaaactgaaaacttttggattcattgcatatgtctatgacaagaaaggaaagttagatcctagagccatgaaatgtgtgttcataggctatccagatggagttaaaggatacaaactttggagccttgaaccagggaaccaaaacaaatttgtcatcaatagagatatgatctttgaggaggacaaagtatacaaagacacgctcaaaaattagcacaacaatgcttctacaagaagagatgagtagtatgcaatttgaggtggaactgtcaggcaattcacaattggaacaaccattacatgcacaaagagatgttgagccaaatcttacaaatatgatggacaagcgtcacaagaactagaagatgaagtggatcaaggagctactctccatgactaccagctgacaagagacagagacaaaaggcctcacaaagcccctcataggtttggttttgcatacattattcactatgcactaaacatagaataatttgaacatgagcctagaagttatgttgaggtcatgagattagttgataagaagaaatggggaaaacaatggatgaagagatagaatccttgaacaaaaataagacttcggatctggttttaaaacctacaggaaaaagggtggttggctgtaagtgggttctcaggatcaaagatggaattcatggtttagaggagatgagatacaaagcaagattactggcaaaaggatttacacagagagaaggggtatattacacagaaattttctcaccagtagtgaaacacacctctataatactaatcctagcactaacagcaatgaatgaccttgaattagaacaaatggatgttaagacacccttcttacatggtgaattggaggaggagatcctaatgcagcaaccagaaggctatgtggagaagggtaaagaagatcatgtttgtttgctaaaaaggtcactctatggcctgaaacagtcacctaggcaatggtacaaaagatttgatgaattcatcaccaaatctagtttcaagaagagtgttatgacagttgtgtgtatgtcaaaacatcaaatacaaggagtacagtcttcttactcttgtatgttgatgatatgtgctaatagcaagcaaactgatgagtgagataagaaatgtgaaagatatgctgagttcaaaatttgaaatgaaggatctcaggcatgccagaaagattctatgcattgagatactcagggataggaaaggaaagaagctaatgctatcttagaagaattacatttcaaaagtgctgcaaaaatttggtttttcagaggtaaaatcagttagcacactaatgactcacctaacaaaactatctcactcacaagctccctcaacagagtctgacctcaattacatgaaaaacacaccctactcaaacttggtaagaagcctgatgtacatcatggtcggtaccagacttgatttaagccaagttgtgagtgttataagcaggttcatgggaaatccagagatagaacactggaaggcagcaaagtggatgataaggtacttaaaaggcacatatgatatgggactactatacagctcaaactcacaagcaccagaagtcaaaggctatgtagattctgactatgcaggtgatatgaacaccagaagatctcaaactggttgggtttttcaactaggtaactgtacaatcagttagaaggcaaacctctaaattgttgcactatccactattgaggcagaatacattgcctgtactgaagcagtaaaataagatatatgactaaagggaatcatcagacagttgagcttagaacagaggtatattgagtatattgtgatagtcaaagtgcactgcacttatccaaaaatcagatgtaccatgaacgaaccaaacacattgatgtgcgactccatttcattagagatgtcaaagcaaaaggaaaagtgaagcttaagaaaatttcaacagaggacaatgcctcagacatacttaccaagccactcaccactgccaagttcagacattgtctgaacctattaggaatcactaccaccagtgatctgtaactaatttttttattttttatttttttgttatcagttttgtttgttgttctattttgttacactgaataattcgaccaaggtgaaa

SEQ ID NO: 24002 - DNA, 1784 bp, Cannabis sativa
tttcgtatattgcttggttcacatatttatttcatgatcatatgtttgatatataaattctattaaatccttatcatattgttatttataattatagagttgtctacacagtgaaaactaattatgactatggtataaactattttagtcccgtaaatttacactaacagaataatcaacgatgtagtttacttatacttgtataagtagaatatctttttcaaggtattaataaagtaatcttgtatcagatgtattggttatacatgagactgaaatgatattgacagtggaaaaaattatatcatatacttaccatattatcttttctaagtcaatgtcacttggctgatcttcgataagtgatctcaattttgagatggttaggttttagcctaattatgctatttgtgttctttgacttgttcgttacccgcttacccgtaggactagcccatacttatatcttaggagcatagttgtgtaattaagtggcagagctaattataaatatagaatctatatcttctatagactcttaaaagcgaaacgatagttactttagagtttgactaaatgagtttaaatagtggagtgctcattttagtaattatataagtttacttgattatcatttacaagtacccaagtgttttaagaataaaataaattgaagcactacaagaaaattactctatctcagaggttaagaatcctcgtaatagacctatcttagcagttatcaaccagagagacaggatcatgaccaattagggcagttagaaaacgccgagagagggtaagcaatctcgatagttttaccatgaaccaccgaaataggtgtggcatctcctcatgggtttgggcaatcttcacaccgggaaacaccgagataggtagcaatcttggcagttacaagatgaactgccaagataggtatcaatctcaacactttgaaactgccaagataggtcgactatgggcaaaaaataattataatattttctttgaaattttcccttcgtccatttattgtattgattatatgcatgcactactactataaaattttaaaagaaaaacaacagcaggaaaattttatatttcaaacagtatataataaataaataaacatacaatgcattgttcaattcagtacaaaagaaataggagaacaaataggctatgaaaaatatatgtaaagaagctcaaagacggtatgtaaagaaaaattaagttcatatatataaaaatacagtagtcaaatcaattacaactggttcggtcctcgcttggattttttcatataatttattttgagagttgtaatttaaactgatagctctattatttgttaatttctctacttacattattaattatatcaacaaaaatttaatagaaacatttacataattttcaactgagttatcatttacattattagaaatttctccatgatcatataagaacttatgaaaggccttaagggaaatttcattactgtgaatccattgtctgaaaaatacgttcgagatgcccaacctgcattataaatatataaaaagcaaatgtaactagaataagaagaagggaagaatcattatagataaatcacaactctctattttattataatctaacaatatctgactatcaacttcagacctgccattgattagacatttattttgatcctaaatattgtagtaaggaacaacaagtcaatactgcccaatattccaatcacacaatgtgccttagaaatataaagttcaaagaag

SEQ ID NO: 24003 - DNA, 1448 bp, Cannabis sativa
aaaaaaaaaaaaagtttcaattttcttatccaactaggttcggctccgagcctccgcactctaattctaatatttgattttacacttttttttactatgatattattatttttttaaatacctattttgaacaatttaaaaaaatattttttattacctactttgaaccattcaaaaaaaaatacctattttataaaataaaatcatatttattaccattttaattattggagtatccttaaacctatttaagaaaaatcttgttatgctataaaaaaaaaatctacatttatttaaattaatttttaaatttattctttttttatacattcttatattagtctctataaaattttttttattttatattataatattttgtataatatattttttatttttattctaaaaaattatgtattattgtcttaattttcacatatatattttcacttgaaatgtatttaaaaaaataccaaaagaaaatataagtatgaattaatagagaatatatttataatatttgagaatgtaaataataaaatatgatataattatttattttaggaaaaaatataactttttttgtccaataaagagatatatgaccattttgtccttttggtttcagtaaataaaaatatttttatttcttcttaaactaattagtaatcacaattggttcgtttaactaaatacttccaaataagtctttgggaaatgtaatatcacgaaattcgaaatgaatgattgactaaaatctcatagatggtgaaaaaaataacgaaaaatgataaatcaatcttttttttttctttctgaaaattacaacaaagaataattagtatcaaaagatataaggacattttcgtcaaagtcatagtaaaaggtgttaggtggaaggttgacttatatgatcctatgaatgaagtagcaaaaattatattagcatttttgtccaaataaatatattaacatatttagataattcatttaatttaatattactaaaattttaaaaataaaaattgcctaatacgcggccaatggtatatgatttgggattagcagcagccagcagttttttacgtggccaatagtaaaagttaccaaacaacaaacagcttttttttcttccttttttttctcgatagccaaacatgggttttttgcccactagttaccaaacatggttcatgaatcaaaattaacttttctagacatttgattgtaaaaaaaagttttaaaaggtaaaataattttgaaaaatcttccttttaagatggacactatacaattacaatctagtcgttggtactctgcataaaaaataaacaaaaaaaaatcgattgatagtttttttggtaatacagattggaagtttgttcatatcatatataaggaaatcatgaatttacagatcataaaattgtaatgatttaattttt

SEQ ID NO: 24004 - DNA, 3510 bp, Cannabis sativa
  modified_base (3413)..(3414): a, c, t, g, unknown or other
tatagctttatttcaaaaaaaaaaaagtataactactaatttcaaagaaagatcttaataatgaatggtatttgttttcttaataaaatttctttatatatttatatgataacaacagtttaaaattataagtttcttataaactatatcaaatagtgactttaaatgtagtgatgattataaatggaatataataatgacaacaattttaaaattatatgacgagttttttatagattctttcaaattgaagctttaatatagtggcgatcacaagtgagacatagtaaaaataacggttttttaaatcatataattagttttctataaatttatatattatttttattaacattattgtttttcatgaaaaattctaatttaatgatatacattttaaaaactaacaatataataatgtatatttataataaataaattaattaaaaaagttcaaaaaaattaagaaaattacgagtatatgcaatattaatttattttattgtgttattaagagcaaaaataagaaaaaaaacaattattcatattattaaaaatatatatataaagaatatcaaaatttgataatagatatagttttataatttaattatcactaaataaaaatataaccgcacgcgaagcgcggtttgtttcctagtttaattatcaaataacaaattattccaaaaatattaataaataaaaattatgtaggaaactaaaataaaatgaaaagtgggtttgagttggaaaattaaatgggttgttcaacaggctgttcaacttttttttttttaaaaaaattaaaaaatggccatttttacaacgtcacttgagaagaagaggctagggctgatcagagttgagggtcgaaggtggcttgtggagtcgaattcgaaggtggctggtggggtcgaagtcgaaggtcactggtgggggtcaaacgtgggtggtgggggtagaacgtggctggtggggttcgaagtttttcaggcggttcaaacactgcttgctggtggaggtgacgctggttgcaggcgtgaggggcaaccggtggtagtgaagaagaaatactcatgggaaagaaaagcttggccgagaagaagggattcgggttccccactaacgagagaaccaaacctccattttttatggtaagtttggtttttttttttggtacatttcaactgaatatgaaaagtggtctcatatgtaggtatttgtgtagaataattttaagctttataggaagtagttgaggttgtttttggtaatttatctgtttgtagggtcaaattgcacatggttagagaataatttttggaatctattcggagatgggtttgggggatctgtgggttactttgtgtgaatttatgtggtttattattgatatttttgcattgcatagaactcttataaagtccttaaagaggtgtatatttcatcttcagataaagcaacaactgcttctctttttgctcattcatcactaaattctttgagaccataagaggtcactatagcttattgttttcctgctgagtcttatggtgtttgtttgagtagtgtatccaaaaaagttaggtctaggaaaagaagactattgaataagccgagaaagacacattcaataatgggaacttatcaaaatggtagtagtagtgtagcatattctatgagaaaaaaaaaatactttaggccacattaaatcaatggattcattgcttgtgaaagggcattttcccttctttatttctttgcagctgatcaaattttagtaccttgaacttgtagcaatatggattttttgtgcacctcatatataatgccttttaatttgttttgttttgaacatttttcaactttttcttgtggaagtatacagtctattacaagatagtcatatgcatttatatttatatgaaaaaaaaactatcaaatgttttgagaattttggctagaaaaatgatgtcttcaagttcaagtaagatgagttttttttttttttttgcttttttccatttactattatatagtatgatactatatttctttaagtattggattcttctagtagaaatttaaaatttaaagaagtcccccctcacaaaaaaaattatgtcttttttattttatattattatttgataaacaaactctataactcaaagttgatgcaatgcaaagaatcatatactccataattgacatactgcctgaaaataataagctttaatttttaaccataaaaagtggaaatgattcgttggtctgactcacttataacctccttttaggttcactaacattttaataatactttcacaaaaaccttttagcacaataagaggatatttttttttctatctttatttgtatttatggcaaaagaaaaaaaatggttgggtgttgaagtactgttatgattttgttaattaagttaacatttttgtagtgaaatatatggacaaagttttcataatgttaaaaaccacatgtggtgccacatttgtataagtgtgagtttccctaatagataatacaatttaattttatttattataatttaattgataaaataattaaatttagatgtatggacaaagtctttcttctcataaatatagtcaatgaatgtcacacacaaatgtgacatatattctgttttattaaaacacttctatgtatgatttgtgatatcttatttaattagaaagtgaagtctctttattgttttgtgtagagccaacatcagggtcgtttactctcaagattcatcacaaaggacatttgcaaagacatggtaatatacctacttactttggtgggaagattgattatgttcatcattgtcatattgataacatgtctatgtttgagctacatgggatagctagggatattggtcacacaaatcctgttgaaatgagcttttattttaagtgggataatgaaacattggagtgtgttgatagtgacaaagttttggttgagaagattagtcaatttattaaaaatagtcatgtccttgagtgatatttttgtaatttggattatagaaaaaaaaaggttctactttaggtgttgagaaagggttagtaggtgatccaagtggatcttgtttgggtgaaggacaagtggatcacattgggcttaatacttctaaaattggggttgttttgggtgagtcaccagccactcaattatctcaaattgggcctcattgtaatgtgcaaagtgctcctgaatttgggcctatttttggtgagttaccagccacgcaatcatctgaaaatgggcctgaatttgatgttctagatctgcaaaggaatcagccacaaccacctttgttgaacaagaaatttctgcaatatcagagcaacaccatgttggaaatattttaccannatcttagatttactaacaagtatatgtttaacattctaaatatgaacttctaaaatgattataaataaacacatataaagtatgacaaaccttaca

SEQ ID NO: 24005 - DNA, 2182 bp, Cannabis sativa
tttttttttttaaatttatgtttatactttcatcttttaaatttatatttttaatgttaaaaattatggaaagattaatcctgcagaataaaaaatttaatcatttttagatgagatgagtcaaaaggttatgatacaatatttttttttctttttctcttatggtcaacacaattatttctttatttcatagtatttattgttctcaatactaaagttacatcagttcttcattatttttgtgttgttattctattttttgtacatctcttatttcacaatcatggacaattaaacaaatatgacaacaacattaaacatagttttattttgaaattttaaaagtactcattgttctcattatactacctagaaacttcaattcactggttttcattctagatttttgaaaaataccagaaaacattgaaatctatgaactaaaacaaccaatatatgtgaatcaactaaacaataacaattgattaagaaaataattaaagcaaacatactaatcaacataaaaaaaatttacttagaaaaacccaaaaaaaattggcaagtaattaagcgttcatggagatctgcatcaatcgtgatcttctctcatcaacctttcatggagatatctatcgttggtcatgctgtcatggttgatcggaaaaacttcttgtcggcgttcatggtgatcagtaaaagctttctcatcggtattcatagtaatcggcaaaagcttctacattgttggtggtgttgtttggagaagctacgtggattattattagatattaaataaatattttatgtttgggtataagaataaggttatgcttagttaagtttggtgtgtattctagggttggataactattcccctatataaacactatttctgttctcatttattacattttgaataataataaaactttttcctattatggtatcagacactctctcctaaggaaatcagatcctcttttttcggctcagatccccttttttcggatcttgccggttcttcaacgactccatcattttttttcaacgatctcatcgatttccatggcaagaattcgatgtttccctgttttgaactccgatcttccctctaccgctgcttccatcgtcggcgatgtcctcgctggttctaccaccgttcccatggtgtcctttgttgaagctttgatcgataacactgctacaagttctgaccatggcgtcgactccactaccgttcccgtgatgtctcctctcactgcaagctccggcgttcctttgatctctcctcccacggctactcccatcgccagtcacatcgtggaagactccaccactgttcccgtggtgactacctttgtccaagatccgaccgccgccccacctcagatcggagccacatccgcggctgttccacctttttcttcacgatcgaccgctgttctacaagatccgtcccttccgtgatgaatggtaacgctccttccactcattttgtcattcaaaatgttgactctgtttctttgcagccttctcaagatctgggttccaaagtcaaagggccggctgccaatcatgtttccacttctcactcccttttggacgaacttgcttcactgcaagaaatgatttcacaactcacccaacagattaaccatgctcaacagtctcaatcaactgtggatgtcaacactccattgtcatctaacctaattggtaaatctatatcattctccaacaatctctggattattgatagtggggctacctaccatttttgctttgataaatcttgttttagctcttttgataatattcctagtgcctcgcatattactttacctaatggcataaaaattcctgttactaaatcttgtattgttcacattaatgctaatttttgtttaaataatgtgctttttgtacctgattttgagcttaatcttttatcggtcacctgtattgttcaagatccaaaatattctgttttattcacacattctagttcttctattcaggacacgagtctgaatctacaaattgggattgctaatcgcgttggacaatttttctttcttcaacaagaaaataacgctatttgtaattctatttcttgtaatgatgtaaacaaatgacatttacgcctaggacatccctccttacagattactaaatccttgaa

SEQ ID NO: 24006 - DNA, 5312 bp, Cannabis sativa
attttaaatatataaatattaatattatttatttttaagttaattgaacttatactaactttaaattaatttaagtatatataaatattaatatgattttgtaacactattatttttttattgatatttttaatattggaagtatgtttaattttaatattcttaaattttatatttattttttctcaaactttaaaactttaaatattattatttttttaaaaaaaaaataaaaaaattaataagtaattttctttaatttataaattttacgtgcaatagcacgtaataataacctagtaaacatataattataaaagcttacataaggacataataatgtaaggtaatagttcaagttattaaaaacaataataaaataatggtaatagtttggggtccaaagaatctaatttactttaagaaagtatggttttttttaattaaattaattctatatataagatacatccaatgcttctacgaaagtactatatataattgaataaataatttaaagaaatgatgtcataaatcatctataaatttaattaagataaatatactgtaataagttacttttaacaagataaaatctgtcttaaataactacaaggagtattttcaaaatagtatttttttttttttatgttttatatacaattttgtagcctaaaatttttaattacaaacatactcttataaagttttaaaattacaaaaataaattttgttcagtaaaaagttaaaaacaacgagaaattaacctcgcgacaaatataaattaactagtagcgaattcaagatcatttaaaatgaggtgggtcctaatttttttttttgtaaggcaagggcaaaagtaaactcaaaaagagaaaaaatgttatggtaggatttgaactcttacctctatcatatatgtaatctagtttaaccattacgttaatattatttttacaaatattatcttttattacaaatatatgttataactaattaaaatgtatatatatttttttctcgatttttcaaaagaccattcgcttctatctgggtctgccttaatttaaaataaactataaataaattataaaacaaccataaaaataatctcatgataatacaactataaaataaaaaaataataataataaaaaacggtttattatgtaatttttttttaatataattgataaattttttcgttgtatgtgtgcatattattgctcataaatttatacatatgaagctaggtagaattggccgatcgagagatattttcacatttggattttatatatttatttatttttcgtttgaatgtaattatcttatatttggaattttttggttttgtattaattttaagaagcttatttaataagttgtaacttttatataataaacatgtaattcttttgataaaaaagacatatatataattataaaattatcaaagattatagcatagggccacttgaacttatattatatcgaatctgattgctttatgtgctattattgttttctagacattattgttacaaatgttatattttaatttgtatgatttttttttaatctctctcccatttttgttgttctcttctaatgtgttggataagttggctttggtgtggctggtggtgagtttgatggtgtgactatatattatgttaattttgtaagagaaatgttaaaacgcagttgtgtaacacttttttaagtgtggtattgttattggtacaatgaattattaggttttatataatttgatttaataattttaagcaatattattaagtaattgcagggtgccacttataagtgatgctttgtaatgattttttttttggctgaaagttatttttgtaatgattgatattgaacttaatatcaatgacattttggtatgatctttttctgcttggagtttccgctcattcctgtgtttatatgttatagatatagtcatagaattaatcaatctaaattttatttcgtaccctagttagtactatataaacgtgtatattgaatataatgatggctgcatttcttaaagactaaataaaacctaaaatcaaacttaatacaaatctcatagaattaagccatatataaaaaacaatatatattatgtatatataaaaagaaaaagcaaaatccagcttaaattactcaattgcattttatgtgatgaaactgaaaattattaactaattatagcgaataattgtttaattacatcatgactaagaaactacatctctactttgacgcagtattctcagccttaaaattgatgtgtgaggttcatagaatcatttatatgaaactatgaaaactaaaaaccccaacactactcattaatcagtaatctatatatactgtatatatatatgatctatattatctatattatataaatactattagtactacttagtcctaatccacgtacgagctcttagcagatacatgtttcagttgcccagagaaaaattatcttcaaaattttctctaccatatatatgtagttttttctttgacaaatttctcaaccatatattattaattattattattttccatatcgatgatcagtatatcaagtcctgaagtctctgccatacccttgaggtctcaactccaaccctagaaagcttcacctgtaaattaataatttatgtgtaaatattaaatgaaattacgcacatttatatatgtgtatatatatgattaatgatgtatatgtgaggattatgtacctgggcatgaagtgtgtggaaaattttgtcatcaacaacagaaagactagcactgacaacttcagctccttcttgctcaagaacactaataatttcatacaacatgaaattcttatgtaatccacttatcaaaaccacttctatgctacaacccatgtcctttaactcaattacaggcaacattgtcatcttggtcgtcgttggtctcatcgcatcgtctaaaacgacgtagtttctattatcatattattattattattatcaccaccactactgctactacaaccaccactattaatccctacttttgatgctattgaagacgttggtgggggcatcattattgcttcttcctttcgcttctttaacttatctattctttctctcaattgggttatatacgatgctgcaagatctaactgatcttgttgagtcaacatttcctatattaataataataattaaaaccccatgatcatatatataattaccaaaaaaataaagaaaaacaatatacaaatgtataccttagggtgatgggaagggacgagggaagcaagcttaaagcaaagacctttcatgtgaattcttctgttcttctctattgtcttacggtcaagcttattagacgacgtcgtttcaccggaactcttcttcatcctgaatataaatatttttccaaaaaaaagataatcatcaatatatatatatttaagtatagggagtgagagagagagagagagagtactattgataattaagaagatatataagagatcgttaatttggaatgaatgaatttgaggtatatttatagagaggaagctaggtggggtacaccatagtagtactgggtagtagcagtagtacgtagtaagagacaacacagtattattagtagttgtagaagtaaaagtttgaatcaaaacacaggaaagcgagtagcggaagtatcccggaaaacctcgcttcccagtcctccacctcgtcaaactattttattctattgttttttttttttatttttaatatatatatatttattattactcttattttcggtcacacttttgtattttgtattttctaatgtgaattaattatttgggacccactttctttaccttattatataaagacatatggccttatattttttgttcatttacgcgtcgatttctcatatctttctttttagtctcagtacactcctccaaacaaaaagagaaatggtaaaagacaattgtgataccaaatgtcactcttatattgtttaatgataattaaatagtgaaagtataacaaattttaaaatttaatatttttttatatatattttaatcatataagttataatttagtaaacttttatttttcaatcttaataataataaagaattaatattttaataattattttaaacttagtaaattttaatttttaattaattaatttattattactgtattagttagtttttaaaaatatatttcgtttgtaaattaaattaaaattaaaaaatctatatacaatataacaattaataattctataaaaatattcatatgatttcaaaactattgttatcattaaatatttgagacgtagttgccacactacattcaaagtcaatatcattgtatattttacttgtaatagtcactatcattcccaataagtttgatctgcatacaaaataaattaaacattgagttagttacttacttttatacataagtaaacctgtaaaagtatctaatcaaagtcaatgttattattgtatctcacttgtagtattatcactatcatttttattaagtttactctacacataaaataaattaatcaaataattaattgagtactattcacttttatacaaatattgtagtgaagaaaatattaaaaattgataaatgatcacaaaaaatagagatacaaaaaagataattgaatattaatctataacaaaattctaactactatttgaaatcgttgttatcaccgtatcatacttatagttagtcgtcataacattcaaaataggtgtcatcaccaaataaaaaaaaatataccaaataattattaccaaatattgaataaagctattttagagcgcgtcataaagaaatatacatagaatttttttatttttttttttattttagatgttagatattttttaaaaaatatatattctatgtattctcaaaataaaaaataatatattttgagaaacttctaacaaaagaatacatataatatctctacatggacttatatataaatgattctctctccattcatcatcttaattattagatgcattcaaaatgtcaaaaacaaaaaattgaaaatcaagtagggagcaaaaaaagaaaagttataaattaagaatatattaatatatgattatttgactttttgcatgaataagatagtagtgttatattagtggaaaatctatacttacaatcttaaaaaaaccaaggacaaaaggacttacttctctttaccgaggaaataaaaaaaaaaaaaga

SEQ ID NO: 24007 - DNA, 3043 bp, Cannabis sativa
atccttttgaaatatataaatttgggatatgcctttccctacttagtgttgttttgttgtttgtactgtctttcaaaaaaaaaaaaaaaactaattcaaattgatttttattatttatatttagttattgttaataatatttagttttacaaatttaaatttaatgagaatttttcataagataaaaaaatttacactttcttttttatgaattaaattaatatattgctcagacaaacagttacaaccatccttcacaaatctcttcaaactgtaacccctctgattatccgctgtacatccataagtagttatatatataactacaagtacaatttataacctcaactacatactcaaaagccactctgtttatcctcatctttacttttacaagttggtaagacacctgctaatctaatttacacttttacattcaaaaatattaatattttttagtatttacaaaaacaatacaaaaataataaaaaatcaacaacaagattataaaatacaatataaaaatatatcaaaggctatattttatgtaaataaaattttaaaaagggtaaaaatatttaaaattctacaaataggtattttttgtaactttttattattatttttgaaataattccagaaattatatataactatatgagagataaaaaaaaaagggggcccaaatgaggttgcttattaaaaggagccattttacatagttgtcaaatgtcagtcacatgataaacaagcacaagcagatctttttgtctccatggaatttccacgaaaatgttgaaatttcttttatcactggaaaaaaaaaaagaaaaaaaaaaaaaagagggagagagaaattgaaattcttcaaagttttgatgtgattgacactgaagtctcaaaacatatattaaaaaaaatatctatttaatttccatcaaattaatttgaaattaaagtatagtttttttttttcttgcatagattgtgagattgttctcttcttgtcatatatgtatttgttaatcgaaattttggcgtaaaaagatggtttacattcattggccggccactaaaagtttggggtatgcaatgtgtccaaaaggtgagactaacaattgcttgacaacccatgtatacgaaagatagctcatgttacatgcttgcaagtaaaagaaaacatatatctatatacatattaatgttttcataattaactttccttttcttcaatacacctaatttgatatgccattattttaaattgatagtttctctttttattatactttaacaaaagaaaaaaagaaagaagaaaatatttcaaatttctacttgtttttgtttatagttaagaagctaatttcccgcttctagattccccttttagcttttactataacaatttgaaaaattagaaatctcaccccaaactaaacaattgaaatatatggtataaaatgtatgtagggtgataattagtatttatgattgtggtgaaatctcatccttattctacactgttatacaactcacagtgacaaagattgatccaaaaacaaaactaacaatgacaagaaactaaccaaaaaaaaaaaaatggtgtttaataagaactagtaaatgaaataagtgaacacaagaaagaacaaaacttacaacccctttattcaatcatgatcatcactttacatataagataacttgaatctaatttgcacacttttcaagagagaaaacagagtaaaatatttacaattaacctcacatgagtctcctcaatcaaacacatgagggtgactgtaacatccctccaaactctctccaattctatcttaattctctacatgtccattgtctaaaattatgtactctaatgaatttaaaaacttgtctcgatcaatgaagagggctactctttatagtggatgctgaagctgaagctgtttggactgattttagctccaactgttttaactaatagttttgccaactaggattagtgaccatgctgatgtggcagggaattaagtgagtcaaatccaccacaaatccacctgatttgattcacttactcactgtctgattagtattgaaagagttgaccatactcttgcaatcaagtatgctcaaataatgaataaatttgtccatatggttatactttttgtgaaaatgtcagcagggttatcatgagtaaaaattttccttacctaaacatgttttgacattactacatctctgatgaaacgtagcttgatgtcaatatgttttgacctctcatgaaacattggatttttcatgagatgcaaagtactttgattgtcacaatagacagtaatgtcctttgagttgaatcccaattcatttgtcaatccctttaactagatatatagcctccttgataacctcagttccagccatatgcaacagctttttgcaggttagacttccagcttacacaacctcctaacatagtgagcgtagcctgtatagctccttctagtgtttatatttacaacaaagtctgagtcaacataactagcaacttcttctttgtgttggtattcactattgaacacaatgcttgtgtttaatgtaccttttacatacctcatgatccattttaatgcctcccaggtttctgtacctagatctgagatgtatatgttaacaacactcatgccatgtgccagatcaggtctcgtgcacaccatggagtatataagactcccaaatagctggcatatgggattctaatcatcttgattctcacagtttcattatttggagactgagttgttgatagttggaaatattgagcaatagaagtagcaactctcttgcatttgtccataccaaacttgtctagaaccttttgtaggtagctgctttgtgattgagtaatacaagtctgagtaggtatatgtatgtctattcccaaaattcctttggcctttcgaaggtctttcattttaaactcttcattgagtttcatcttgagatcatttaactttgatctctcctttccaattattaggat

SEQ ID NO: 24008 - DNA, 2983 bp, Cannabis sativa
aaccgaccgattttcacccctaaacaattgtatgggaatcaataccataccattcattcacattccttttaagtaaacatgcaataagtgttaaaacatatactttttaacaattgtcttttttaagttttcatgtaatttttgtcttaaaaaaaatgttaaaacatatactatgtgacaattgtcatttttagaacgaataagtgatacgaagttaaacttagaacaaaaatatgcttcaattgtgtgtatgatgcaatttagcgcaacatttactatgtgtaaatatttacaaaaatgacctggtcaacctgtgacctgccaactcgccaacctggccttatttcgagtccgaattcatttttttggactcaaaatttgtgaacttgaaattcaattaacccgcccaatgtttagccctatactacagtgacggttcacatagacattatgtacacataacacaatttaattggtatatataaatatatttaaaaaagttaaatttgtaataaattaatttaaaataaaaattaaatttaataaataaataaacgaataaaaataaaaaaccaaacgaaaaacctaatttccttaaacttgtacacgtagacagtctaacatgatacaacaaactgctaaaaaaacatgagttttagtatttcgccacaagaaaaaatagattttaaaggttaattactaacaaaataaaatttttgaaagttttgccacaatttattacgtattatattattggctacataatctcattattgttggttaaaaaaaaaagaaagaaaaaatcccattgcttcctcattgcagtatttttcacccataaaaatttggctaattttattgccatttccacttcatcaccaatatccattctatactttttggatttttactattaccatgatttatatgccaaacctatttggattctgtcttcttttgcttatatgaaaaaaacaaacatatgtttttccaatatggatatggaaccaataagcaaaacaacataagtcacaacaaatatagatcgctacaattatagactgtcaatatttaatggtcaaaaatcataaacaaccacgcataataataaatccattaatagtgatgatcatcaataaaaaacttcatagtctagtttagagtatgcaccagatcagatccatttttatttacagtaactttggacatatatagcaaaataaggaattccgcaagcaataatctatcacctccattttcgaattatggcatagcagagtccgcagccggttgaagacaccttcatgggctccctccagtttggtgcagcattgcatctatctcatcaccgtcttccatctcaagctattaacaattataaaccatgagcccaatatccatattgaatgatcaaaatcatacagtgtttaaactatacattcagtataattatgatttagctaattcatgatgagctaaagtgtttacctcatctggagtctgatcgactcgtagtctgcgtccatcaaaaagaaatgcaatggagttgagctccacagattgcctatcacagtatgcagtcatgagcttgcgcaattgggtgcttcttttgatcctgaagaacacctcattaccatcctatataatgatttgaaacaaaaccaacaggttatttaaggaccaatcaaaaacccaatctcataatacacattggatcaataaatgggaagagaaaaagggaactgtgtcctcttttcacatgtatagaccatgcctaaggaaaactcctccttgttttgtttcatcaaactccttccaaccctttactcctttcaggatgatttacattcccaattaatgaaaataacactttcctaatacaatcattttcacttacatctcaaataatctccccaaacagaccatataactaaaatcccttcatggttaaataagctaactttaatttttccttttactaaaaccgcacaatgtttggccaaccaacctaaccatatggtccaactagttaaccctaaagtcaaaaacactcttaaaacctcgaaaccccactaccaccaccattgtaccaactgacacaaattagtagtaaaaaaaaaatcgtaatcaacatcatttcacctcctcaatcggaatttcccgcggtttctcaacatccaaacagcctaaaatcaacaaagagatcgcatgcaaagctaacaaaacaaaaaaaaatcaaatttcaaaatcatacctgacccttgactttgagattaatgtgagcagtctggtcgacgggcttcttgtcttcctcctgaccaccaccaccaccacctccgccggctccgccgccagtcgccgacatcgtatgatcgtctcaaaaaccttttgctattcccgatttcaaacgagttttctcaagcgtcagattcacgccgtgtttctgaattttgtgcttgcgtttctatatatacctgtgcctcgggggctataatggtaatttcaatttgtgggtggattaaggacttaattacgtaattacccattgtatgatgacgtggcatctaaagagagcgagtttttgagggtaagctatgaaagataatattttttttttgttttgagaattaaactaaatttgataaaagagtttggattccgtagagggcccgagagccgggaaaaaaaaaagtggaaggaaggaccaaaagatggaatcgaaatttgacggctgatattgattgagtggaggatttgacggtagagatgatctgatggtgggaaaatggacgatgggatttgatgaatgtagtcaacttatatgcattttgtaaatgtgtgttgtgagtacgtcgtgtacttggggaaattctgaaaagttctcattccgtattagattcttccttatccatattatattatgggaaattttatttacaccccaaaaatttttaagtacaccattttaataatttttatttta

SEQ ID NO: 24009 - DNA, 2744 bp, Cannabis sativa
  modified_base (2115)..(2125): a, c, t, g, unknown or other
  modified_base (2170)..(2171): a, c, t, g, unknown or other
agtcaccatagaagtaggacaagttttaatgttcagcatatcatacttctctatcagtttagtaatatacttggtttgagtgagatacaaccctaaatcatctctgtgaacctcaatttccaagaaataatgtagagaattggtgtctttgagagagacatgcttgttcaactttgcaatgaaagaattgagttcatttacattgttccttgtaataatattgtcatccgcataaattaagccaaagataatagtttgatctgttatgtataagaaaagggaaacatctacttggaaatgtctgaaatgccactacagcaatatgtttttaatcagtcaaacgaggctctgggagactactttaggccatacaagacatgtttaatttatagacataattaggtttttgatactacatatcctcttctaggtatccattcaagaagatattatttaagtctagttgccttattgcccagttatttttttttagaaaagtatggtatgtttttttttgaacaagaagaagattctttattcaaacaggcaagaacaaccaacgaatacagagcaacagcagtccgagaccctgcactttaagaacagctggaaattacattaagaatgtagctatctagtttcccttttcccccattacaacccattaaacatctagcttttacacaagatttaatctctttactcaatatactagctgtcttacaactcagctcaaaaatacaattattcctgattgtccaaactgtataaatggttgccaaaataactgtgttgataattctttcctgcatattgttggctgccttagaaaaccacctgctgaagtcgactagccagtcaaaatggccacaccatttgctaatctcactaatcaggtctcgggtaaagcatcagtgaataaacaggtgctggtgcgactcgttttccctgcagcagaccgggcataagggagaagagattgacagaaaccggctaagattgtctctggttagcagctggttgttcaccatttgccatcctatgaatctatgctttggaaggaccattctattccaaatgttccttgcatagtcaacaggctaagcttggatataggcgtagtaaaaggatttagtactaaacttacctctcactgtggcagctataagattagattcattgatagatgatcgaagacgaaggatctttttaaaattccagcttgcatcttgtttaaaatcaactgtccaaaagctcatacctctcaagtatatcgggtcaatccacttaacccaaaggttatcttgtttgctcgatatagcccaaataaatttcgccacaagggctatgttccatttcttcccttctcgaaaacccagaccaccagagttcttggggagacaaactttctcccatgaggggatatgcaacttgcttctgttcccattggagccccaacggaagtctctacaacatttgtcaatagccgccgtgattttctgaggaagcagaaacaaactcatccaataatttctgacaccaagaagaaccgagtgaatcaactgagcccttcctgtaaaggaaaggtttctactacaataatcagaataattcttatagttgatgctttaataactagattgaaggttttactgaaatcaatacctggtctctggtgaaagcccttggcaactaacctggcctttagtcttttatttgactgtatcttttttttttgtatacacatttgttcccatttaaattgtgaggagctaagtatggtactaatacccaagttatacaaattcttattttgtgcctttcactctaatgaatcagaaaacaaattcttattttgttggtacagttcctccaccggcatcttcaatcttcattgaaccatcatctccaacaaatacattgatcagatcatggttataatcggaaaactgaccgagcattatacaaatctaaaaaaatcgaccgttttaatctacggtttggtcggtttaaaccgaccaaaccaaatttcatttttctaaaaaaaataagttttaaattttttataattatttgaaaacttaaaaaaattagagtattgtatcaaatatcatnnnnnnnnnnnataaaacttttttagttaaataaataatataaaataaactttttnnaattttgttcaaattatttgtgctactaatatggtaatgagttacattaaaaaacttgtattattttatgaatgtctatatataatatgtaaatgcatcaaactataataaaataaagcaatgaataattgagactttaaataaaaaagatataactaaaactagtttaataaaattgtatattaaatatatacaaaaataatatatattatatataatatatatgttcggtgggttctcgacttaatcggtcggtttgtcattgacactaaaactgaccatgttaaggcagttttttcggttttcagttttttcagtgtcagttttttcggtgttcggacggtcggtgtatgcggtttgttcggttttttggattttttgctcacctctaaaatgtagattgcacaaaatgctagtggatgttttcagccttggaaccaatcatggcatcacacccaaaaaggagccattgtccttgtgcacgcaattgctccaccaacttcgagccattggggtttgaattaccaacatcaatctcttccgtgtaaattttgattagggaaggaggggatc

SEQ ID NO: 24010 - DNA, 1796 bp, Cannabis sativa
agttgatatgtttaattagttaatgataacctgacccatatatatttcgtattaagaaatttcaatattaacccgacttgggttctcttagttgtgtttgtatgtaaattattattatattacaatacatatcgattaacatagttggtatcttatatttaatttttatatatatttttaattatattatttttttactcatttaaataacatactaataaaaatatgtatgaagttacaattaaataatattaatttttcttgtagggataatattgattaattaaaataatttatcataaattaataatacaatgagtaaatttttttgtatcaataagcaattttgtttctaatttatatatttttctataaaaataaataatgattaaatataaattaataatttaaataatatattggatataaattagctcttgatttcgtatcatatgcattaatcctaatttaacccaaataataatcgtgttatttggattcgatccaattttgatttgcatctatctttcataatcctaacttgcaataattcatatcgtctcatcatttaatgacctgaattgtcacttaaaattaagataagttctgatgtatttagagtatttatttaaataattttttggtccttatacaaatacttttctgatcaaataattcaaagtaaatttgtttggtgtaatcttaaagatcaatttagcatttaaggaaatcacaatttcaaaactctatactccacctgaattttgtacactaaattgtacaactatttaagaacaacaaaacaacccaatataaggcacacaatatacaacaattacaatataatattcatcaatatatatatatatatacagtatgatataatgtatacaatatgtacagatgaaggtgtttgaatcctcaaccatggtaattagattcaacttcctccaaagctttctttacaagaaatttaaagtaatttataatacatctccaaataatagtgaagaagaattgtctatattacattatgatttctgaattgaaaaagttgatggaatcccaatctgtttagtactcagattttaaacatcaccagattccgaattggaaatggaaatcagttcagaccgataataatcgattaaatcgccattaaacatggcgacaccttcttcggcattgaatgaatcagatgatttggtcaaatccaaagcctttttttcaggtaaagagtaagaaattgcaatgagcaattctcttgttagatcctctgaaatctcatcctcacaatgtgttttgatatccataaaatgtcaaagaagactgactattcctgcgtttcaaatcaaccttattacataaaaatccaagataataaaaaatctaaagatgaacatttttgaccatctttgattagatctcaatcaaattcaatctgaaccctctaagctttatagggtattctgggtttttcataacaaaattaaataaataaaaaagaaaactttgaaaaccagagtcttacggagaccatagtcaaaagacccaaacaaagcttgatatttatattatatatatatattgattttacccatcttcaacatcaaatttctgtaatcagattaaattggacaatgtaataagaataataataataattataattgaaggagggagaaatggaagagagatgaatgacctgtggtatggctatggtgggtggttgttgttgaagattcacggctgttccttctgtcttaatttacagaatcattttatatagaaaataa

SEQ ID NO: 24011 - DNA, 2905 bp, Cannabis sativa
gatatgtttgaattaaaaacttccaagtcatgcatgacgcccctcctatttaacaatattttctcctacataataaataaatatatatatatatatatgccgctctactctaattacgggacaaatactagaagacaactattacataaatgaaatatcacttcataataaataagtatcaataaaacttacatatgtttatgcatgaaagttacataaatactaattatgcattagatatagatgttaaacaaagatttagttaccactagtaaagataccatgatttttaattgagtatgagacataaagatagatacaaactttatgagatttgtttttccataattgagcaaactatcaaaacatagtaaattttgtatgttattatatatttttatgagaaatgctctaaggtacttatagtgcctagtaccactatgaaatattatattattattcgtgcaattatatattaggttttatttattttattttaacaaatataagagcattgctaggcactatacaagtgtaccactaaaatcctactttgattcaaaatgggaaggatcttaagtatttaaggatgaacactatctaatgagatattttaggaaggtgcctaaaaataaatccgtaaaaatttaggtaccttggtgtcatgtaatagtaagtaatttttataaaaaaactactcactaatatttattcaataggtaaagttatatgattaatctgtaagagcatctccaatggagatgcaaataagtgatacaaatgtaaaatataattcactttgttaaaaatttactctaacagtgtgctaaattatgatgcaaaaatcttacataatcaaaagtgattcaaatttgcatcacaatatagcacgatgtaaaatttgcataacaataattgttatacttttatatttaccattatgctatttttaatattttataattaaatgttaactaacaacctcgtttgcattaaatgacttacataattattattatattattattaaattttacatttaattttgtattattattattttatattttaataaattattaagtgagcaataaataacatattaaatttcatatcaaaatttacaattatgtattagagaacaataataaaatttactgtaaaaatatcacaatttttttttttatataaaatatagctcaactttaacataataagtggcgaagagatggaggaatagacttagccatacaaactcaatacaatcaatcactctcctaagtagttgggataaaaacaattaatcacttttagtcaagtttaattacaaactcgaaacaatcaatcactctcctaagtagttgggataaaataattaatcacttttagtcaaatctaattcatgcatgttgttacttagtaagctctataaataacaacataaactttgagcaaattacacttaaaaaacgacaataaccaaataaagtacttttttaggttgttatttattaacatggataatatgataaaagttgagattttatcaagagaattagtaaaaccatcaaatccaactccttcacaccttaaagattacaaactctgttttttagatcaattcatacctgaaactcacggcggaatcaccttcttttactcttccaattcccattttcttaaatctgatcaaaacgacaacaaaaactattgtcgtattctcaaaaaatcgttatccgacaccttaacggatttttacccaatcgcagggcgatttaaagacacgtcaacaatcgattgcaacgacaatggagcttgtgtcgttgaagccaaaatcaactccaacctcactgattttctcacgagggttaatcagacaaaagatattcacacacttttggggaaattgattcccactttggattcgaaaaccatggaattagcttccaaatgtatgttgatcgctcaaatcactgtattcaattgcggtggagtttcgatcagtttctgcctcgaacaccgattctgcgatttctcctccgttatggttttcctcaacagctggagcgccagatccagaggcggcgatggaaaaatcgtgctccctgatttcgtcggatcggattttcttccgccgcaagacatgcctcctctaccaccataccacaataataatccatttgagaatcgaaacacaacgaggctggtcttcgaacctgcaaaaatctcagatctgaaatcgagatatttcacagagatctccgatcagaacaagaaaatctctcgagtcgaagtggttcttgctctaattctgaaatcggcaatctccgcgactcgatcgtcttcatcgatttcaaaatcggaaggagcagatctcacaaaatctttgctattccaagcggtgaacttacggaagaggactgagccgccattgccggaaaatgcgatggggaacctcttctggttgcttccggtgatgataaaggaagaagagaagaagaatattgagtttcatgagataattaacgagatgaggagggaaacgacgtcgtttttggacgaaacggttaggaaaatcaaaggcgacgaagaagggattggattggtttttaagtcggcgaaagagaaaaaagagattatggagagtgtcggtgacgtggacacgtatttctgttctagttggtgtcgttttccgatttatgagatggatttcgggtggggcaacccggtttgggtgagtagtggatttgtgtcgtcgctgaacttgatagttatggaggatactaagtgtggtgaaggaattcaagtttgggtttctttggatccaaaagttatggccatatttgaacgagaccatgaattgttgtcgtttgcttcactaaatccaactatcatggcctagtta

SEQ ID NO: 24012 - DNA, 2439 bp, Cannabis sativa
  modified_base (50)..(56): a, c, t, g, unknown or other
cccctattgcaactaccgctgcaattattttagaaacccaaaccgtaaannnnnnnaaaaaaataaaaaaaaaacagtatatgagataattcccctaagatatttctgcatggtcttgttgttgttattttttatcactcataaaatatacaataacaagattcaattccagagataaatataatacatattattataagcgcataaatataaatctaaataatacttttgttgatttgaagagaagagttcaaatagtggaagcataccttaatctataaatactaatgttctaatccatttaatagagatgatctttgtggtgattttgagtaatgatcttccaattagaatgcaagacttagggttctctagttttctcacttgatgggggaagatgagaatagagtgactcttgtttcttggtgaccactaccaatatataacctcatagctaggttataattttaagtatttctaatttacccctcaataaattagaaatatctcttaaggtatctacacatttagtgcataacactttaatactcaatgacccacaattactaaaatgaacactttattttaggtcaaactttaaatagcaatacactaatatacatatgagcccatattaaaaattttaatcctggacattattggtatttaatattttttaaatggatttccaataccacggtcatatcataatatatcataatattagtgtaatttaatttcaattttacatattgtaatttaatatgtaatataaaaattgctaaccactcacttataaagtgtcactttatgtggtgttaacttttaaatacctttaaaagaactgaaatattaacactttaaattaaaatatatggaaaatgatactaaaatacaccaaaatatataccatatacaacgatgccattttgagcaaacattgacacgttttagcaatatttaacggaaaaattcccatctaccacatatacctaattaaatttatgtataaataggggtacaaagctaacgataagagcaaactaaaaagaggaagaaagatttggtaaagaaggggagcgagttgggtaggttgaatcgtacgaagctcaacctgaggtgttccctttgacggtgggttgaatcgtgttccaaagaggttcagtaaaatttcgaagatggagcagaacaacaagatggtgaaccaagaagcttttcttaggaaaaggatcaacgaagtgagcaagcaggtgaaaaagctgaggaaagagaatcgtgagaaggagttaacccaactcatgtactccaatctattcggtaaggctaatctcgttggcttatctgttacagatttgaatgatctcgttcgtatcattgacaagaatttggaagaaattaataagaggatagagactattgctgccaagaataataacaccaactcgacatctcaagtggcggttgcggctaaggttgaggcttctgcaatgaacgagaatgatgaagatgtgaaagctaatgtcgttgttaatggcaataatattaaaaattaagtgtcaatggcattattttgccgaatggggacaagaataaactatgttatcgttcaaatttatgttatatggtgttggaaataattttgttttaagttttaaattaaataaagtccacattttaatttatcttttatcataattatcttcgaaataattttgagtattagattttatggtcaagaaaatgaattttgttttgtgtgattcagtaaaagtataaaaaatttaagaggttctaatatattttgagatctttaattttaatctttttatggcgtaatgtcgcaaattattttttcaagaaatattaataattagatatttcaatgaaaaaatgacttaaacttaatagccaaaattttaattggttgagtatggacatcttatacattttaaaaaatacatttctcatgaaaattctacaaaagatgtttagtattcacaagttgtccttatattttaaaatagttttgaacttcttagaatttttttcttttactcaatatatatgatattttttcaaattattatttgctgatatcgaaaatatttaaatatttttatatattttttttttgtaagtaacaataaatacatattagtaattataactcaaacacaactattacactcatggtaatcatgataatatagtaagcaccagctgtcttagtcaaatatggtcatatatcataattaataaatcttatataaaaaagtattaataaaaatatccatttattccttttatagtcttgtaactgataatataatgtaataaaaaggccaaaaaagatgatttcataatcctattagatacaggtttggattttcttctgtttgtggataaattctattctacactttaaatttatttgttttt

SEQ ID NO: 24013 - DNA, 3583 bp, Cannabis sativa
taattaattaattattgtaatattatacccaaaaaaaaaaaaaactacaatcaatagaatttattttataaggaattatagtaataattataatagagaatataatttccttaaaaatattttggtagtttattgtgaaaaataaactaatgaataatttagtatagaaatagttcatattttattacgaattttgaaagtaataatgtttttgaaaaatatttatctaatatttaccaattttaatagttgacccctcttaagttatctctttatatcgatatcgttatagtgtagtgggtgggattacaagaatttgtgtgaatctttggtactcttttttggtagatggcttttaatgataatctcattttattttaaaattaaaaaggttgtcccaatccagcctctgcccctgagtacagtaatccttgatttggctaagtatgtatctagactagacaattagttatcttagtttgaagaggtccatacactgataactaatgtcttcatcgtgaacttttattgtaattcatattactttataaaaataataataataaaagaaagtatggttgacaccagaggctgagtttggtgaggctctccatttattgagacaatgacaagtggtgttctctatgtgtgtggctacaatatagtggtggtttgttcttgtaggaattctttaatttcaagaatgccctacaccaactcaatattttaaaaggataaagtgaaaattgaccaaaaataattaaaacaaatttgattaaaaataatcaaactgtgagtggtttaactcgctatgataaatcgtttgaatcaaaacgatttgtcgttgaccagagcaaacaaatgattctaaatgagctaaccctagctcagattcaatcaaataaccttcgagatttaaaccaaatctctttctctctttcttcctcttcaaacgaaacctaggaatccagatagccaactcgatcaaaccagaccgatatcactagaacctatccccaaaaaatagatcacaattatacaaacacaagtacatgcatcaaaagaaaaaaaaatagagaaaacaaacacagcgattatagaggttcgccctaaatccagggatacttcctctttgagctcgccttgaagaacgatctcaaatctacactatactttgaagaatattacataaggtatgaaatccaagccacaaacttgactggtatttcaattttctttcttcttcttgttttataatctttctcactaattctcttttatttttctttgcatgaattcaccaagctcaacacatgagctcctctctctaaatctgggtctcacatttttggtatttctactctgctttacgattggtgaggactcctccttttatagctgttattacaattgtaattagagcagaggaattttggtttgtacaacaaaaattatgttaggaagtagttggagtttgttatttctggtgagtgagaatcatgagcctttttattgtatttgcttttctatttggttgttgtaagtagcaagtgatataaaagaatttaatttttacagttttgttgttcaattttgtggtttcgggttctttacccacttgattagattaactattcaaattttaactataaaaaatgacacaatcatgtttacatagttaagttcaagatttctctagaattaatcctagtttaaaagtgaagcaatccactatatacaacatgaaaattatgtaatagtgaatattgtaaaactgccacaatttttagtaaagacaacacttaaaatcactatgatatttttacctgaccttttgtggcttaaacaattcaatttgaagtattgtagatttttcctacactatattggttagagaatttatttggtcatttatattcaagtttatcttttttggggagtaattttgttttttcgatataatttctccatttggttgtgccattgctgagatcatctttgtgttttacatttatgtcttctatttggattttgaaggttatttcttcttttacaaaagaaaaaaaaaattataaaagaatgtggtattatcccatccttatcaagtatttaagtaacatgtttaatataacgagagagaaaaaaaaaagtaatactatactaataacatcaaacatgtggaactcattggctttgactacacaaccttgcttataagagaatgatataccatgtccccacccaaaaaagaaaaaaaaacacagaaggaaaaacaagggagtcatttttggtttgatatgtgtaaattcattttgtagatgtaataagttaattgttgtatgtaattagaaagtcttattgtgatttcaaaaaaaaaaaaagtcttattgtatttgttttagtacaattagaaagaaagatatgtaaagcacctaaaattttaaatttgtaagaggcataaatataatatttatttttagcggcataagtacttaatgtttgtaaaattggaatttttttcaaatttcattagtacagactccgtttgaatttattgaaagaatatttagaagtaattagtactatatatatttctgtctatacctaatgatataaaaactgagtctaatatgtgcaatctttaagataataacagagtctgtattgatgaaattagagaaaatttatagttgacaaatatttggtacttatgccgctaaaaataaacattgaatttatgccgcttaccaacttaaaattttgggtacttatgccactatttacccttaattaaatgagtaaattataaattttatgggttttcatattttggtgcaaaaatataattttgttcaaaaaaatattatttatgggaaaatgaaataagaagtttaaaaatacgaaaaattaagtaagagtaaccatataccttcaaatggtagctacttactagggatgcacacggggcggggaattggcagggagtgctcccctattctcatccttaacgggattttaatccccatccccgcttattctccattagggatggggctgaaaatcccctaataggggtagggacatggaggggaatcccctaatagaaaaataaagtttataataaaatttttaatatacaaaaatattaaaatacataaaaattaagatattatacattaattattattcaataaactaattattatctaaaacacaatttaaaattcataaaaaagatactaatatactaaaaaaatacaaacataaattataaaatataaaatattactagaaatataagataaaatactaaatgggtccccgtcggagtggggagtgtgatccccatccccgccccgttttacatttaaggacaaaaagtaatcccgtccctgtccctttccccatttagacggggaatccccgcccattagggacggatccccgagggccatccccgtaagggaaatgtgcatccctactacttaccataaagaataatcaagtacttaatgctatttttatatatatatttttaactttttttctaaaaaatttccctaactaaatttgacctcattaa

SEQ ID NO: 24014 - DNA, 2189 bp, Cannabis sativa
taacaaaattacaacacaaaaaaaaatatggaaacatcaatagtccatatttttttataaataaaaacttataaactgtaaaaatacttagctatgtttgatatgaggaaagaagagtaggatacataaaaaaattagagaggatggggagtaaggggaatggagatgatagttgttatccacgtttctggatagatatacgtggaattccaccagcggatacaatataaataatataggcccaacagtggggtcaaataaaatgttgggtcggacccataggcagtcagtccttccagataagcaaacatcgagtgttcaaatgactagcttgtgagtattctcattaattatgagatcccgagatattagagattaactcccaaggatttcacccaaatatcataccttcctaaatatggaaagagagtaattagtgatcacgcaattaatgtgtctttaattctccatgaagataggacatagtttttggcatctgtcaacatgatgtggcgtccacatcaacatacaccaagtgcctcatgggtcgggcttcaccagataagcccaagtcaatatgttaattgtaattacaccatcagtgggaaaaccttaacgaataaaaattctaaacactatatatataggtagaacccttcatgcaaaggggttagaaactcattcctcaattattgaggcaaaatatagagttcatatatttttgtaaaccttaaggcttttcttactttaaagtaataatattgactcatggactaagacttgttaatgccccgaccacgtaaaaatactctttgtcattttctatatctttgattaatttctttaactttcacatataataaattgatttcggacatcccgctccatttttcgttggaaattttatgcacatgtgaaaaattgaggtgacagccttgaagtcatataacgttggtcagcctaatatgatataaaaagtagaaggtaaatcgatcatcaaggattgagccatcactgttgtgcttgttggagtttgtcctactgtaagtggtaggcggatctatccgagtggagtaacactttggccagagaatctatatactagctgagtccaaagaactagatctttgagttgaagtctcatctttttatatgtcgttttaaacaaaatatttgaggaagctccattataaactattgtctgagccaccattttatttgcaatttgcacttcaacacccaaagggtcgttgtgcaaataaatgatgtggtcggaatctgcttcactgaaagatatgactggttcttcaacacgtgggtgtttaggctttctttcctctacgggtagaactgcatttgtttgttcatactgtagggccagagcatacttctctctagctttgcctgagtctccaacaaggtgggggcctctaatgataacctgaatatgttcttccactggtggaggcatcaattagttttgtgtgttatccggttgagcggtcctttgttcctggtcggtcctgacatatttctacaagtacgggttatttttcctaataggaaattctatttactgcttcaagttattgcattcattggtgtcgtgatcgtagtctacatgaaagcagcagaacttggtagtatccctcttgctcatgtctttcttcatgggaggaagttttttatatggtaccacagactgggtggttacaaagattgtctctatatctttttttaggataataaatgcaataaactttgaagtattctcttgaagatgttgttcggagttgcctctgaacctccttttctttccattaccatgcagttgccatcatttgacctcttaccaccttggtttgagcttctataattttattgaattctggtctcgctagacggatgtattggttgcagtggcgtgtttgttaatttttctttagtccgattgtgtccacagaccaaactgcttcttcgagctttataaatttgtctgcttggtctaagaattttgccattgaccctatagtatgtctttttatgtcattccacaattctcttagagattcaatacctcctaggattgtggccaacctcccttccttggtcaatacttcaccttggtaacttcagttatgaatatacttatgtatacatcttcaatattggcattttgaacttgggtg

SEQ ID NO: 24015 - DNA, 3161 bp, Cannabis sativa
tttaggtttgattaaggttttttaatttaatgttttaataatttttattttaaaaataattttatagtattttttcataatttaaattaatataaatatttttggtaagaaaattataagttggactaatagaatattgacatgtgtcattctaatcaacacttagctgaactattaaaagaggtatggatggaatcacacaaattgataaattgagtatttttgccgctatttttaaaatttgggtacttatttacaacaaactcaacaatttgagcatttatgccgcaaatttcccttaaacatatatgcattatgaataaaagaatgaaatacctccagccattgattatttgagctcaatcccacacgagctttggatctataaaagaaaaggaaattgattagtatgggtaattgggctttcaagctctttttactctctttaaatagattaactgtgttttcaccgaaagagtagtgagttcgaggaccaagaccttatatttatataggtgagacattccatcaccatcaaagtctgctatattaaattatcattatcaaaatattttaacaattaattctaaaaattaaattaggtaactcaaatatttgataattaaatttaactcaaattaaaatattttaattaattattaaaaaattaattatatttaattatattttacaaatcaaatcaaataaaatatttttaatttgttagtatataaaaattattctaacattgtctacatatccttttaaatttgattttgaactaaatccttcatttgtctcattattatgtaaaacccacacattacacgatacttatatatattgagaagaatcaaattgtagaactcgatcccaaaactgcatgattcattccacctcactttctttggggggaaacttgttttttatgaagcatcatcaataaagaaaagagggattgagaaaagggaaaaaaaaaatcaaatgcacctctgtttttggtgaagtttaataataagaaaactgtggttagacttagacagatggatggatgtagatatatttatttatttgttacctaataaccaaacctagctatataaggataaaatataaacaaaagaaaatgatggctctcatgaattcatttcatttcattccatgcagtgcaagttccaactatttttccacgttaacttctatttttatattataatttaatgcacaatatttgtctaaatcactgcaataggattttgtgatatatagtaatattgtaatcacaaattagcatgccaaaagtaataagccatctctataaataatatatatgaattatttttattactcgattgggaattgttaaaaaatgcttataagttataattaaatgatatctattatttttcaatatctttctagtacttttttttttaattttttatgtatactactcttatttaattccattaaataaattaaacccgacaaaaattagccgtggagaaggtataattgaagctgatgattccataaaaaaggtcaaaaaaaaaaaaaaaattataagaggcaagcttatcttatcttagcatggagtgaatatataaatatatttatatatgagagggacaaaacagccacaccattaattcaaaaaaaaaaaaaaaaaccacaccattaattcaaaagcggatccatttgtctttttgcatgtaactaattaattatgttattaataaaagaatttgttaatatcaactatacaaataaaataaattctatatagcggtctcttggaaattacgtaccttccatatattattttatatttttattaaaattatacatattttaattaattaaaattttattgacattttatatacatattttaattaattaatttattcttcaataaaacttactcacgagattagttgccttcagttatacatattactgtataactaggggcctttctctcctcctccaaataattattttattatattttggtaaatttttaaattttccttacaaatttattagggtttgctttaatttttttcttacctcataataataaatttctacctctgcctccgtgtcagcaaatctttatgttgaagtcttttctttttttctttctttcttttttttgagcacaaagggttatttagtcttattaatacaatttatggactatatatatatttaatttagaatagtaaatatattttgattttgattaatacctgttattaaaataaaagatgttaaatttgtattttgataaaatatattataaatatttactagcaatatataagatatttttataatgcataattttttttataattttaagagattgaaaaaaacttaacacgttaaaaatactaaaaaaattatcttaaatatactaaaacatgataaaaaatacattgatagaccctacgagctatgagagttcagggaagaaatagaatttgtctttatataattatagtttagactttggttgccatctaactacgttgactgccacgtgaaatcaaaagtcaaagtcctgaattcacctactccactcttcaaaaatccaaaacaaagtgtggaaactagtagagatcacctacgtatataggattatcatatctcatataattttttttttttaaaaaatttttttaaaaaaaagaaaacaaaaaaaagaaaacatatctcatagttttgagaacgtatcgttatatatatatatatataaaaaaaaagaaaaagacaggactataccttagaaagaaatttctgtctctgctgtcaatgtcgttttaactcatctgcaagttggaccatattatatatgttactacctcaattatgcgtatatatcctcccacaattatattaattatcctcaaattaattatattactacctaattaatcttcaccatcttatatatacatagtgtcaaacttataaacacatatattaagtagctagagaactttatatatatattaattccacttttggttttagggttttaaaacacaagttggtcatttttattgacatatgtacgatacttatacgtatatgtatattacttttaggtatgtgagtgacagcaagtatatatacaccttaccgacattgca

SEQ ID NO: 24016 - DNA, 2301 bp, Cannabis sativa
tttttttttttttttttaccctttctcccaatactatggtcacccaccttaaccaaactttgtgaagtagaaaattttagtaaatttctagataggtttctagaaataaagaatcaaatgaatacttggagttttcctaaaatattatcatcatagttgctttgtagtttataagaatatgttgagctagtcaagtagaaaaaacttaggtaatattatacctccttgaatattgaaaaattaaacacatgaaaatagtcagtgtaataaagtgaagtcttttcttaagtgactaaggatataagtcaaaataatagctcactagtagactagcaaaattaataacaatcatctcaagaacaacatagtacaaaaaaaaataaaaatacaaaggactttgttgatcgaacaagacagtttaaaggtttcaatataaggagcataaatgatatattttgaagagcttacttaaaagcttatataagaattatccaaaaatttcatcatgaatgatcgatacaagaagaatgtctaaacatgtgtctcgcatatgtcgtctcatcctcgtacaacgtgagacacataacaaatacatcatctctatgaagtaaccgtttcagataaggataattagaagttttcagtagtaaattaatttatcccacatataataaaaatcaaatgaaacatggagattgttcacgtttcatgaaagattatcaagagaagaacaaataaaataaatatcatccttggatcctaataaatagtggtagaaaccactagacaaggagacaaattttgggagaatacaaagatctttacgatcaatacttgtacgatacttgtactctgtataaacaaaaaacccaaaaataagatagactcgtggactatgaagatttaacttcaaaaccgcgtaaaaacttatttatctattatttacaatcatctttcagtattatttaattgtcaattacggctcatttattagttaacaaaaaatcacgttaacagtttggtactttcattgagagcatttgagaattgaactctgaaaaaatgcatctccctcaattaacgaaactttcatcatcttttgatgatagaaaataattcaaatgatgagccatatattaagaaaggggccatcacgccgtcctgggaaggaacctcaagtgaaaaatcttcaggaagacaaaaatgtttaaaaaggtcctactgaatgagattttgagcgagatgttaatgaagatgaaattccagaaagatggaatcgcagtgcttattatccaaaccgctaagtgccattggtggaattagaaaactgccaactttgtgaaagattggcaaagactaaccggagaaacacagaattagaatgcaaagtggctgtaacgagagcagcacatgaagacgcacctcctactcaaattggccagcccgcgaggcgtgctcgagaactatgataatcagaataacccaaccgattcccaggaatgacaaccagggaacatgagcaagattccaattgatagggaggggccccaaaaccctaagaatcctgatataagggaggcgcaacctgagaatgtagaaccttcttaaagaagtaaaaggccacaaccgaaacaacctcatcgtcaaactaggctactgcaagatccccaaagggatggcaccaaacacctgtcttatttatttgaaagacgatgcctaaggcacgatgctcatccttgaagggctagttcaaacagttgccgaaagtgaaacgaggagaagtcatactcaaagttgctcttcacggagtaaaacccatgatgacatggatccacagagaaaataattttaacaattattagtctaagagaagctcaccttcaaggtctgtaagtaattaccatataagaaggagacaaccttggagaaatcataacagttctgaccttcgagaacggttgaatcaaagatagcctaaccaccaagggcatctgaattttaatactccggacctccgtgagcaattatataaaaactcacgtaagcaacgcagaccaacgaatgcgagaactttagatgatccaatatatattcggatcatattaactagaagaatagttcaagagatatcaagagggtagatatggaaaactgattgaagaagactccaacgaggagccagaaccttttcacccagacattctaaactcctacttctgtaatgaccgctttagtaatttggattagaaaaggcaattagcactaatttctgttattttatgattatttataaaattaatt

SEQ ID NO: 24017 - DNA, 4181 bp, Cannabis sativa
  modified_base (33)..(74): a, c, t, g, unknown or other
tgaaccattcaacataaaatgttatttctgatnnnnnnnnnnnnnnnnnnnnnnnnnnnnnnnnnnnnnnnnnntttagggcacaaaaacccaacattgccttactcaacctctcatggtctttgaaggctgtgttggaggaccgagtaattctttagaggctttttgcttcttttcatgggttgcttctgaagtttcttggtgggtggctatctttatatatatagaaaaaagagtaaagttagcaatgtcattaatgaataaacacaataagttaagtaaacaaattgaaacataccaaatatttaacaggtgtaagatagtctttcgaccattttacataagattttatagcaagacctactttgtcaatgaatcatcgactatgggacatgggagcagtgcattctccacattggcttctttgataaattcccgacaataatctttgtgtaggtattcatccatgttattggataaatttccctctttcaaatatttctccttgacaatgttgcccgaagtaaccttcagtaccatcccactaggctccaagagacagtgcatccaacacggtaaagtctgtaaatccaaaacaaacaagcaacaattcaatttgtaagttgaccatatttataattttgcattatattaattcgtaaaataacattaagattacctcttctgaactaccactagtaggtggcggtgctgctgctggagaaatttcctctctaaaatgcagtggtgatggactagagacattggcagcacccgactgttgtgctacatgatttggtgcagagtagacattggcagcacccgacggttgtgctatgggatctggtgcagagtagacattggcaggacccagtggttgtgctactggatcaaaggcaaggtcaatatggggttgttcatttgatactcctccaacactggaaccagacgcaacgcagctacgttgggaactaataagaagaatgagctcatccactttatgctgcagctttttctgttgctttcctctgtcccacgcacgcatctttccaaatcagatgatgcctggttctacccatcagcattttttcttttacggcataatgtgttaaaatattttgtttgggtgacactgaaacccatggctcgaacccgtccaccatgctgatttgtcccgagcgccattgtcagcacatcccttttaccttccacttatacaataccctcttccacttgcttatgtaatttttcttatgaaaaaaacaaattgagttacaaataaattatgaagcataaaaattaatacaaatgaaattaaactttaaacttgcaatccgtttaacgatttctgcagctgggccctccaacttgcctttcgtgttcacatgaagtcttttccagatttcagatttatcaaatttagtaatttggtggtctgcctctttctccatttgttcttggaccatccttacaccacctcatccggtgcgatggttgtaaatattacaagccctactcctttgggccttcttcctcttcacctcaaattctagatttaatctcgatgccacaaactctctccattgttgcaaatcaattattttttcataaagtttaggtggtgtcttgagaagatggggagccacatctttgaatgtaaaaataccttctataaaggtatttttccaatctttcacctatctccaccttttgaaaattttaattttttatttgtgtctggtacatcaaacgcaacctgtcccattaacaatcataattataagtaaagattataatcaatagtaaagaactcgaataatataattaattttacatttatgtaatcccataatttatttttaaggtcctgactcactctaggccatgaaatatctcgaagtggaatattagcttgcacccatgctctaatttggctaacttttgtcattgctccctttccccagttttgtccgtagttgttgtactcaacctccaaattttttcccccgctaacaatttttgttatatcgttttgtttgcttctctcgagagtattttttgtgttggttgttcaggatcaccactaccttcttcctccatggatgattgttcatgatcaacactaggtccttctggcacggatggaccatcatcaccatcatattctagccaagcactccactcatcatccccacctagttccatgatataaaatcctacacaaatttaaaatcatacattagaatatacaaaaatatgcaaattaatagctaaatgtaaatatatcaaaagagactaaataccaatacgtgtttgatatgactcatggattgatagattcgttctaccataatccttcaccatcatcatgagatgatatgatatcatccctaacggtgacatcaacaggtggggggctatttgatgaaattggtcactaagcatgaaatcattgccattagactctcaattatcataatcttttagttgcattgtcaagacaattgactagcgtgcatctaatggattgctcaagtaaaacactttactagcttaggacaccattataaacgtattgaacttgtgtccgattcgattcaagtccaccaacttgaatctgaattttttgaccccattatcactcctaatctaatcacaaagaaaaataaggattcaaaaactactgtattctaatccccaaatttctttaattacaccgtaaaaagacatgtcacattcaataggatttttatcttttgaactatttggaaagtcttagcaacaatcatatcaccgctattttgtgtttttctagatttatcacgggcttgggtgtgaaattgagtactatttatatagtacgatgggtacttgagtacatcacacgaaggacctcgtgatatggaaagtagtgtcgtggatacattacctagagattcacacattttgacatacacctatgaacatacaagttgattagtgagccaaggtaaatcaacatatgatgcacaacaaaaccgtaatgttagtagtaccttatttttttaaccatggactaaaattttgataatgttcatcttgtaaccttttttgatttcgtgttgttataccaataattcggctgtcgcctcaatgaaggacacgtgtcaggacgaagggaatgtgaattgatgtcattgcttttatggaataactcattaattatataagaatcaaagtatatttgtaacctgttgactgtaagctattagggaaggaatcaatgtacaaactggcacttaatatattagcgagaaaccatatgcaactaaatgcgaataccgaggcaccgaagaatgagacatgtatcaatcgtgaaagtccttagcgtgcaatgaacaaactaagtgtaaaaataggattggctcaaagaacaagtaagcgaggtgaccatctcactatgggaagacttcctatagcttcatccaactaacgggagtgaggcttacaaccttggggagtcagaagaattctttgtaaataaccgcgaaagacacaagacatcatcgtcgacctcggaagaaagaatagccccaactcgctattgggatcactataatcaagtttctgtcgagacatctccagattcaacaattaaagatgtgtttaatacacgatagttttgacccagtaaaagtgggaaaattagctactattaaagcttctcgtccaagttcttcccaatgtttacacattttgtggaatttcttgggtcgagaataacctcttcaaatcttcgattggttttagcaggtttcggtcatcttgaactcggggatcaagatcttcgtcttccttctcgttttcttctgccaggaccgtcatcaactgatgaccggcctttctatgttgcaactctatgcaatagcaatcgcaagccagcatctggtcaccacgcaccactcccacgccatctggcatttggaatttcaaggatagctgctggattgaactgattgcccctagtctgattagtgctggacgaccaacaatatggtgtaagtcaagggcaagtcaatgactaagaagtcttggataacaatagcagataaaggtggcttgcctaaagttaatgcgagctcgattatgccaaggctagagatgctgtctctggtgaatctgcaaaggttcaccatacaagg

SEQ ID NO: 24018 - DNA, 3079 bp, Cannabis sativa
agacttgcttgaaatcttgaaagaatttacaattgagatggagcattactattgtttccaaatattgtctctgtcatcctcatcaaatacaacatccttctttgaaagattgcctcgggttatgatctttgaactcgaagaagagagtgaactcaattcagtggattgattttcaacaggagtcttctctttttctaagttagattcaatttttatggacttgtttttgcaagttgactttccttgtagacttacagggtaatcctcctgattattagaatttcaaaataggtccatcgatcaggcatgttggcttgataccttcagggccaccaacaagaggccacagtgagattaagaacgagaagggttaaaacatgggagaagttacctacagaggatttagtccttgccagaacatagctatgagatacgtgaaatttggatcatacaaatcaaggagcaaagttaagattgttcaaggaaagacctatgatatggaatggggccatcacaaaaatgtcatttgtatctacaaaatactacaagccaacctgatttataagtgtggcatatatcaataccagatatattctaattcattcatcatggacaacattttcataaaacttgactgttgcagtgaaatacactcatttcaattgtctatttgctacacattctgaatggaatgaaatgttctttttaaaactttttctattatgttttgtggaatgcttaaaattgtggttttgtaatgccccataaaagcttgaagaagatacaggaataagaggaatgaataagagagatacagataattaagtcttaagtttagtattttcaaaaaaaaaaaaaaaaaagtttagcaaggaataaactttatttgtagaatgactattttatttttaaaatgaagagaaaggctttttcaatataaaatgagaaaacatttaataaatctttttttatttatgtgttttaactttaattctattattattcttatttctattcttattatttttttttttcaattttaccaatcaagcgccacttaattcttatagtatggagaacattcatattcaacaaaccttggtgaaattaggggtgacaattcgtgttgtcgtattatatttgtgttcatgttatgcagattgacatgtttagttgatcaattctaattcgattcatatatattttatgtcaaaaaatctcaactctaatctgacctgttgtgttctcgtgtcgactatatacttatgttacaaacatgattagtatcgcatatttaaatttaataaaaataatttattacaaattattaatacaataaataagattcttaatatcaagtagttatcatcaaaaaaaattcaattatctatcttatattcttgtaagaattttattggtaatttatatatttttctaagaaaataataacaatttaattataatttaataatttttataacatactggatataaacgggttaattcgtgtcgttttcgtattacatgcattaatatcttaattaacccaatccaaataataattgtatcattcaattttgacctaatttcaactaacatgtattttcttgaccctaacctataaaatttgcattcagttcttctaattgatctgctagctagtagctaccctaggtgaaactcagatggcttggctaaggttaaagatttatgacccacgttttattaatggacatgcatacaatgtataatttattattatcaccataaagagcactataaaaatttctagtgggcttattatagtggtggctaagctaaggttgaagtccatatacttgtgagttgaagtaccctcatcttgtctaattcaaaattttaatttcaactgcttaaaattaaccattcaacaaaatccaaataatatagttgtagaggaaactgaaccaactaaattgaccggtacaaatcttggcccgatctcttgggagttacaagaattattcaaattatgacaagactgaagaagtctcgtttggtcaaacgtcaaaccaataactttctctttcagccaacatcataccattaaataatttgtggcaaaatttcaactaaaccattttgtcacaaacatacactcagtaaaaaccaaataaaaaaaacattatttttatttatataaatataaatatagatacgttaacgcagccataagctaaaaataatataattatcttattatcttatatataataaagagcaagagaattatgaccttttaatactaagccccctcaagtcaaagtaattgacaaactaacccctcgactcaactaattctagtaaacctctaaaatcaaattaatatgttgtacgaaaattagtaagttgtatatttttttcctttttggtaaaatagcaaatttggtgattgaaataacacgttatagtttttgagttaaaacctctagcatatttatttgaaaaagtcagtataattaataaataagttgaaattcaaatttataccattagaattttatcagagatttgattaaattatttttattttcaaaatgtgggaatattactctataattatattgttatatgaaatgatctttatatgcaatgtaaacatttcttttttcctgttattattatataatgattatgacaaatttaagattttagttgagaggaatgtaactttttttttgtgagggaggagagcgtattttttttacatataaattaaatattaaaaattgatacaaacttatatttttataatattaaatataatttaaagattaaaaaataacaataaaaatgttgacttcaagaaataaacaataaattttaaaaaaattaaaaatatttttgttagaatttgaatcattcacataatctatgtgtaaaatagctcaattattactctaaaactactattatatatatacgttgtaattaattaactaaaatataagggaaatttgattttttatgcttacatttggttaaaatttttattctaaacaaataataactaatatttgtaaaatatgacaatttttat

SEQ ID NO: 24019 - DNA, 5042 bp, Cannabis sativa
tactcaaaatagtcctttgtcttcacccatatctactcaactttgtgaacctaaaacaaacgataagggttttctatggctgttacttccactaaatcatctggcattaacatttaatagctcctccgttaacacatatattttcattttgtgaagaaaactaaggaaaagtgcaggaagtatgataagatggggatgaacccgaaatttactagaatttaaaaaagcagtttgcttcatcctaaatacatttttaatctacaattctcatctgtacaatcctctaaacttgaacagcaccaatcaggaggcaaacccttatgtaagtttcagaaaatagaaactaaaaaacgaggaaaaacactgacttgaggacatgctaaatggactcatcagcaacaattgccatatttgcagcaagaacttcttgctttgcagaatcattcattgggccaggaaaattgctgggtcatttgctgccgaagaagttttcaaatagacactgcttttgttctgtttgacacattttgggccaatgaggttgaaagtgtggaaaataagagattacacttggtacccaaaatagtattaagctttctggaatgagcgggaagaaaccccgtgtaaaagtctgacaaaaccaagaaagctaagcttcccatccgaatgtttaatccagtcttggagaactacgtgaacgggtactgatggactaagtccaagttcctgataggaagaaagaacagaagaaacagattataaatagaaatcagtaccaaagatctacttctggtaagaaaaaattcttgttaattataagattcaaaatggatgtttaattctgtgttttgacatttttgatgagaaattgatagaagttagaatgaggtattcaagaaagctaagcatttattaaccaaaatgtctttaattctgtcaactctatattctaatattgttcttttttttgtacaagagtgaggggagactttgacacataccgatgcgagttcttcaatcataattggtctgtttccatctttctcaaatagttcataggctcgccttgcatgttgctcccacgtttccattccttccagctgatgtacacttatggaagcagcacagaactcttcaaaatctaattttctatattgaatggagctaatctgtacaatatgtaatatatgatcagctaaatgttgaaaatctctacttgtctgggaatatcaagaaaaataacgatgagttacgacgaacaaaaacatgatcatatgtcaatattaccatgtgaatgtaatctgtggaccgtgaatccttcatggcatcagtggagcactttagtaaaccctggcaaatttctgatgttaatatgaatggatatagataatatcagaaacacagatgcaagcaagtctaaagcttactgtcttaaagttctgcatagagatgaatccacttttgtttggccctaaaagcataaattggtccctcaaataagctgtatgagatactgacaatgtctttgaaagagcctgtcacatatcaaggaggcaaaagaataaatgattacttcatatatctattgttttgttaaaatatagtttactgttcaggcaaaccatatgaaaagcaaagttagatcttattattagaaagatttactatatttgtcgcagttaacagtatttaataattcaaggcagagttatttctattctgcacaaataagttaaatcatttctattaagtctgctcaagctagtgtataggatttggaccattcaaactggagcaacttttcacaataagtgacaagataaggggaaaaagaaaagaacaaagaagcaaaataactaggtaaaatatctttcccaagcaaattaaggactatgcctttgggggaattcagagagtttgggtgtggtggcctcatcactatcaagataaagtcttctggggaagaaatagattacaggagccaattcaagtataaggaagaagatctagaacatagctatattatttatacgttggaaccttcagcttgaaaggtatagtcaatttttcaagggcattgagaaatggaattgatgcgattgtggaaaaaagttaaattgcggtagcttattagtcctaagacttaaaatgacttttcattttctaatttactaatggaatatctggctgcgagttgggtcgatatcctaaaatcatttttaattttctagcacacacaatattattttgtctttataaatcatatattactcacccctaatgctgatttccgcagagaagaagagcatatataagcttttaccatcttcaaaactatcatgtctgttggcacctttagatcttgacaatcagctaaccatggatgacctaaacaaagatattagttgtcaaattcaaggtcactaaaatttctttaagcatccaatttcaactacaaccaagtacatcacccattctaactgatatgacaaaaagagaaatcatcagcattccctatttcttgattcattggatttcttttcaattttcttgatcagcattaaccatggatgaacacaaagcagtaattaattgaaaaagctagttgcatacccatagcttaagtaacaagaatccacaatgatgggtgaaatcaggactctattatgtttagatcacttcagtgacttacttagagcttgagcagccgttagcctcttccggtaatccttgttcaacaatctctttacaaaatctcttgcatcagaagacaatgtcggccatggggcttcatcaaagctgggatctgccttaaggacagttcggaagatgccagattcagtccgggcccaaaagggtcgacttccacataaaagaatgtaggcaattacaccaatactccacatgtctgcttctgtcccgtatgacctatgtagaacttcaggagctacataatatgcgcttccaacaatatcgtttaatctctcatctgcaacatattttattgtcaggcccaatctattcaaaattaatcaaaaggatatatatctgaggcaatgccctcacctggctttacatagtcagagagtccaaaatcaattgccttcaacgtggaattctcgtcctttgttacaaaaagaaaattctaaagcagaaaacaagtaaatcaacataagaaaaagggagaagactgtaagacaactggattatgcaatcatatactgaaataagtacattagacattaatcagtattacgtgcactttccagataacatagcatttcaggtagggaaatatatttgctccaaaagaaacaagaaatcacacacaagaaagcagaatctatatctgtagattataaatctcttcctcccatcttctaaaaggaaaaatacctctggcttgaggtcccgatgaacaacaccttgaagatgacagaaagcaacaacacttaaaatctgcaccataactgcctttgcatcttcttcggaatactttccacccctaagaacgtagcaaaaaataaaattactgagatagagaaggccagtaacaaatggtaaaaggagtgtgtatgtcttatttaaaggaagaaaaaaaaaaaggccttcataagaaaactaaccttgagagtattcgatccagcagttcacctcctttacacagcctgaaaaacatagcaagtggcataataagtttatcatgttaaactaagagcatcaaagaacttcggcaagacacgtattaaatacccatcaatgagtaaaatttacaaaaccttgggggaaaaaatccagcagaatgttaaaataaaagaaaaaaggatttccatatctggtactcgatacaagaccattccactattccagtacatatgtttatcttagaaggtttcgaaaggataagattactcagcctgctagtctatatttcaaaaacatttctacatatataactgagagatactggctccataattgagcaagaggctagcatggattccatgaagataacttgacaactctaaaactagttttcacatgaacaaatgaaaaattatcttattttgagctcatttatctatggtgcatttcttgtggggaaaattgaacacattagattgtaatgttataaaatgaatatttaaaagaagaaagaaaacagtggacatactccatcactacataaacattttcatcatcttcgtaggaatcgtagaattgcactaagttcttatgtcccgacagagcacgaagtatcttcacttctctccttacatcctctatggcaattgctgtcgtcatctgcaaaaatcatttctcatgagaacagaacaaagcacttccaatgaatttccggcccatggtcaaatggaaagttaaacaaaatattgctaatttaacttttaactctcatacttgaatttctgtgacttggaggagaataagtgttctagttataaagacccttgaaaggatgatattagcaatgtatagatgattactatgaaatttgtctgttttaaagttaggaggcaatgaaacggccattactatattaaacaaaatcaacgaacacccaccaattttgatccaacatacatttacagattttttttattatttttttttttttatgaaattaaacttatataacatgataatcatggtgatcatgcatatgctggagcaaatataatcataaattaacactaatctttccttagagctctacaacatgatatgcaaactacacaattaagtagaccaagtcaattcagagtctacaatacaaaactactaggaaaatgcagcaagtattatttttaaaatttaaggatattaatgtcaaattttctttactcaatcctaatcaaacttccataagaactacaaataacatgcaaataaccaaaacaactccattcacaaaagaaaagtaataaaaaaagaaacataccttcgattttggaataactttaacagccacatcttggcccttcatactccctttctttgcttgagctgagcaagtataccca

SEQ ID NO: 24020 - DNA, 3459 bp, Cannabis sativa
  modified_base (2983)..(3014): a, c, t, g, unknown or other
  modified_base (3115)..(3122): a, c, t, g, unknown or other
tttttcatcaaaggcaaatattattttgattagaaggttaacctttgatgatcatgatgagtagtacgttgtagttatatcataataagtttcaatgaaaatattattacaacatgtttgaaccttttgcttttattatttaatcttgattagtttgtgcttaattaataattaataattgttttagtcaaattaaaagggttaggtacgaatcttttatatataattttgcgttattaaatttttatctaatgtttgtgttcgcatgcatttgctaattttatcatttttttaggaaaaattttgttaacataactagcattggtatcttttatataaggcgttgcaattaattaacgattttttatataatgtattaaataaattgtgtgagacccaataaaaatttataccaattgtaatatctatgtcacaatattatatcttgtggttttatggtaccctttaagaaaaagatataatactataaacaagaaattgcaaataatggagtaatcagtattttaaaactgggttataattgtatattctcatgtttagtaaagactaaagatcacttctctgttagtcacatattgccattggacaatttaacagaagtcccatttttcatcactttaaatagtttgagaattttgctctattgtttggtgtactatttttattattaacaaataatagcaattgatattgtattgttttatgctaattaaaagagactcgatatgatcctccctttttttcttttcattaatgacatttttcaaaagtaaaactcagcaacaaaataaataccacatcacacaagcactaatgagatattagaaacaacattaggtgacattctccaataattatattaagtactagtaatacttttttaaataaaaaattatatgataaatttttctataatatgaatttattttgccgaatactatacaaaaataaaagtatactaaaatagttatttaaacaattaatttgaaatatatacatcaaaattttaaatttaatatacatttacaattaaattatcactaaataatattttaaaaaaattaccactaaataaaatataaccttaaactaagagcaatttattttctagatattattatacaagagctcatttacttaactgcaaaacagtaatttgtcgaattaaaaaaaaaaaaaaacagtaattagtcattttcgtctacctttggcgatttgaacgaagaccataatctattagaaaaactcgccgtgaaattccaccgctccgacttcctacccaaccgcccacctctgctattttctctaggcagcaccaataagctcctgctccgttccaattgccgctcaattatctccttcctcaccctcgccggtaatctcagagtaaaccgctccgtgttctcgcccggttgtaacaacgatacagaccgctgaaataatcttctagatccacgtgtacggctacgatttaaactcttcctcaattgtgaaacttctaattccgtactactacttccagccacggccactactctttcttgaatctcgggttgttccacggcgtcgttttgggcctcaatatctatctcgggtcggtgtacggactcatcgggtccgggtacgagattagcccgacaaacggggcaagtagtatgcgactggaaccacatatcaatacagtccacgtggaaaacgtgatcacacttgggaattaaacgcagcgtttcatcgttttcgaattcgcacaaacacacggcgcattccaacgctcctttgccgatcttgagcccctttaccgtcgaatactcaagcgtagggaaagcagtgtggagcagcgccgcatcgagtccttgcccattattcccggtagatcttccgatattcctgatggggttggggccttgttgttggtgatcatcatgggtattggagcagtgtataatgaagaaggaaaataatgatatgaagatgaccacagtgaggatgactccaatgatgactcctaccgatgtatggagcccctgaatcgcattggggtcattttgggaatttccccgtggctgagctccaacgaagggtaataaaaaccaggcaaagagaaaagcaataattgaatatctcatagtataatggttggagatataaaataaaatttgaataaaagaagtggcttataataatggtaatcgaaaacaagatggagataagagagaatagtcgtagatggtgtgccatgaccaaggccatacgttttgagtccttttagtcttaatagtcaataatagaaactagtatagtaataaggagacaagttgatataataagaatattttaatcctaaatatatataaaataaaatattcatttgtgcaacaatgtttgaatcttattttcgggatgttaaagttttttgaattttttaaaattttttaaaatgtcttaaataattataaccttacatgagaaaaaatttaactaaaaaattatttcggataccaaaacaaataaagatacatcggtgattctctttcaaagagatgcattgtaaaatttttctataacttattaggtgcaaatatagtttctctttccaaaaatatttctttgagcatcttcaatagagtgctaaaaaatgtgtaagtaatgtattttagtacaattaaggaaaactaactcaaatggtattctcaacattgtgttaaattttacacatgttgaaaattgtactaaatttagcacaagatatattatgtcaaatttagttcacaataaatactattttttattattataattcatttgacttttactaaatttatattttttatttaccaaattactattatttaaataataaaggctaaataccatctcggatactatgttttgcaaaatttactaattggaccctctgttttcttaaacaacaaaataaaccctgtattttttaaaatagtannnnnnnnnnnnnnnnnnnnnnnnnnnnnnnnataaaatttaataataatctaatctaagtgtgttatgacaaaactgtttacattttctgtatctatttgggttagaattatcaaaaattaagctcagggtnnnnnnnntaccattttagaaaatatatggttcattttgtcatttaacaaaatagatggtccaattattaatttttgtaaaatatagggtctaaaatagtatttacccaataataaaagaataaaatataataattttttttttttgtatatttccaataaaatattaaatgacatcaatataattaattattctttttattttacatcttgtgtatttgagtataattataaatgagattatttcacaaatacagaaaaacaacaaaaaaaaaaaaaagaaaaaatacaaaaatacggttggacaaaattttaaatatttttatgatttttataattttattta

SEQ ID NO: 24021 - DNA, 1777 bp, Cannabis sativa
cattaacaaatatttattagtatatagtatatatgtggtttaaatcttatactgaaattattaaggaaaaacttatgtaaattatatctttgatatacactgcatattcgtatataattatcttgatattttgaatatgatcaaacgtaggtacgtaccaaaatgtcaagcttcccgaagtgggatttgatgtaatctgccaaagaagcaatggtgtcagggtcaacgacatcaagcctgtgaaaaacgacattgtcttcactagtgaaatttgattctttgatcagtttctcaacagcttcaacacccctcttttcatctctggcagttaacacgaccttgatgccatttgaagctaattgtctgcatatttcaaacccgatccccttgtttccacctgtaacaacagcatatctgaacaccaaaagtcaacatattttagataaataattttaatgaaatattcaaaaaagtacttgtgaatatcaattatagttacctctttgttgagagaaatgaagaggagtactcttgttccattaattagaatgatgaaaatactatataattaaattgggaagtgattatggtgtccaaaaatacacctctttttttttttccttccctcaacttgaatctatatcttctctcactgttcttggttatattaatatgaatttggcttgattgaacttttttttttttgtatgattggtcaaattatgtatttacctaacagtgtaatatttaataacaaaaaatgtaataaaataattaaatagcaatgcattattactggcttgatatataatattatgtccctgtccagcaaagcatatgctaattatgataacatgcatgataccttaatttagttttattggtagaggttaatcataatacgctataaaatatatattattttattgtagactaaatttcaggctttgatttgctttattttattgagataattgcttaaagttgaatgattatttttctttgttttacatttttagagtcttcaataaaaacaataaaaaaaaagcataaaataacagataaatagctgaacctttgtattattattcatcaggattaattgaacttgatgaaaggaaaaatagtcttatttgcatatcgtttaacaaaactcaaaatagcactgtttaaagaaaacctaaaatttaaacttaatttttgagcattaatatgatgtaccacggtgcttaacactaccataaaatgtcactttataattggttagcgattttctataatatttattaaaagtaaagagaattttgaatatctatgcattaattgagggataatttttccctaattgaatacatatgaaaattgaaaatatgtgacaattttatctaaaactcaatattatccctctcataactcaacctcatctctctctcttccccatctctctcttcgtctatctctctctcaaccgaccaaaccacacctcatcgccgcccaaaaccacaacccccaatccccctcactgctgcccaaagcgccgacccctcaccatctctctctctttcccatctctctcttcgtctatctctctctctctcaaccaattgaaccacaacccccaatccccctcaccaccgcccaaagccccgacccctcaccaccgcccaaaacgccggcccctcaccaccgtcgacaacatcgtaaacacacaccgacacacaaagaccaccggagatgaagaaggtctgatgccgcgcacaaagattttttttttttt

SEQ ID NO: 24022 - DNA, 2522 bp, Cannabis sativa
tatttttataaatttatttaatttcaaaataaattttaaaatgataataatattaagtgtaccaatataaacataccacgtgtacagaagtatacacataatcggtccatggtgacagtgaaccggatgagatcttaaatttgctaacagtttagtaatttggaaaattttactgtcaaaatttaaacttgaaggatcaaatacaaataaataataagttaaagagttgaatcacaaaaaaactcataaataaatactttaaaattttgaaagactcatgtgctagtgatattctatattctatatttggaaaaaaaaaatatacaatgataattctaatatcaattgattatatagtattatgccattttttcatataaggaaagaaaaggaaaccactaaaaaagtacatgtatttaagtacatatttatcaattgaaataacctcaattcaaaattgttaaactaaatcaaattcttgtttgttaatgttaagagattcatttgatggtatggacaacatatgattagattagattttttttttcttttcatttgggttacttatttttgtttgatattgaaaggtcatatagtcctatttgggcaattttgtattgtacaagtcaagtagtagtccccatttgggtgtagatgtccttattaatagaattggattttagggttattgaatggcaaattagatgataaaaatagattgttgtgtatagtgcaatggtcccctaaaggggttttttttttgttgtgatgataccatgacgacgacgtttaggaccaaagtgactcaagaagaaattcttccaatatggtaatcctaatatagataacactttatctgagtgagacaaaatatgaaaggcaaaaaaaaatctttttgttaaggttcacaggtggaaaaagagctttaagaatcaagaccatttatcccaaatgatcaaatttcattgtgatttagtttatttttgagataatttataaatacaaaaaaaaaaaaaaaagaattactttatatattattttttaatatgtttttttttttcaaatttacagtttgaattttttctgtagatttttgttgcgatttaaattattttagttgttgtgagttgttatgtgaattttcataaaatataaattattttaaaatgtaaaaataaaaaaatctcaaaaaaataattttaaatatttttacgtcttttatacgtcattgatttttttatctttgtatattatattttatgttattttttcattactattttttattgtatttttataaaacaccataaaaaattataaataaaaataaaattaaacgtagaaatgtttccctttatttaattttctcttataaattcatcattagacttccataaccctaattacctagtaatcatcattaatatcattttactgttcaaccagacccaaatggctattttatggtgttaaaagtgttgtccttgattacaattcacatgtaattgtgctttgagaatactattctctgaaatataattattacagattcataaagacaaatccaacagcatatagaatagataagaaagacccaaatggtgcccagaaatccaaatggtctttacccctttttgtacatgtgctccatttattaaaagagctcttaaagaacctcactttaaaccattcccaagtcaattaattacaaaggcatagtggtaagaaagagaaatctaggtgaatcacacttgttaatcatcatacaaaaagaaaaaaaccaagccatcaaaaatcccttttggacaaactaccaataatcttagtcattaatacaaaatataaagtggataaaaagatcataataccatccctttatcaccttatctctctacaactcaaagctgctgcaacttctaagcataagttaatgactccaattctaagaaaagccttttaagtcatttgtgtacattaacataatgtgaaattagagttccttccaatacaagcaatcatatgagacaatgttattttacaaagaagttcttttttttttttttggttttttttttgggtcaacttttaccttgactccacatacctctcaagaggtgaattcaccttcacaatctttagtcagtttcaaagctactctgcatgaaatacaagaggtgtaatgtcattatggattgattcttcatgagccataatgatgagattgacatgcttggttcatcggctcaaccaaaatgacaacatttgtcctcaagagcccatttcttttatacgcacaccacaacattaatggaaacgaaagaatatggtgaagacataggcttgtacctcaagaaatttcataacgaaaataatagacccctcccaactctaaacgacaagcatctgaagaaaacgaaaatatgtattggatgcctcattttcagcctgctaccttaattgcaccgacttcatcaatttttgagctcttatgctgtgcaagagtcaacagagactagttagga

SEQ ID NO: 24023 - DNA, 3041 bp, Cannabis sativa
  modified_base (2687)..(2696): a, c, t, g, unknown or other
  modified_base (2830)..(2835): a, c, t, g, unknown or other
aaatattgtgattaattacaataattttcccaacaattgtaattattactttgaggttagtgtttgtatttctagctatgttatggtgctagtatgaccactatagtttgttgttgtaaaatcagtatggtaagttttcgtttggtgtgatcactatggtcaatagttgtcatacaaataacttatattatatgtttggtttaaggaataaatcaaatacacaacaagttttaatttttacatgattaaacttttttttcttggaagatatatataattttttttttctgcaaaatatttgatactgatgtttttctttatttttttattattatttttagatatctttttgttggaatggaaagttaaagatttttcttttctaataataaaattttattattataatttaaagattactctttcttatcttatctcagtcgtaatttttttttttaaaagaaaggatgtatcacattaaatcaaatcagctgttacaggagcactaataaatctaggacaaacatctgtccactaataaatgagctgatacaggatgtatctcagttgtaattttatctattaacttttattagttatcagagtatatctaataattttatttgtaagaaaaaaaaaagagtagttattttgagttattttatacttttagaacgtttatcttaatattaaaaataaaatgtacaaggtaacatgatagaattctaattttgaaattgagtaataattgagaatttttaaaagtaccattcttttatattttacttacaattttacaacttaaaatttttaattataaaaatatatttataaagttaaaattacaaaaatacactttgtttagcaaaaaataaaagaaaaataattaaaaataatgagaaatcaacttcacgaaaactataaaaacaaccataaataaactataaaaaacaacaacaaaatgatttattatttttattgaagagatattttttaattttctctcttgatgaaaaatgagaatagaattggctcttaattcttgtaggccactaccattatataacctaacaggttattaattttagtatttctaatttagcccatcaataaattaaaaatatctcttaagatgtctacacatttaacccatgacactttaatacctaatgatccacaattactacaatgatcactttatgtaggtcaaacttcaaatagcaatacaccaatatatatatatatatatgaatttatattcaggattttaatcgaacaatctcccacttgtgttacatatgattttttaaaatgtgtaaccttataaacgcttaaattttgctatcataattataaatttataggtgtttcaaaacaatctcgtctattgattatactaaaataggatcaaagtggctttcgtcacatttaacgtggctaaacccatcaatgatcacatatatcaatataaccaaatgacatagatcaatcatggatacatagtatagaaattacatgcaaatatgatcttatcatgcatattttcaactggtctttcttaattgggatcaatcatttatcagttctttcaaaccttatacttaaacctcaatagaaagaaaacattcagagtactcaaaacttaagtccatactttgtttgtagaattaaactataaatatgtgcatgggcgatcctgaattgaaatgagccataggcaaaaaaaaaaaaaataaataaataaaaaaattggacctttactataaagataaatggtatttctaaaaattattaaaaaatatatgtatattttttaaaaggttttttttttttttatttggcccctaaaataggcgggccctaggcgcgggcctagcccgtcttaatctagggccgaccctaaatatgtgtcagcttgatagaacatctcaaatacaaactcccactaaacgagcacaatcttaaataataacacatccatatatgagcaacaagcttctgaaaagtcttaagtgatatatccttaatgatttggattacacaaaatatgaagtttgtccttattatgttctatagacaccttattactctaaacttcattttaataacaattaactcaaagtcaatgtgcctttgatcttgtatagcttatgttttagtaaaatccaactttattgatttattgtcacaacatatattcttaatagttttcaagaccattcttaatttttgcaaccatatatgacaaaaatctcactattcaaatctttataagatcaaaatcaaattttttaataatctccaaaaatttttgagttctgattagtgaacatgtagtcttttgttctccataaattctttataatccatttggttgcatacgaaaagttccacatagggttactttattatatatctaacattcttaatatgtatgttaagtataaatacatacatgcttaagcatatattaaattccaaatataaatgaagaatcttttatattttttgaattctaaggtaatgacttagacttatcttttttagctacaagcctttttgaattgtaatatcaagtaaagtgtaagtagatttttaaaggggctattttatttttggctaattatgatttttgctacctgaactttgtcatgtaccaaattatgccccctgaactattgagattnnnnnnnnnnaagacttttgtctaatttcattttattttactatttcaatgattgtttatgtactaaaccatgctcccaaaacttcgatatctttctttaaaaaaaaaaaaaaaaacttcgatatctaccaaatcatgcccctnnnnnnttgacatgtactaaattatgcctcctaaactttcatccaggttagaccttttaactaaaattggaaaaaacttcttaaatctaacaatctcaatagttcaggaaccatttttaacaaccttaaaagtttagggggcgtgaatcggtacttgtcaaagttcagggggcaacctacatagaaaccctatagcaattaacggagcaacc

SEQ ID NO: 24024 - DNA, 2315 bp, Cannabis sativa
  modified_base (2118)..(2121): a, c, t, g, unknown or other
aacacccaaattattttgaatgtattaatattgatatttttggaataatattttttacattgcctacttgctgctagacagacaacaattagaattgtgattaatgtattaaaaactttgaaaaaaaaaaaaatctttggtaaaaaaaaagagttattttttttgaaagcaaaagaaacagttacttaaaatacaaacaatgagtgagttggtttggttttgaatttcaaaataacaactatactaaaccaaacaatctttgaactgaattatcaataattctttttgtggttctgcctttgtgtgtgaccttaattcccttccctaattgtaatttagatttgaaaattattttctttttcttattaaatatatatatataaaaaaaaaaacgagattcccatataaagaataacaaccagctcagctgtgtgggttgtgaaatacgttttttactattttgcccttttgtttgtcaaaattacggtcagattcggaatcctcccctgattccggtcaacataataactgccctgcccattctctctctctctctctctctatatatatatacatacacagactagcacatatatatagactccacccttatatacgtggctctatagcacaccatatttcgcgcctcccaaacacaatctctctctcattttctcaggaaattcttcctgaactctgatttttctctcggagcatagtcgctttcgtaagtacccttctctactgtagtttccgattgtatttaatgtagcaatatttgtttaatttaattttcttcattctattttcctataaaatctctaatagtaacaggttcgatgatctttatatatgaccattatatatatatatgtataataagcgtatcatttttttgctctgtatttttgaatcaaacaatttattccttcattttttaatttaaaaataatgcttagattcagatttttttaatcaaatatttctactgaaatgtgcagagagagaaagtaaagatgggagtgggagaaggaggagacgaagggttgaggagaagaggatgttcgtgtacaaaagacgattttctccctgaggaatcgttccagagctggggcaattatgtccgagcactgaaagagactccgacccgtttaattaatcgggtcacgacccgatcattggatagcaccgaactggtcgaaatgaaggctcgaagcgaacacgagatgaagaagacgctcacttggtgggacctcatgtggttcggtatcggagccgtcatcggcgccggaatattcgttctcaccgggctcgaggccaagaccgacgctggccctgccgtcgtcttatcttacgtcgtttctggaatctccgccatgctttctgttttttgttacacggaatttgcggtcgaaattcccgttgcaggtattctcactataaattcaaaaataaataaataaattaaatatttatttttgtattttttaatataaaattagtaacagaattatggtttaattattatatttttattattatttgtgttatttttgttgattttttttcttactggatagagtgaatttttgatcaatctgttttttttattgatatgtgtggaaattatttttgaaataatttgcatggtatcatttatttgacttatttggctcatattaatataataataatatttatatacatttttttctttgttgacttttgattttgattaagatctcaattcctcaatagtcagtttaaaatgtgaactgatctcttacatggatgactactactgcacactacgaaacttaggattaaagtccactattcccgtagtaatggcgtactattggtattattttacttaaaaaaagatattaaaatcttgaatatttaattatatatatatatttccagccatgtgcttaatgattcgccttatctaagtcagataaaataagcacgtatgtgaagtcaacgatgtctgtgtgtttttcatttcttgttattaaatatcaatagtgcctaatattttttaaaaattattatattaaattatataatatctgatttacttaattgtactaataataataataatagtaatannnntaataataataataatatgttaatatatgaaaggatgcttaaacaccattagtttttttaacatttctctttttattttgtacaaaattgacccatctcatggcgccccacccaattaaattcattttggacttttttttttaagtttttgtctaccaaacgtccaaaggactagataacaatttttagtaacg

SEQ ID NO: 24025 - DNA, 3072 bp, Cannabis sativa
aaaattgattccttttcattcgattccatttcattacctccaaccaaacgccaccttaaagttgacaattgatgttgtattgtaaccgaagtagaaggaagattacgatttctggttgatcttcttgttttctctttcaaaattttccttagtggtatatcggattctaattccttgtttgtacttaacattctttttcccagcattatattcattttaagctgaaactatccacattccacaatgttttcatcttagcaataaaatgtttatactttgcatctgtaatttttgttatggatgcattttattaccaaactgttctagcgagaaaaacgatcctggtgtttaagttggccttagaatcaaagtaccaggtaagtacagcttaaatataaatagataaaaagaaatattaagcaagctgtgtattatatttttggttagctgcagttgatactattttttttgtaaaattgtttgaagataacatgttcaattcaagtatagagcaatatcacaaaacacaatgaggttaaaagttatatttacttatggtagttcggaggctttttgtagattttgtagtcaggccgaaataccttttctttttctttctttcaataacagtttgaaattagacctgttttgttatccatttcaaattttaattaagaatgcttttgttatatgaatttgagaagatgcaatgcaaccatgagacatatattaatctaccttgtaatattaatattcttctcactgcaacattgatgctgcattcatgcaaacatttttagtttgtctgtgggtttaacttacactagaataggaagtattggggtcttatgaatgaggaaaatgtgttggagaatttggagactgactctcttcttatatatgagtttgagcaataatgttcctaaatgagaaagatttcattttacatatttttgtgtagattaatgttaaaatgttccagtggtgtctagtaccttcttatgtgttatacttggtgcaattaagtatcgagtcttatataaattgattaaataacttttagaaaatatcacgaatcaattgcaaagtgcttcatctaggtactgcccaatagcaatgttgggctcttgagtagttgacaatcattactatttttgtttccttaaaagtataatcacatgtatctagacatttgtttagatgtcatggagttggagtgccaactgaccctcccattccgagtttagttggactcggactcggactcagactcggaacagatcttgttgtttagttactaaattttatccttactaatgctccactgtttagcctttgtcttgagtacccctcttatttaatctttccccttatgtaaaatttcaagagttagaagttgtctggttgttttccgaatcctcaccgtgatgatttgttgctgtatttctttatgcagttgacttgatgaagccatcttcaactgtcattcttcgcaatgcgaagatagatatgtttaaggggtcgatgaggctagccgttgacaaatggggccgcgtagaggtaaccgagccagctgagttcgaggtgaaggaggataacaatctgtctttggttgagtatgaactggtgaatgttatggaggagtgagtgatctaatttattggtatatgataatgctgttagtattagtatttatctataaatataaatatataaatattatttagtggaatatcttgttttgatttggttgttagtaataatcaaaaccagaaagaaattaagaaagaaaactgattttgttagggatctaacaaggggaattatggaatttgtaaacaagtaattatattattaaagaaaaaggtctctttggtttagttattatctctttcactattttgctattaaaaatggatttaatgttgcaaatgcttgttagtatgtgttgttatatgtaatgctaaaaggaattactcaaaatttaaatttgttggaatatgttttgtatataatatagaaaatttctatactagcccctaaaaacttgttttgatggatttttctatttatttccacattcaaaataataaaaataatcagtttagtttaatttttgtttcttgaattttaatatgtatcaaattatgtgtcttaaaatttaaaagactgtttaaagttctctctgaagtattaagattgttagatttaagtatttttatttaattttagtaagaaaaatttaatatgtatgaaagtttagagcgatgatttgacacatatcaaagtttgagagatataatttggtagatattaaaatttgagaagtatgatttagtatatggatataactgaattagtaaaaatgaatgaaataggacaaaaatctttaaatctaataatattaatagtttatggagaatttttaatggccaaaaaaaaaaattagtgggtatgatttgatataaatcaaagtttagaaataaaaatcttaattaacttttttaaaaaatacaagatcaaatttatcatttaataaaaactaattaggagttttttctcccgaactttcacatgtactaaattatgccccctgaatttttttagccattaaaaattctccctgaactattgaaatgaaattagacaaaaatccttaaatctaacaatctcaataaaagctaattatattaaagtctggggagcatggtttagtacataaacaatcactaaaacaataaaattaaatgaaattagacaaaaatccttaaatctaacaatctcaatagttcaaaaaaatcttaattagcgtttagcattaatcctatatataaataaatattttatcttatcacatatataattatggcataaagagatcaattataataagtgcaaaatcagatatagattaatattattataaattccctaaaaaaaacaataaaatccacacaccaaatatgaccaataataatatacatatatacacaacagtatgtgttatacatatagataaatatataatgtatatacacaataatatacgtactgatcacaatcacagagatt

SEQ ID NO: 24026 - DNA, 5171 bp, Cannabis sativa
  modified_base (877)..(891): a, c, t, g, unknown or other
tttaatagcctgaccatcgattacaatatgttcataacctttgttaacactcatactgaagcatatactattgaagagatcgaagctcctctaatggctcaagaagtgtttctggacaaatcaactaaagaacttgacatcacaaaaagtgaagtaaatttggctcactgcaaatcctcatatggccgaggatctggcccatcatcctctaacccaacttattcccatcagtcatgtggtcctccccctagtttttcctactccacaccaactctaacatctttagtggtccacctacataattatgcttgttttctatattttcaggtttcctatagctgtgaaagtttgggacttcaaaagtacgataaaagaccaacgcgagccacgataattgaaaaaaatagcatttggttcatctttggccgcgaccaaaaattggaagaatggtggaaatttggctagcacagtggccgcggtgagcttacccatggcggaggctagagtggtcctcgccacggcagatttattcatggtcgcggcaagaccctgacagggacatcaacttttatgttcgttatctcgctgtagcgaggcatttcatggctgcaacggggttccgtaaaatttgaggttaattttgtcttttctcgattctttgaagtctaggactaaatctattaaaaattgagtgcgagaaaaagagaaaaggaagcgaattttagacctagaagcagtcaaggaccgtagaaggagcaaaatggcagcccgaattcattccatcatcagtttttttttcttcttttatttcttttatgttaaattttgcttttgtgttattatggatatgaatatgaactaaattcccaatttaggnnnnnnnnnnnnnnnagatgatgtttctttaatttagtttatgtgattattagtttttctccctgattgtgtgatttattcttatttgttttaattacatattttagactggccatcttaaatgtgacttatgatcctaatataaaattcgagaagtgaatattaggaatgctctaataggacaaacataagttgatgtaaaactagagtatttacatagcttatgtgatttgtagattctaattttaatagaagttatatgttaatttactgcaaagatgtgagtagatgatatatgatttaggaccttaaagatctatgatcatatatgatcttatcacatcgataagaagttatgcaataaaaatttaacaatggcttagattgctaaaggaatattattcaaatatttttatcaaaagaatttaatatatattctagaaatataaataagcttcattttttctttagaaaaattagtttgttaaaattatttattgaattttgaataattttggtttgattttttaagaaatgtatttacatataaaagaaaagtttgaaaatattttttaaggaataatttaaagttttcaataatttttataaattttgcagaatttatagaactttataacttttaaaattactttttcaataaagaaaacaaaatttaatgaaagtgacataattatgtaactattatattagagaaaaattttaagaaaccgtatattttaagagacaggatccagtactaatccagtagtacgtgtcgaaaattcaggccaaaaatactcccttaaatagggaacataaatatatatttcaaatatattaccatagagaaatcgatataaagcatcatgatgatgttcactatcattttgatattaattggtgtaatgtgagaaccgatatgaatatttgatgcctagcatccatatggtatacctatgacgtttgtgtgacacatgatattgttaaataaaacttgcaagagatggagcacatctcaaatcaataacaacattttaatttgtcctggaaagaatattgtgtttacatacaattcaactctaatcttgaaaaataaacaaaagaaaaaagtttgactacctcacaatcacattgtatatttctctatctatatatgctgacggtatgtaatatgattttctttctatatgcagttagtacatataataaattaataatctcacaaaatggcatgagcattgcacagaatataatttgatgtaatcaatggtgaggactaaggcataatataaccatttttattaagtttaacaagacaattaaagcggtgagtagtattttcaagtggctcctagagagaaaccacccttaatttattcatttatcaatgttgtatgaattttcaattcatcaaagttgatagtatatactaaagctaaaattaggcaaaatttatatgtaaacaacataaaccttgaattcatttcaccactatatatttacattataagttatatagaacacatcttcacatataatcttatatcgctatcaaaatacaagtggagatcatgcgtgacatcccaagtcaccaaacaaaacatataacctaaatggaaatttctttttcattaattatacattataatattctttatatatttattttgtagttctcacacttgattttttctttttagaaagaaaaaaaaaacttgagactgagaagggtttattatcctatatacgcctggggcgcacgttaacgctgagtggattagccatctcacaagacaactttagaacctcagataggtcaaccccactttgaccatttggcagccattcaaattcgtgcaacagtgatgctacccaaaagcaaactgtggtcaaccccaaggccttaccggggcaggtccttcttcccgacccgaatggggcgagtcttagatccgacccgaatacagagaactctgcctcgtcttcgcctgtcacgaatctctgtggcgtaaactcaagcggatcagcccaaaactcctggtccctggatatggcccacatgttgaccatggtggtggtccccttaggcacgtgatacccatcgatagtggtatcggtgatggataggcgggcccacgacagcagtgggcccggaggatgtagccttagaacttccttcactacagccgttagatacactaatttggacatgtcggattcggcaacagatcttgatctgcccaccaccctgtctagctcatcgtggaccgttgattgaatatcaggatgaatcaccattctcgctaggatccactcgatcagtacggcaacagtatcagtccctctaaatatcatttcctgccaaaattaacgaaaaaaaccaacatattataatatgagcataaaccacgcacgtacagaactatacaaaaacaaactagtgctactattttaattataatgaatctacaattagtttaatcaaacctctctaactaatttttttatccaagtgtgattgtattgtactgatagtacgtataaatatatattttaaataacaaattaacggtaatttgtactcacccagagaacagcgatcatatcagagtcggataacttatcgggtccttgcaaggaaagcaaaacgtccacaaaatctcgggctattgggtcggttcgggagcggtgctccgacacgatttggctgacgaaacggttcactttggggacgagtttggagcatctgaatctgattctctgggcatcaaattcagccaaccaaggaagatgatcggaccaattcaacaaacccaatagatcgtatccttcgtcgacgagttcacgcagttcctgcaactcattgttggccgagtcaagatcgtaaactcttccaaaaacggaacacatcatgttgttaagggaggctcgcttcaacacttcacgtactcgcaagccctgttctccagccttctctttcgacattacccccaccatttgatcggcaattactcgcctctgaaactcggaggacttaatctgtttggggcagaaaagatgggtggcagcgattctcctaagagttcgccagtaaactccgtagggagcgaacccaatcgcacggttgaacatcaagccgtaggcggattccttgatcggacggtcagcgaaaacagggctgttgagtatttccttggccacgtcagggtgacacgtcaccataagaggagtgtccccaagagaaaaggccatgagacgtttggcgttgcatgctgtagccatggcggctaagcggcggtgagccagagaagccataaggcccatgcttccgaagaggggaaggcctcttgggcctggaattgcagctgcaggcttaagctgttttaatgggtttttcatccatttttgcttgccccaggctgggcctcccggatgtgcccaataaactaaggacctagcgagccaggtgaggcccacgatgagaagcaaccatgcaaaggtttcttgggagaaggctctgcatgttttggaggccagggcgaagagccagaggttttcaatgtctgatttcatggcagaaaagagataagatattgaagaagatgaaaagaggtaggaagtggtatgagtttcagagtgagtgagtgttataattacgatggtatttatagcaggggaatgggatagatatttgagagtaataaaaatgaacataaactgacgtggcttctattttagaatggatccccacacgtttgttttattttaaataaaaagatgtatatagtttatcaatttatctcatgttcttttcaacttcttcgtaaagtttctctataattggttttccttgaaaagaacgtgaggaaacaaatcatgaacatatttattttccttacaaaatatggaaaacttatttcttatttatatatatatatacatatatatatatatagaagaaaagttctttttgattgtaagttaattagctactacaaccatgtaaaatatttttaaaaaagaagaacaaaaattaatacctcctaatcttctccctccttaagctttctatctctcactagcttatcaacaaacacgtgggtggataatacatactcccgttgcacactaaagtaaaaactcatgttattaatacaattgaatagatttaatacaatttgatttaataaataatatgatatttgttattttaaggtgtctaataataataataataataataatgttagtatgcactcatgagtgttatcttatatttaattaataatttttta

SEQ ID NO: 24027 - DNA, 1158 bp, Cannabis sativa
tttggaagaaaattgaaagaatgggatagtttttttatgtgtgataattgggtataattaaacacataatctaatgttttagcataatttatcaaatttccctattaaaaactacttctacctttttagcattttttatcacataataatatctattaaaaaaaatgaagttcgtccattcccgaagagattaaatttaatattaatttcttagtaatatattaggctggctggacccattaaactagtaaaataaatatttaaatcatattattactttttcttttttgttttcattattatagaaagaaaaaaaaatgagagggaaatttcgtagattctggaaatccaaaaacaacattcattggaaattacatttacagagtcaaaaaataaaaaaaaataaaaatataaaactaatgctatcaatacacgacggtgacgcaaaatcaacgaccgtccactaacccttgtcggctgtcatgtcggcgtaccaactcgtaacgcatttagtgtacggacaacgagaggtgaccgtaaccgtaacgcagttgaaaaaaattaaagaccaaaacgacgtcgttgcgttgattctaaataaaaaaactctcaatttcccgctaaattttgggagaaggggaaaagtgagatttgggagtagaagtaagggtattttgggaaataggaaaaaaaaaggtgggatgaaaacgtaatggtggagaaggaataaatcaccgccttcgcttcttttcttcaattttttccttttttttttgtttgttttgctctgagcttcaatggttagggtttcttgaacgcccttcttctctttctctttgtatatatatatatatgtgataataattgtaattatatatatattgtttattattatatatgtatattgctaaaatagaagagaatgttgcagataagccttggttttctcggtgaatttctcaatcataacgtacaacgattttctaggtcaaccatggcttgattgtttcgctctctctatcttcactggtaattacttctttccatttttctctctttgtttacttcacttttaacttgcttcgaattaaggttttccctcttactggtttggtttttcatttcagcttattatcttctgtttcgtttagttttttt

SEQ ID NO: 24028 - DNA, 2644 bp, Cannabis sativa
gtgctccaccaaccctcacttagctcaatttctcgattctcgattaaaatgcactagcgttccttgtaagataattttggacatgataacttcagaattgagtcatggctgtgagacacacttgatccgtcttgaaattatgtttcaaatgcaagttgaaccagatcatttggataaaaattgatggagttatgcctattttactaaaggcagtttatgctgtcttataccagttgcgagcactaccatggccaaatgacaaaggttggctatgcttgttctcgaacccctcgggctgtgtttttacttggattttgatggtgagtcatattttggcacacttgggtgtgtgagtcctagcgccaaatggttggttgacattttcgagccctctagaagtttcatagggccctcaagaaggatgccttgatttatttgacatttatgagtcttggtcaaagtcgcaaggctgactatattgtcttcaaggttggcatgtggcccttgtacaagagtatacattttatttttttgcgaaaattgagtataacaaaatttattagcgacgatcttcgaaaaaaagtgttttgaggaccgtcacgaatgtccatttttgcagtagtgaaaagcttaaaaataacaataaaaagaaataccataaaaaatgaccgaacataaaattgccataattaggtaaaaactttttcaaaattcataatgaatgtaaattctattttagttaatgattatatgggctttgacacaattttactaaaaaaaagttagtcaataattaatgaatttataattgatgctataaatcgtatcttcatgtgagacaaatgaaaaaatttatagtgtcgattcattatgtgatagcctgcatgctcatttttattgtggtgaggcgaaggataacacaaaaagcttaattaaacaagatccataatttttgtcctaaatcacaattcttctttcacataaaaactcaaaaaattgtaaagatgttcctaagaatttatcaagtcctcacatatgctcaatagtatctaattttttagaatgtcttcaagattttataaatttcaaaattgtatatggtgtaaaacaaatgatcagcaatatagtaaccacaaaaacatcccgaacaattcttaaaaaaaaaaaaagaagggggcattaattaattcatcataattattgcatgaacatcccgaactgaaatcttgtttagagaaattaaaaaatattaattagtttttttattattattaattaagtaaaatttatcctttttttctcactttacattttggagggaatatctaatacttcagacacaagtcgagcattccaccgaaagttggaacaatgatcatcaattaagataatatttgataaaaaactgtcaccaaaaaaaataaacaaataaataaaacaattaagatatatctatatatatttcctacacatattgacgtcatataattcattcagatgactacatatttttttttttcggaaaaatataaaaaataaagacaatttttttttttttggagtattagaaatttagaaggaaaaagaaaagaaatggggactgaaatagttttctttactttatgggacctaatatacaatggcataataaaacaaaggagagtagtttagttttaaagcatgtggaaaatttccacacgtttttatgaattaatcttaatgattatataattagtgtttatacctgagtcaaaaagagagtagtgttccagtgggctcaattttcatgccattgtcataaaaggaattatatgtaatatatataaatttgttataatcaaaaagaagaaagtgaacaagtttaaatgagagtttctatcgatcgtcttatcgcaaataaatgaagaccaacccacttattagttaaggtaggttgactatgtgggtggaacttcgttggccatccacttggcagtatcaaccatctacatatcttgtgtaagtgtaaccaattgaaatgttgtttgaagagcgactttgttcaaagataaatatccaaaaattgaaggcttaacaatgttcccaagcaaatgaaaaggttccaattggtcccctactttatacatgggtcacatgatgaacaaatttatccttttgcttagagttgcttaataaaagggttttccaagccatacccaataacattagactatatggtatatattatactttaaaattaagtttataaaaatgatattcaatagctacacaataaaattcactagaattgatcaattttgaaatagatagaataatatatgagaaaacttaattgatcaattctgattagtatttgataaaaatattaacctaactttttcattgtataaacatatatatcgaatttcgcacatatattttcattttattggcagtacaaatatacacaaattacacttgcagtggtacaaaaacaaaaaaaattactaataatgtaataaattgcaaaaacaagattagaaatagaagttgaacatcatgatcaagtaatatatacatgtacgaaatgggctttggggtgtttgaaattccaacctcagcttaaagaccccaccaaattaaggtgaggtgatttgtaatttgg

SEQ ID NO: 24029 - DNA, 1192 bp, Cannabis sativa
gtttcttgtctagttaagtttagtgtgtttagtgtgtttagtgtattgataattgaggcgatgataattgattaattgagttgctgatgttatttgtggaatggattgagagttaaaccgtgtgcttgattcattaacactttggattaatttggtttcttacggaaaaaaaaattatcaatgtaaattgtcaatatttggacaatatcatttttgttctacttgggtttacggaatatttacttgaatggaatagaacttgcatgatttattttcttgaggcaaaatccttgataccttttgcttggaacatgattaaggcaattttcttggaccggttgagcctttcaagcctactattatgttttatccttagtttagaatttgaggcttagcttgtttgaaaatttgaaccacttttacgcttattttgttcccattcactacatttattcccaatgcaccttgaatttatgccataagcttagagataaatttggaggggataaattgttatgggtggaattatttagaaagtgggagattgagaaaagattttataatatgaaagtgtttttaacatggctgaaaataaaattactcaaaaaaattgttgttggattctaaattggaatttctcaattttaaaaaaaagaaattatttgggtaaatattgggaaatgtggatttgtatggtacttgtttggttataatgtgcttatggtataatagagcctaaatgacttttcatctaccttttacctaagacatgacattacaacctagaatgatcttttaattccaagcgagggttgttgacaatagtggagagaggtaggtcatgcaagcatattgagcattgggttgtggaaagctggtaagagtagaatgattgtgattttttttcgaatattggcgtgtaatttgcatttatacatggtgtttgaaagaaatcatctgaattaattgttagattttttggattaaaattctggtttaacctatcgattgaagtttcataagtggcaacggtagtttgactatttcgaagctcggttatctcatagtttgtttgtttgtttgcctttacttttagtcttactcgagggagagtagagatggaaatttataccgcgaggatgggtaaccgcggggacccactcctaatggggtggggattccccgtcttggt

SEQ ID NO: 24030 - DNA, 4761 bp, Cannabis sativa
aatttacgacgcagacgtctgccagcagcgctagaacctttttgaactaggatagctcatcgtctaaccgcagaatatatgctttgccaaaccatgggtcgctaaatatccaaagcgagccacataagacaaaactgcccccaaaaatttagacaataaagctataacatcttcaaacaccgctcctagctcattgaaatacacctgaaaaaaagcagaaaaccagaataaaacttttattagaaaattatcaaattgaccagaatctaccaaacaaccccactaaaaaatattagaactagccaaagggattaccctttggctagtagcaactgaattatagcactctacttcataaccttcttaaagtaaccatcccttactaagaccatatcatctaaaataaattttagtatgtaattttgtaaaaagcaatgaacttattaaatcctaccatacatataatgaatttataatttgatccatttctatttatatcaattatagaagttgactgccttgtttgaaaaagatcttccaaaaataaccttggaaaaatctaaactttcttgattgacattaatttccaacaggataaacactattatttgactctattggagttaactacttttttaaataaatattaatatactactagtagtattaagatagatagatgtcaatgaaaaagtaatgtatatacttatatatagctattttttattattatctttcaatacaataaaataaaagttaaacttattaagcttaattgtctatttatttcagtatcttataggataaaacaaaatttccaattcattattaatgtcccctctctcttatggagatagcatcacgccccttcttctaatactggattttttgcttgcaatggttaattctttgcttaaagttgcctgtaaaatctcgcccccacgcttgaagagattccccacagtaagagattttcttcataacatgtcgaccttcacaaaggtcccaactatctttaacaacttggcggcacaacggttcacgaagccatgcattttcaaaatggaattggcaaaatagcaccgtgacagtacgcacagtcggttcaagaagcaacgagcaatgatctaaagtagagacttccagattacaaagttgagccatacgaaacctctggaactaattggagcaaacaagagctcggtcaagacgaatttcaatccatgaatcaatgcctctcccacgctcccaagtgtaaggatacccgattagctccatatcaacaagatcacagtcagacagagcttgattgaatccgtccaccaacaactgtggtatttatttcctcctcttttatcggcatggctagtagtgttgtttaagtctccaatgatacaccaaggaagagaagattccggctttaacgatctcaataagtcccatgttttatgccgaacagctctattaggctctccataaagacccgttaatctccaaggagaagaagcaacttctgaaatctgaatatcaatgtgatgaaaagaatagctaagaagctgcacatcctcgttattatgccaaagcatggccaccccaccaccgtgtcctctcgcatcaacagaatacaaaccatcaaaccccacagcaacccgtagcttttccaacttaccttttcgataaagagtttcacacaaaaatagaaaattgggcctcttttggataataagatccacaagaaattgataaacccatgggttcccaaacccacggcaagtccatctaataatactcataatgggcggtgggcctggatcccaacacccaccaaaggcccattttttagcccaattcttgattaatttttgccacatgaaccttcatattactattatccttatcaattgggtctttacatggcccaatagaatataaatgacccaccaaatattggtccaagacatgttgaccagtcaacaccccatcccttgtacgccgccttttagaatccaacatgatgatagcatcatttggatcgtcaatatcagtatcgtgggcattaatctcattcccactatggtcaacaggaacatgatatcccattttttttccacaacattaggagaattatactgaaaagattttcccccttattcaggactgaattattacgatttcctccaacaacctcctcaattaacggttgctgctgtaacaccaccagagcagtcgcagcaccaccagtgaatcggccggcaaacatatcatctgtctcattaccatcacgcagccactgacagcccaccaagttattttttcttcgtggttgagccctcatccaaacaccataaggcttcactatcttctcggctggtgtatcaaaaagtgttggacaaaatttctcagagtgacctattataccacagataaaacaaaacgtaggaatgtattcatatttgaactctacccagaaaccatcctctattgcagtcctacaaagcttcctacgccttttcaaaggtacagtgatatccaaagtaacccgaactcgcatatagtctctccacacattctgaaaattcttagggttcgccttaacgtacgtaccaataaagttacccaaattttccacaacactatcagatttaaaccctggttggagaccatggatttgcacccatatgtcgagatgattaagcactactctcttcggatcatctccccttaacctctgaaaaaacaaactgaattctattgaatgtccaagggcttccttccaccaccctttctaaattaatttcatggaaaaattgaaatagataactgttggtgtcaatctcattgacataaacctccttacttggctgccacaaagaggccataacatatcgcatagcttcgaagtcagtggctcttccagttaaaaactgacccacaatacatagtacatcattcaaaacttgatcatctggaacaaaaaaagcaatacccagcgccccatcattctctccctcgattgaaataatcgcatattgatcttccacctcccgatacgatgcactactagacgccataacaatctttaaaccgataaccaaaactcaacaaattgaaaggaatactctcaccatgtcaaagacaagactgtacacacacatagagtgttgtttttttgttgttaaaaaaaaaaaagatatttttttagtattgctgttacgaaaaaatattattttttttattattttgttgcacttaaatttaatttattattttttttcaacaatatgtccaaatagtggtggattttttttttcgttattattattatcgaaaaaggtggatcacacacgtacccaagtaagtaaaaatgctcacaacctagtaagtaccttcgcctgcaccaaataatacgtggtggtctgagttgtaaatgttttaaattatgggttcttaccactagaccacatatggttccataaaatttttcatatatagttagtaaaaataaaatatatatatcttacagatattttggaaataaaagtcattacgggtagtgaattattattatgtgtcgttatctatattctctagccaaagtacaactatatgtgccctttttatcaagtgaaattgattggtgttttgatttaatacaattacaaagaatatggaaaccttatcatatatatattagtcgataaaatttaaagcgttaaatccaatttttaaaaataatgaaaactttaataattattttttgtgagggtggatggtgatgtatcatataatatatatttagttgtgatagaagacgtaatcaaatcagccttataataataaaatgtttaccccgcacttccatttcaattacgtttcatttgaaagagtaagtattttaatgctataatatcattaaaaattacttgtattaactttcttaattacatagtgcgcaactcaaatacaccatggatattccccgcatatatatactaattaatatatttatttaaattaattattgcgcgtgtaccactaataattagtaattgcctattaatctacaaatatggtgttcaatgaaacttcaaatattactacctcaatcaatgcatcgtacgtacctcatcataaaatttactccagaaattcaaaccctagttcattaccaaataagctttctttatatgcactagtaaataaaatctattataagatagatatcacttaatcgtaatatatattatattgttatgtattaatataataattatatatatattaatttaaattaaaaaattaatatatgactcggtgttattaataagtgccaaatcacaatatgtttagctaagtaattttagactaaacctgtaaatgaaaccctaaactttttggtaataattaaggtaataatatgtttaaatatgataactatttcatccgacactaattaacaacacctaatggaaagatggatccttcattaattagctaaagtgggggtaggtttggatattaattatatttgaatcaaatatcaaattattcatatatatatatacactccaaaaataataagtagtgtttataattaaccagcatgagtcatccttcactcttcaaaaataataattgtcaatatatataagataaaacaagtaagaaaaattatatataaatgatcacaatttctcatgaatccccctgtttcagttcatcactccatcaagctttattgtaagagagagagagagagag

SEQ ID NO: 24031 - DNA, 3250 bp, Cannabis sativa
  modified_base (1602)..(1602): a, c, t, g, unknown or other
  modified_base (2546)..(2547): a, c, t, g, unknown or other
  modified_base (2733)..(2743): a, c, t, g, unknown or other
  modified_base (3063)..(3070): a, c, t, g, unknown or other
cgatcgccggattcctcgcgcgtgtctcacgcgtcgctcgtttcttctgccacgttccccatgcactaacgcgtggaggcgcgtgtgacggaggtttcgacggcggttcttctccgattcgtttttttggctccccttaagctgacttgcatctgtctcaggttgtagtttggtatttctccatacttcgtatttgggtattctttacttatttttaattagtcgatgctgcgttgtctctttcgaaatttgtttctgagattatggtagagacgaaatcagatccaaaaccactagttgattggttcgaattatttggaatggaataagacaattcgactttatctaaggagtattgacaaagatgatcacttgattgatgatcctcccaaagaaaaagacgattcaatgaaagtatggttacgtgaggatgctcgcttgtttcgtcaaattcgaaattctattgataatgaggtaattagtttgattaatcattgtgaattggttaaagaactagtgcttgattggtttgaaatttgaaaacaattttatgtttttgaaaacttaaaaggtgggggccacataaaaatacttgattggtttagtgttttcaaaaactaaatttgaatatgattttgagttttaagcttaaaaatgaaaacaacaattttatgttttctatgttttcaaatcattgaatctgaaaactcttcaaataccctcttacttttctattttgaggttcccaatcaatcacaaatccaacttttaaaactcaaagacacaaaattacactacaactaatcacatttttggaaacaatttttcacatacaaaattcaaatttttgtttccaaaacactcttttggaaaacccaatttttaaatataataccatatataagatgaatgggctatacctctcattgctcccacacctttgctcactttgccatcagtcttacatttatctaatttgtcctttaatttctttttgtgagtcaacacacttgtaatctaaactgttcaatctcattctttcccgatcattgtttgttttaagatcttatgacgaagaagattattggtaaaggatatgaatctggcagtctgtatgttcttgatccacttccaccagcctctatctattcctctacttaagaaactttatccccagtatagtaaggtgtcttcattacattgtgagtcatgtcagtttgtcaaacatcatcgtattagtttaagtcctcgagtaaattagcgtgctagtgttccttttgagtttacctggattcaaatattttgttacttttgtgaatgattattctcgtgtaacttggttatatttaatgaaaagtaattttgagttgttttctatatttttgtactttttgtgctgagattcaaaatcaatttattgtgtctgttcgtattttgcgaagtgaacgccaaagagtacacatatgttcaatttctatcttacatgacctctaatggcatgcttcttgaaacttcttgtgttgatactgcacctcaaaatggtgtagcagaacgtaaaatcagacatcttcttgaaactgcacgtgccctcttgtttcaaangaaagttcctaaacctttttgggctgaggcagtttccacagcatgctttcttattaatcgcatgccatcctctgtacttaatggtgagatcccatttaaaatatatgttctgggtaagtcattgtttccagttgctccttgggtatttcgtagtgtttgttctgctcgcgatgtccatcgacatgtcaccaaataggccctaaggtactaaaagtgtctttcttgattattctcgtcctcagaaagggtataggtgttattgtcctgatctcaacaaatatcttgtttctattgatgttacctttgtgaaaaatacactttatttttcatcttcacctactcctactcttcagggggaggatgatgatttgttggtgtattctgtcacatcgtctgcgcctgatacatattctgacgagtctcttgttccttcacctgactcggttatagctcccacaatgcctacagctccaccacctccaccaccttcaccactgctaggcctcctcctatagtgtacactaggcatccacctcatccacctcccgtttcatgtcctgcacctgcatctttgtcatcagattcggactcaaagatgattttcccatcacctgcatctcctcttcttcttgctcttttattgcttcttttgattctatcactattcctaaaactgttcgtgaagcaatgtctcattctggttggcttgctgcaatgatagaagagatgaatgctttagttgcaaatggtacttgggacttggttaatttaccttcaggaaaacgggtcatagggtgcaaattggtgtttacggttaaatttaattaagatggaacaattgcttgcttaaagacacgtcttgttgccaatggtctcaaacctttggagtagactattgtgatactttttatcctgttgctaaactcacatctgttcgactgttnntttccatggaagctactcatcattggcctttatatcagcttgatattgacaatgcttttttttttttttttcatggagatcttgaggaagaagtgtatatggagcaacctcttaggtttgttgctcaaggggagttagcgtgagtttttcgtctttacaaatctttatagggtaaatactattttnnnnnnnnnnntttgcaaaagttaccaattggatcttctgttatgttaaatgacaaaatggaccttgtattttctaaaattgtacaaatatgaccctaaactgattttttgtcaaaataaaacttaataataatctaatttggagatgttatgacaaaactggtttcattttctgtattcattcatgttaaaaattgtcataaagttggttatattaaaaaataaaataattgaaaattgagttcagggtcctatttttaccattttggaaaatataaggtacattttgtcatttaacaaaacagagggtctaattggtaacttttgcaannnnnnnngtccaaaatggtatttacccatctttatatggattgaaacaaagtccttgtgtttagtttggtaaatttagtcagtttgttgagaaatttggttcgttgaatagtgagataattttgtgttctataaaaaatcaactgctggtatcattttgttagtggtgtatgttttttttttttttt

SEQ ID NO: 24032 - DNA, 6454 bp, Cannabis sativa
  modified_base (1470)..(1471): a, c, t, g, unknown or other
tggtcagtataaatttcacacttttcccaataaaggtagtgtcaccaaatttttaatgcgaacaccactgctgcaagttccaaatcatttgttgggtgacgttgctcatattccttcaactgacgagaagcataagcaatgaccctatcggcctgcatcaagacacaccccaaattctgtctggatgcatcacaatataccacaaacttttctttatctgatggtaaggctaacaccggtgctgtgactagtcgcttcttcaattcttggaaactggcttcacacttatcagaccacacaaatttttggttcttcttagtcaattctgtcaatggcatggagatctaagaaaatccctctacgaaacgacggtagtatccagctaaaccaataaagcttctaacctcagattctatcttcggtctcagccacactctaactgattcaatctttcctggatcaaccataataccattttcaccaacaatatgacatagaaaggatacttgggataaccagaactcacacttctttaacttagcataaagtttgctttgtctaagtcgttgtaagaccattcgaagatattgctcatgttctacttctgactgagagtatacaaggatgtcatcgataaacactatgacaaagttatcaaggaaatccttaaatactctattcataagatccataaaggctgctggagcattagtcaatccaaacgacatcactaggaactcataatgtccatacctcgtacgaaatgcagtcttcagaatatcttcctctcgaattctcaactgatgatacctagagcgaagatcgatcttagagaagactgtcttccttgaagttgatcaaacaagtcatcgattcttggcaattgatacttgttcttaactgtaagcttgttcaactcgcggtaatcgatacacatctgaaggcatccatccttcttcttgaataacaataccggagctccccagggggatacactaggttgggtaaacccaatgtccaacattccttgaagttaaactttcaattccttaagttcagatggagccatcctatatggtgctttagaaactagctctgctcccggtatcaaatcaattacaaaatctatttcacattggggtggtaaaccaagtaattcctcaggaaacacatataaaaactctttaaccactctcacatatttaggcccaactatttcgagtctactggtatcaatcactactgccagataacctatacacccatcttctaataagtctttagctctcaatactgatattattggaatttgagaaccgtgaactcttcccacaaatacaaatggtttctcacctaccggttgaaaagttaccatctttctcatgtagtcaatactagctgcatacttggataagaagtccatccccaaaatgatatcaaagtctgctaaagataactcgataagatcannacttaactccctatcatccactgtgatcggtacagccctaatccacctcttcgagataactaactccccactaggtaaaagggttccaaaaccgaattcatcactataacagggcctacccagtttatcaattactcttgatgccacgtaagagtgtgcagccgcagagtcgaacaatacagtaaaataagagttatttatgaaaagttgacctgtaacaactaatggactagcctcagcatatgcatgtgtaatggcgaatacccgaggaggagtgtatatgaactccttctttggctctccccttgtcaactgagggcagtctttcttaaagtgtcccatcttacgacactggaagcaggaattcttgttacattctctcaagtgatgttccttgcaacgaggacattctgggtacgtaaatccaccctgacgaccaccactctgaccacggttcctgcggaacctcttgttctgcctaaaattgattggtctgaaaggagtcttcctttttgaatcaaaaattgaatcactactactcctacccaaacaagaaggaggcaaagcattgactccacaagaaccctgtgtccattggggctcattcaaaaactataccgcaccttcagcttgaagagccttttgtaccatcagtgcatatggggtagcatcatcggttgtaattgtcaaatcattacgaaacttggcattaagcccacctaggtagttttccttcttagtgtaatctataggtactgtacttgaggctaatctgaccaatcgttcaaacttggtcgtatactccgtcactaacattgattcttcttgaaccaattgtgtaaactccttccattttgcaccacgaacagcttcattataatacttggagttaaacaaatcctggaattcatcccagctcataacagcaacatcctgtgtgagcgatactaaatcccaccatatcagagcatcttcctggaactgaaatgtggcacaggccactctgtcgctaccggtgactcccataaaatttagtattcgattcatagtagttagccattgctcagctttcataacattagggcctcccagaaagattggaggtccctatttccgaaatcgctcatataatggtactaacatgttccagctataggatattctgctggcaacattggtactggagtaataccaacctaaggaagaggagcaacctgagggccttgctgcctcagcctaaacatctcttcatcttgttgctgtattcaagcctgcaactcagcaaacctatgctcccaatcttatggagcttgtggtggattaacattacccagaccatgagcgtgtccatgacttctaccttggccacgcaaaggaggaggttcttggtgggcttgaccgccactagttccaaccacattgccttgacttcgtacatttctccgggtatccatatgatactagcctgtaaacccataagttagtttaatcatgaagtggtcaacataataaacttaagaccgcatacatgagatcttagacacgcataaaattattcaatatatcacttacaagtttccatcatgcttttctaattataaaaagctcctaaaaacatgtaaaggcttactgaaccgtgagtcgagcttatatctgatgatgattgtacatatcttgacggtccagtagacaacctgggggctctgataccaaaattgtaacaccctactagtttaggcgtgctacagtgctttgaaaaattactgtgcaacctttgctaatcaaatgatttatcaaaagtgataaaatttaaactctaataaataaacatataatgtattacatttataaaatttgggatcccgtatctacattttttaactttacatattcaaaagatgtcgcacaacgactacaaaatcgtgagccctagttgtcccgaagatgcaacactctaggtcaaattgtctcgatatatataatcttcatccagctcaaaactcactgtcgttcaacaatagctttgcctttaccttcacataacatagcatatgtgagtcaacagactcagtaagaaaagcataaaacgtaaacatataactacctatgactaagtgcccatacacctatcaacaagtcataaacaatgcaaacatgtagaattgagtctcgaacgttcttggccatagtataattgaccataataccacatgcacttagtactctagtcgtactagtgttggtagcatcaatccatactataagtacaactagccataataccacatgcactcagtacttcagtgtactagtgttggtagcattagttcatgctttcgaaagtataaccaaccataataccacatgcattcaataatctgtcgtactagtattggtagcattggttcatactttctgaattgctaaacacatacatttacaatatcaagaggcaatcatatatacactaactatcattcaaacggatatgtcatacatctgccaaacataaaaataacatgtacatatgtatgtgtgctatactagtcttacctcaatttggattttaggtgcgccggtcaaccttagtggaaatagctgcaggtaatcgaatgccctaagtcacatttccaaaaaaacaaattataagtgttgccctaacactttcggggacttaaattgacaactaaaagtttctctattgatataaatcatggaaataccctaagtacatataaaacactcaattggggtcctgggaaaagtcttaagatggactcccaaattctgcctaaatcggatcgcccgaaactcaactatcccattttaaaacttccataactcctaaaattcgaagaaaaaccttacaaaattttgcagggtatctaaaagcatcacaatgaacattttttatgaagaaacatcaataaaattctcaaaaaaatcaaactcaatggccgtcctaaaactgcctaaatcggatggcccgaaacctccctctccgaattttgaaatcctataactcatctaatactgatccaaaaattacaaaattttgtcaggaacctaaaagcatcataatgaacatatttcatgaagaaacctcaatcaaattctcatcataaatcaaactaaaaggccatcctaaaacaacctaaatcggatggcctgaaactccttgtccgagtttggaaatctcataactcatctaatacggatccaaaaattacaaacttttgtagagcacctaaacacattataaccaacatatttcatgaagaaaccttaacccagttcgcaacataattcaagttatcataacaaagttaagtttgagttctttgaactcaaacttgcataacttttcctacaactacccaaaacaatttaaaccacttctaaaaagtcctaaataaccttaataatcatttcataaccttcttaaacttattcaacatgttctactataaataaccactgaaaactaacaaaaaccctagaaaaccaataaatttcaggttaggttttacctcagaagtttgtaggagctagcggttgaactccttgatgaattacaactaggaagagaggcttgaaaatgatggaaaaatctgagttttggccctggttcagaagccacgaagtagagggagaaggagaaggtgatttggtgtttttttgactattcttttgcttttgactttgctttttctttttggttccttttaattttgattttccattttgtttgcttcctaagcagctggtcatcctgaaaagcatgagccacagccacctatgccttccaaaagagtgactaagctctaagggtgaaaagactaaaatgcccttatttccccgcaaagttatctcgtagcgctaggggtgaaatggtctaattctgttatttcgttaaaccttaatattctaagatatccaataatattgccccataaaatacttgatacaaatttgtgtccatgtgactaaaattgccattcgacctatttccactgttaccgggcataaaaatataaaaatatgaaaattcactaatagcatgcatatcacacatataattcaataaaatctccgaaattgtgaaataataatcataacacatattttcatgaaaatagggtctataaagaataaaacatataaataatcacatagtcatattaattattgataagtgtcccactaatcccatgtctaaaaataacggtcattacagctatccgcccattaaaaggatttcatccccgaaatctaacctgaataactctggatattgagtcctgatttcacactctaactcccaggtggcctcttccaccttgcgattcttccggagtgccttgactaagaagatagtcttgttccgtagaactttgtccttcttatcgaggatttgaactggttgttcctcataggatagatctggtgccaactctagtgtatcataactcaagacatgagttggatcagatacatactttctcaacattgatacgtgaaaaacattatgcactactgataatgctggaggtaaaactagttgatacgctacttgtccaaccttttcgagtatttcaaatggccctacgaatctaggacttaacttgcccctcttaccaaagcgtttaacacttttcattggtgaaatccataggaaaacatgtcctcctacctgaaactctatgtcttggcgcttaggatcagcataactcttttgcctactttgggaagtaagcacccgtgccttgatcttttcgatggcatcactgatcttttgaactaactcaggacccaaaaactttctttctccagtttcatcccagtgaataggtgatcgacacttcctaccatacaacaactcatagggagccatccctattgtactttgatagctgttgttataagaaaattctattaaaggtaggtacttcaggaaccttcaaaatctaacacacaggctcg

SEQ ID NO: 24033 - DNA, 2347 bp, Cannabis sativa
  modified_base (2190)..(2196): a, c, t, g, unknown or other
tagatgttcatttcagactatccaaggacaaactatcgaagacagatagtgcatacattgttaaggttccatatgccaacgccattagaagtgtaatgtatgctattatttatttgtaccaaaccaaacattgctcgagcaatagattgctcctctctccacaacagtggtagaatatgctgtcatcactgaagttagtaaggatatgatttagctttaaggtgtcttggaataactcgattattattaacactttgtatgactttctctctaagtaaaagatctacagcagcttgtagatgtagccaaatactaggagaacatgaacatctttaagattttgtactgtcatagtttgttcatttaatctggttgaacaagtagataaacaaaagctcacctcaatcctttttgacatgccacgataagatcagtatctttcgggaatttctccatgacttttgacaagaattggctgtcaaaagaaaaaaataacaaacaaaatataagaaaagagagaaagaaattgcatatccagttcaacatttgcacatataaaccatgggaatcatatagtttccaacttacgtatcataagacaatgtaggcacaccgctccaccagccacctacacaaatttcatgtataattaagagaacaataaccaaaagggataagcagacacaatccgtagttagatttttacatgtaagagattggtaatcagagtacccataacaaacactctccttccctttgacacgttatgaacttataactaataactgtaaactaggcatccattaactttgattgaaaggagagtcacatttgtgtagtaatatggaacatacccatcacaaaacttgtcaccttcctggaaactgtcccaggatccgcagtgttatcgacttcgaaaatgggaatccaggttgatccttttacccaagcctacagaaagaattgaagacaatctagtgaaaccaagaatgcaaacacccagataacagacaggaatgccgtgattccaccatggaacatacactattttcataagattttaaaaatgcaattaagaactaaaaaaaatgagaatgagactagagatagtaaattagtaatgtacagtaatttgatcatttttcaaactgcaactggaacatcaagcctttaagttctaacttcataaaatttcaatcttaaagagctacatcacattttatttgtttgaaggagaaaatgtatagatagaaatcatagaaagttagttaccctttggcgttctgtagaaggacgaacatcgagtaaggttttgttagagagttgaattgcatagccagcttcttttggtgtcaataatttcaccttttcatctcttacctataattaaaatcaatgaaagtttagaaaaggaaaaaataatattgcatttatgccatttccatttacaaaaacttagttcatcaaagtaatcaggaataattaccaaagcttcccatctcttcctggcagcggccatatccttcacttgctttaactcgtaatcttcattttcagcttgcattcgaatcccacccctcttcttgaaaaaccaaaacaaaagcatacataaatcaaaaatggcagctctgtttagtagtagagaaaattccacatgcaatcaaatacccagatataatcttaaattaaattaataaaacgaacaaccattaaagggtaagtttgattaaagatgagagcttgcatacaaaatggcgggttctatacgaagttgtgagttgtattgaggaggaagatgaagatagctcccaagtggtttggcatagtgttgttttggaggaaagttgagaaattttttggttatggaaatgaggggaaagagtgttaagagaaggaagccccagagcttccattggtagtaagaaccggcaacaaaagcttctggtgtatcaaaagttcgaagaaaatgcttatccaaacaccatagttgtgttctgtgccggatactttgctgaaatgaccttcttaaccctatagattaaaatcatttctttagaaaatgcccaccaaatccaattataattgaaaaatgttgtagccccccatattatatataaatatatatatatctattctatataaaatatacttatataactgaaatttatgggtgactttttatttttattnnnnnnnataataaaatattatttatataaaataaaataataataaaacaaatcctatatttaaactgagattaaatattcactcgtaccatcaaaaattgcactgcccacatcgctccttggtttcttgctccgctggaaactccggtcccaaccct

SEQ ID NO: 24034 - DNA, 5167 bp, Cannabis sativa
agacccgaacccaaacccaaataataacccagaccgagacccaaacttgaaccacgactaggacccaaacccgaacctcgaccgggacccaaacccaaagcagaactgggacctggacccttaatcaggatatggacttgggcaatagaactaggaccgggacccaagacccaaccttagactcgaacttgaacctaggacccagctcgtgacttgacacccgaaatggaaccagaccgagacccaagattgggatccggatctagacccggggcttggactgaacctgtagtcagtgtctagatttgggacaaagccccagacccgaacccagacccagacatgaactcagtccaagacttaaacttggacccgaacccataccttgtgacccgaaattagaacttaaaaaagaagtagaccggaactcgggaacgggaccgaaaccaagactttgacctggacctggaatcgtaatcagacctggacctatactcagaaccgtaatcggaccaggacccagactccaactcagacctagacctgaacttggacccggacccgtatcccaatcaagacctggactcggtgccaaacttggacccaaacatggaaccagactcaagaaactgaattggggcggggaccaagaaccgcaccccagtctcggtgccgaacacaaactcggacctgcgacccatgacctgaaccagaacaaaaatgggatacgtgacacggatccagatttgggcctcaaaccaggaacagaactcggacaaggacccaaacccggaccctaacctagacccaggacccgaaataggaacttgaacaagaactgccagacaaggacccttgaacaagactaggactgtgaccatgacttggacccagacctagaaccgaactcgaacctagcccaagacccaaatcgtgaccagatttcgggcatagacacgattgtgtacccagacccagacgagacccggacctgaacctagacttcgttcccagagccaaactcagacctacataggaatccagatacaaacctggactcgaacccagacccaaacccagactgggatcaaaactcgaaacctagatccagaccgagacactaacccaaaccaaaacccgagacccgaacttggacatggacctaaacaaagacctagactgggatctcgacctggaccaagacacggacccaaactcagatcaggaatcagaccccgaccaagaccgagacccaaactcgaacccaaacactgaatcaaactcgaaattgggacttggacccaatcccgaacatgcaccaagaccaggacctaagactcgaaccttgatgggggagttggacttgggcctcggaacctagacccagttcagaactcgagactcgaacccgacatagacttgaacccagatcgatatcaaaatctgaacccagactcaaaccaggacttgaaccccgatcgggtccttgacccggaccttgacctaggacccagattcggacttgggacccgaagtgcaactagattgggacctgagaccatgaaccagattttgaattggggcttggacctaacccatagtgagtgtttggatttgggacccatacccagactctcaaacccaggcctggactcagacataggaccctgacccaagaacccccagacccgtaccccaaacttgggtccgagttcgagtcttggtttgagtctgggaactcaaatcttaccaagacccagacccagaccctgactgggatgcggacctgaatcaaaactcggatcacgactcgagacacgaactcgaacccagacacggacttggactaggacccagacccaagacccggaccgggattggacactcagacctggacccaggacccagacctagattgggcactcaaactcaaaattagaactagaaccgggacctaagaatgggaatgggacccaagacccgaccccagtctcggtccaacacctggaccaagacacgaacacggaccaggacccaatatccgaattagaacgaaactgggacccaagattgagatatggatattgacccacgactcggggcttggacccaactcgtagtcgccgtctagatcttggaatcattccaagacccaaacctggaacaatttcgaaaccaagaccaaaacccagatcccagacccagacatagactgaaacacaaacctagacccagtcctaaaccaagactcggacccagaactggactcgtagcagaactttgactcgaacacgggacttagacacggaccgtgattaggactaggacccaatcccgaacgaggaccgagatgtgattcttgacttggactaggaccaggactgggacctaggactcaatactcggacctgggacctgagaatcaaactgtgacccaaacccagactaggccaagacctgacacaatgacaagtttcgaagacagaccgagacctacactcgaactggtaccctaacactgactgggacctaggaccttgacctaaattggggacgcggaccgaagacccaaacctagacccaaacctagacctgagacccgaaccaagacccaagacaagagctagaacttgacaacgatctggatttggacctagaacccaggacccaagacccatggcttggacccgacctatagtcagtgtctaaatctgggaattggacatggacttgaactcagcatgtggttggtgtatggatttggcaccaagactcgcacctgaagccaaacacggacctagacccagaccaagactcagacccaaacccacactcaaaccttaaatcgtaccctgtgacttgaaattgaaaccggaactggaagcggacccttaaacactaaaccctaaaccttaaaccctaaatcctaaactctttacacttacccgtaaaccctaagccctaaatctataaacacttaacccaataccctaaacctcaaaccctaagctggacacgggcccaaacccatacccataccgagatcagaacctaggaccaagacccagacacaaatctagacccgaacctagacctagactcaagacctaaactcggaccctaacccagaccaagacctggtccgggacctagaccttgtctcggacctagattgggattccgtcccgaacccgaacagggatctggactcagaccgcgactcggacccagactcaaacctaaacccgtactgggacatagacttagacccaaacttgaaatccaaacccgaatgtgaacttggacctaggctgggacctaagatcctgacttagatgggggacttgggccgtaaacccgaacttggaactagacctgcacaaaggatccagacccagataggagacttggacatgaaattgagccccaaaaccgggaccgagacccaaaaatttaccccatacttgagacacggaacgtgaccctagactcggaacccaggacctaactaccgagacataaccccgaacccgaacccaaacccaaacttaggacgcggcccaagacctgggacccaaaattgaacaagatcaaaatctgaatctggacctaaggcttcgagttgactcgtagtcagtgtttgaatccaagactgagacccagatccgtacatagacttatacccggacccagatcaggattaagaccttatccttgatccagaatcagaataaaactaggcctgagagtagaagaaagagttgggagaataacagaacctaaacctaaacctaaaccaaaactcagactagaacccataccgagaattcgacctagaccgggacctgtgacttgggacctaaaccaagacctggactttgacccaaatttggacccggacccaaaccaaaacccagacccaaaaactggcccagacccaggacctaagaactagactcagacttgggacccaaaactcggacccatactaggattgggacctgaactcggactcgaacccaaaccgtgacctggactcatactgggactcgagacccaaactcgaacaagaacacaaaattggacccggaccgggacctaggacttgaacatagatgggggacccagaccagggaattcggccctcaaaccgggaccagaacttgggcctcagaacatggatcggaatccagaacccaaccccagacccaaacctcgaccaaggacccatctcgggacctgggatcctggactctatgcttggacctgacccgtagtcgatgtctagatctgggacttagacctgaacccaaactcatactcgaactaaaatcaggactcggatacagacccacactcggtaaccaaaactgaaacttgaattggaaccagatcgggatcttggaatgcgatcgagacctagacccgaactttaacccataactggacccaaccttagaccctaactaagacaaaaacccatacctgaaccaggaccttgaccaaaatcaggacctgaatctagactcggccacaaacttgacctgaacctgtaccccgtgactagaaactagaactgaaaccagaagctaatcggaacccatgaacaggaccaggaccaggacctggacctagacccaaaactgtaatcggaccaggacccaaacttgaacacaaacccaccctgatattgggtcccaaacctaaatccaaatctgaaccgcgactggggacccgaacccagacctgaactcagacccgaacatggaacaagactcgtgacccataattgggattgagacccataactgcaccaaattctcagtcccggagctggatcgagacctagaccgggacctggtacatgaacctaaaccagactaggacctgtgattggaattcagatattgtcccaggatcttagaactaaggcttggaccggaaccattgtcggtttcttgatctgggactcggagaacgaccaaaagttgaaccccaaccctaacctaggacccgaaaccaaaacctgaaccagaacatgaccaggaccctagaacaagattggggttgtgaccaggacctggacttggaccaggacccggaactagaccagaaccctgttaggttttgtgccctaaataaaaccctttacaatctgattagttat

SEQ ID NO: 24035 - DNA, 8694 bp, Cannabis sativa
cttggagtgtttgggtcttcagaacaatttggctcatattttaatagtcactgggtgacatatatgtaacattttgcaaatgattgtaaaatgaaaatgggatcccaaaattgtataaatcttatgtttatttattataagtttatttaatttatgaaaattttaattaatcacattttttaataaactctttgattagcaaaagagtgcacttcaattaagagaaaacattgtagcatgtctaaactactagggcattacataagccctaagaacatgtgctaaagcaccttttgggcactgaataagcttatggactcagatcttgttattttggctttcttgcaggtgggagcgagaaaactacctattcaaggtaagacccgctatagaagaaatctatcggtctaaaagtgctaaaataacatctgagggaattcagctacttaaggtcttctcttgaagaggtgttttacacacttttttctctatcaataataacaataggaataaaacttgattataattgttaggaagtgcacttattttcttgtgttagggaaagggttgcaacactactaaagcaaacaacctccaattttaacgaaagcaaaaataggtttaaacttcactgttcgatatacctagtcaaagcttggtaatagacccaaactccaaaaagtaagggtcgtgtttaataaaaagtttataattataaatactttcataaatatacgacataaatgcaagctgtttataaaactcgggatccaaaaatctatttttcaaacatgaaaataatgcaataaaattgagcccatgttgtcctgaagatccaaacactccaggtctaaccatcctgatatttacaatcttcactgagctccaaaatcactatgattcagctttagtcttacctttacctacatatgaaaatatatctgtgagtctacagactcagtaagaaaagtatgaaacataaacatagatacaaattataattaggcccccatacgcctaattaccatgagtccccgtccaatatgtataactgagtcttggatgttcttgattatagtacgattgaccataataccacatgcaagtagtactcaatgtgtactagtgttggtagaataaatccatattataagtataactagctataataccacatgcactcaatactttaggcgtactagtgttggtagcactagttcatactataagtacaactagccatagtaccacatgcactcagcactctaggcatgatagtgttggtagcactaatttatactatctcaaaatcataactaaccataataccacatgcactctattgatgcaattttttatcaatttacctaagaatattgtgaaaatataagagaaatgcaatgaattaatttggctaataaaaccacaaaaaataaaaaaggacactagggatttatagtagttcacccctcatgtcacgatggtaatgaggctacgtctactttattttcattatttagttctagcataccagcattatgttctcaaaagtgcatggataatagcacaaaaaggaatttctaggcaaaatcaatatcgaaacttaagggtaaaagtgtcacagagaccgaataacatggtggttgtgatgttcttgggaacagtaaacatgggaaacaagaatagagaatggtcacttcttcttggtaaatgtgtctatcaatggtgattgtatgataaaggcttagttttgtaccaatatgaagaacttaaggaaaatgtgaagagaaaaggtctcaagggatgatgtgttgtaggcagttgttgttcttccaaaccctagtctaacatttctttatataggtctagggtttgttagtgatcccccacaagtcggggtatctcactttaaatctcgtatctttctataaaataatgaataaaaaagatgaataactgaagatctgaaaaatatctccttttcagaggcaaatatcccacattattgtcgaaattggttattttccttgtcttgaacttgcttatgtggtattgtgctttaggaatgacaagattagagagaggtgaacatgggatgccacacctcgtctaaggcaaatagaaagtcgcaagagttgtgacacaactctcttaacatccccttttagcccatacttagtaaaaccaattaattctcgggtaaaatgtgccaacctattttgtaaacaaattttgagcttgatacttcataattatactatgaccatgacacacacatagatctgtcttgaaaagatttttaaaatgaaaactgaaccaagttattttgataaaaattgagagttatgtcgattttaccaaatgttagtaagtaccttttagctccaaatccaacttgtgtcatgtcatcatgatccgtgacaactcattatggtgtaggttggacatacatgttcccgacatctcagggtgtgtgtttgacttgttttttgatggtgaacaatattttgggggtttcaaggtcataaaaccttatctcaatgtccaaaaccctaacgggagatctgcaccatcttttggtgccaaaagatgacacaggtcggctaaggcttatgcaaagcctttgatgttgtttcttgcttagttttaccatatggatactataaaagtcctttagccacattagtttttagccaattggtgggagaaacatgtgttatcttttaggtcacaaagatggcacaggtcggccataggtgtgctacacctcttggtgacttttctcacttgtttttggtactttggtgttggaaatattctttggacaaagaaaatcctccccatttgatgtggcctacctgtgccatcttcttgtgcacaaagatggcacatgtcggttaggtgggttacaccacttagtgagcttcctcacttggttttaatattttaatgaagaaaaagtacgtacttttagcaaaaaaatatatttgccatttggtgtggccaacttgtgccccttgtttgtgcacaaagatggcataggtcggctagcttattgtttgagtgaaaaatagtttctttcacttgtgttgtactctttggtgttgatgaaccacatttggacaagtctttggtgttttgagaatagagacctgtgccatctttttatgccaaaagatggcataggtcgaccatgcattatggagtggcctccttgtgtcatcttaactttatgttaaagttctagccatttaatgcctaaataagtcaagtcctagttgatttccttgttggattgaggttaggatcaaagcccatgtgtgggtcaataaaccctaggttgggtacattaaggtgtgagtccccccaacaaaatagttggttagtgtttctatgagtttcctagaggtgccatgggaccctcaagtaggatgtctgaacttatttggcctttgtaagtcttggtcaatatcgaggggttgacttttttcacttttcgaacatcaggtataacacactaagtactcaaggcgtactagtgttggtagcattagttcgtactttctaaaatatgcatgccaaacatgtgaatatgtaattatactcatcttacctcaattctgtaatcaggggtgtgtcagtcaaactaagtgaaaaaactgctcgatgatcgaaggccctaaattacattaacgtaaaattggtaagtgtctagctaaaacacttttggagacttaaactcataatctgaagtttttctatcgataaatagcgtggcaaaactctaaatatcaagaaaatacgaaaatcgaggtacccaaaatgggttaccggatccccaaggtctgcctaaggaaatagtgaaccgtttctttgcaaagttataaagctcaatcttttctaatttatttataccccaaacttgctcaaactttctagaataccctaaaataatgttctaaacataattaaaaacttaaatgcataaaagaactcatgaaataaaatccaccattgttgggaaagctttgatgagatctaaaactcaagcttacccatttcatgctatagctgctatttccatttaaaaatagctacaaacaatcatagtccaaaccccaaaacaatttttaactcacagacacaaaaaaaaaaaaaactcaattctctaagacatatataaaacccaaactttcttacaaattcaaaatgaagtaaatagctcagggtttatcttgatctttctttaaaatcctcacttaatttcctattgaaatccttgctgaattattgaatttggttgaaatattgctcttggtctttctttggctttccttgtagccgaaaaaagaaagagtgtgattttgttgagtttaaaattctcttgaatcatttgtcctttattcaacatatatcacttattattctactaaattcaccaaagctaatcaaataaaacttaggtggaaaatatctaaaatacccttacttcaccattaagtaatctcttaaactagggtaaaatagtcataatcaaatatctcgtataactctgatattttaactatccataaatcttgtccactgaatctaagacactaaaccgtatcaaagtggcactattagcgaactgtcgaatttctactgttattgggcataaaatataaaaaataataaaattcataaataacatgtgtgccacacttagaattcaataaaatatccctaatggagaaattatattactaatgtatatttatgacaatagaactttattttttataccaatacacatataattataaatattaaatcactaataacttactaattttcatgtctaattatgcaattattatatatatatatatgttatattgtattatctgatcttctaatttttttatgtatatatatacacatatatagtgtaaaagtattggtattgtaacattgaattctttgtcattgtattttatataggaataaatttgtaatatcttaattttcttctattttttttgtaataaaatctctaacaaatatatgtttaataatagaatttaaaagtaatttaaattaggatattttagtgtgaattcatataatattattttaaataccatatcattttttacaaaagaaaaatattaaatttcataatttcctttatgtttcaaaacatattatttaattaaaatattacaaaacatataacatttattttctgggaaataataaattattcgaacatggtcttatagaataatatatagatggtatctcagtgagataatgtttttgtagttttgttaatcaaggaagaatttcaacagtggtaaactgtataacagaggaatggttttgggatggatatatattcttttgggttaggggagaagaatgtatggggcaagttatggagccttattgagtcttcctatatatttgttactctgtaacactgcaatttttgctaggtctgctgcctaaaatgaaaccaaaagtaaaaatgataagatcctgcagagaaaagtggagagaaaaaaaagaaaattaaaaagcaggaaaaaggaaatacatatatacaattcatatatgtaacaatatataaactatataggaaaatatatatactaaagtcacaaaggaaaattttgtaagtgtttctgtaaagttgaaattcctttctaatgggggacaagatttggtgtgatcctcttataaatgttcaatagaaccaaaacccatctcagttttcccgcttctgtaatctcatgcgctcaactattctgtgtggagtatttatttgactaacaatttttttcttctttaaattgttttaatattattaaaaaaatttggtaataattgggtcccacagtatcagcatgatggaatggggctaagtaaccacaagagtgcaaaccagactgatttgagtgatctttgttgtctgtttctgaagctaaaaggtgggaaaaatgtgatgcctttacatgaagggattgattgaaagatttgcatataattcaatgaaaacaataaaactgaaatgattcagagtacatattctaatgtgagaggagtgttactgttattataatttattctaaggtgaggagtgtaatttcttattataatttattagtcaatttcggtgtccaaaaatacttgcaaatttttttatggtggtgtaatttgttatagttattataatattcttataaatttttaaaattttttgaatagttatagtatcaaaaataaatttgaaattttttaaactcgtgtgatagactggaatatcaaaaactttgttttcgatattataaattatgagagaatttttaaatttacagggttaatattgtattaattataacagatttcactataaaaaaaaatttaaagaaatattccagcattcacacgtagagtttgaccaaaagattgtaataagaagttgtaattaatctttctcattctaatgagaattgttaaaaggcatcattggtacctaacatcctttttattagtgtcatactcctattggtgtaattaattatgtcgggtcccgtataatttacgaaaaataatttttaaacaatatgactaactaatataggacgctacctatgaaagagggtaccactaatctccaataataattctgtcattcctaatatatgctatcatgtagaaaaaacaaaaacaaaaaaaaaaaaaaacaaaaagcgatgacataatgaaacttaagagataaaaaatatatatacttataaaaaaaaagttatttcttcactagtattaagtatttgattgacaaaaaaatataggcaccaataattatcatgtggttggagaaaaagaatgatctaaaacaggagccagcaaatgggatcatatattcgtgtttctatttatatgtcaaatttttatttctttgtctagacttgaataagccaaggaatcatgcaatgagagaggaataaactttttttatagccatatctctccatggaaaattgggatcaactctttctcagttggaggataaagttacaaccctgaaaaatgagagattgacagaacattataagctaagggctgtgacaacacaacacatgaatattgtaccataatgataattggctataaaagggtattagattaaacatctctctcactctcatatctatgaattttgtagtgggtggagaaagagacatacactattttctatttctttatagagtgaaatcttactgctcatctcaaaaattgggtacaaaccttaagtagttgtgttcttaatcttcattattgtctacactatagctagaaacaaaagtatgttattactgcaagttttcctaccttatagcaagaaaaagtatcatttaattactatatcaagtaatttctattcatcaccacatataaaaacctattttaggtcgtgttacatattcctcgcacgatagtatgtgtggtggataatcacttgcagtgcaatatacgctgatatgaactagtttttatttttatttttttttggcggaaaggtgtaattgtaaattactagttatatatatacacatattatttgacacgtgttttcatattgttattttatgtatttatttatttattttttcttaaaaatcattttataattttctgaaaaattacatgcaatgtgtcatgtgtaaagggaaaggagaaatggacctaatacaggtcccctataggttaaattggagatcacatgcatgataagaatatcataaagatattaaaaccagaagatataaagggctacctcatatattttggtatctacaatgaggtggaaatgagtttgagacacaggtcttccgtgcatccaccaacctttttttttttaattaaaaaaagaagagtttaaataattttttttaaaaaataaatagaaagtggtccaatgaaatttcacgaaactcccttttttttttttttctcaataaactacgattctaaaggagaagcaataatgaggtcttgggctaacatttgactggttagctgtgcaagcaaagtttacacagtttccatagatacctcaaacgacacgtcgtttatggttggagtgttgtatttctcttttcttttattgcgtgctttcatttaatttttgcgttcttttatacattacaggcaaaggcttcttgaaaagcggtgtagggttgtgttgtgttctgttatagcgcttttaacaggaaagaagaatggcttttttgaccgtctgatcagatcacctatacatatatatatctacaataattaaaaatatgcgtttttctgacagtaattaacaaaaatgccaccactttttgttaacacataggtaactaaagtagtacaagtattttcccaaagctttcatcaaatttcgctactgatcatgatcatcattaactgaccaatcatgtgattattagccaagttcaaagttgtcacgcacatcctatatatcaaaggtttaatagaataatatataataatgaattttactatcattacagcgtatatttttaacagtacaggaatattcatcaaaagtagtgatatctctacatacacatataaagatcattgtttataaataataattttcatgcagaaatttacaagtagaaagttgacaaacta

SEQ ID NO: 24036 - DNA, 5229 bp, Cannabis sativa
aaaaatattactatatacaaactagataagtcaacatcaaatctaccttagtgtttatccaattacaaaaagtatgataatgttcatcatgtaaccatttagagttttttgacttggatggatattgagacttgatccaagtaaaatgttcccttcacatatatccatacaaccattgttagtgaaataattatgtaaatttttattaaattcacaactaataaataaacttactcaatataaggctcaatttcaatagtattttgtaatacaagacgatgtgcttcatctagttcatcccgtcttactgtacatacaacactacctcttctataatgaatctcaacattgttcacttcattaaccccaaaaggatgtacacccgacgtgtattcagaataaaattcaattgcctcttctacaatataacattccacgatgcatccttctggccgacttctatttctaacatatcccttaagaatcttcatatatcgctcaaatggatacatccattttaaatatacgggaccacaaaattttagctctctaactaagtgaattgttagatggatcattatatcaaaaaatgcaggtgggaagtatttctccatctcacataacacttcaaaaatttcctcttttaagtcagataattttagtggatcaaccaccttacaacatattgacttaaaaaataagcataatcttgtgattatttctcgaagcttaactggtaagacagatcgaatcgccactggtagcacatgttgcattagaatatgacaatcatgagatttcatgcctcttaaagtatatttgtccatgtctaccaatgaacttatatttgaagaatagtcggaaggaacttttatattacccaaacagttgtaaacttgcattctttcatctttggtcagggtgtatgaagcaggaggcaaatatgttcgacctttctctacttttggatgtaaatgactacgtatacccatgacaactaagtcttgtctagccttaattccatccttagtttttccaggaatattcaacaaagttccaatcagactatcacatatatttttttctatgtgcataacatctagattatggcgtacaagtaagatttgccaatattcaagttcaaaaaagatggatttttttttataacaacctttgggctcctctgtaaccttggcttttcggcgagccttcctctttgtacaaataccaaccttaggcttccctaacttgaacgtgattctagacattttctcaagtacttcactaccatttaaagggtgtaatgaaggctcttccaactcttgcttgccattaaataccttcctccaagttcaaaatttatgtgtactacgcagccacttcctatgtcccatgtaacaaacttttcttgagtgtttcaagtattcagaacaagttttctcttcacaaacaggacaagctttataccctttcactgtaaacccagataaatttccataggcaggaaagtcattaatggtccataacaatgcagctctaagaatgaattcttctttcttgtatgcatcataaacattaacaccttcatcccataatgttttcaagtcatcaatcaaaggggctagatagacgtcaatgttattaccaggttgttttggtcctgatattaataaagtcaataatgtaaacttccttttcatacacaaccatgggggtagattgtagacaacaagcataactggccaacaactgtacttgctgctaagagaagcgtgcggattgaacccatcagtagaaagacctaaacgaaggttacgagattcactaccaaaagcaggaaacttcatatcaactctctgccaagctagggtgtcagctggatgtcttaattttccgtctttaattctctcattagcatgccatgtcaaatcttttgcatgttcaacacttctaaacagacgaatgaaacgaggaacaggaggaaggtaccacaaaactttggcaggtattccttccttgacacctttattattttttttctttttccaccgtgactcaccacaagtgggacataattttgcatctacaaaatcatttctatataacacacaatcattaggacatgcatgaattttttcgtattgcatgcctaatgagcataatgttttctttgcctcataaaaagaaactggcatttcattacattctggcaacaaatctttcaaaaaactaagtagatcagttaaacatttatcactccaaccgtgtctagctttcaaattgtacaacctaagaagtgtagataacttagtgtattttgtacaaccagggtatattggtttctcagcatcactaagtagtgtctgaaacttatttgggtctactcccgatccataatgtgcatcatcaatcatatcatttagtggatcccaattttcatcttctctattcctccttacttccttttgtctacttggtggagttggatcaacaggaagtctctctccatgcttataccacttagtgtaacttttgtcgatcccattaaaaaataagtgttgtttaatcatactcaaattcgtcttttttatatttccacacttaatacatgggcaacaagtaaaattcgggtcattcatatttttcgaacaaaatgctaagaaagaatcgacaccattcctatattcctctgatatcctatccgcaaacatccattttctatccataacttgtgctatgcatataaaaatgaaaaacacaaaaactaaataagcatacattgagcttattgatatcacaaaaatagttctgttataaaccacaacttctatattattaatccaactaatatttatatatataaacatatcacaatttaagtaaaataaaaataatgcttaattccaaaaaaaaaaaaaatcatataacagttcccctgtaagagtaacctaaccatctctaaaatacaaatcaagtcaaataagtaaatacaataggcaataagtaaataaaataatattgtacgaacctcctcttgcaattaaatttctaagtagtgatctttactaatgctttaatccataacctgaaaataattgtatcacacaaaaaaagaacaaaaattgatcaatatgttaaatatgtataattctattgttcacaaacttcatcaccacctacatgttcttccagtaagagaactttgcttatttaattaagaaaagaaaaaagaaaataagaaaaaaaatagatctatttaagtaataataataatatataattagtaaattaagtctcataaaaatattgtccctttttttatttatgaaataatcgattaagtcccaaaaataaattatttaaattgtttggcaaattgtattactcaaccatttagaagttaaaaagattaatggattaagtcccataaaatatatatcattcaatagaattttttctttgcaacaagaaaaaaaacagttaagaaaaaaaaaaatcaatggcatcatacatatatcactaatatagatgtgttattttaaaagctgatgaataatgtgagtgagtggaactatatttgcaaaatgcaaagtcacaacaaaatttagctaaaagcaagaatatattatatagttctttttatacaatttgaaggatcattatatggtgtaaatttgcattaaaccctaaacatcaaatattaaaatttgcagaagaattaaaacatctctataagtaataacttaattatcaaggccatcaagtattgtgttactatattcaatagtacaatccctaagaaatttgcataaatatgaagcaaggttttgaaaatattatataataatcaattaaagtgaaatatttgaataaaactttacctctatgtataggtgtatgctgcgctgttaattatactgaatatgcaaaaacctatgagagaaagggttaagaagcttggatcaaacctgtaatggtacggacatacagaaaatcaaagctaaacctcatgaaactattcacaaacatttggtatgcaaataaacgaacttgaaactttaataacataaaggagtatatataaactttactactgaatttatgctctatatgacaaataatgtgaaacaacataggtatagatacaaaactaattataagatcataattagctagcatcactggcctaatattacaagaaaaagatatactttattagtacataacctttccttttcaattcttaattatcacaaagtagaaacaacaacacaagaaaactcacctcatacaatatgcaaaatttatttagtaaagacaaggtttacatccttaatgattctctgtttaaaaaagttttcggattttttttttctattatatctatttgatgcaggatgcacatgcaataaaataagttaaaatgcataagtacaattctttctcattcagcttgaatttcatataaaccttagagattagaatctaatgcaagtattgatcaagcttaaagaatatttaggctcaatttaagccaacgagaataaaataaatgtgtagttgttttatgtaaatgagaatgagtagaatagagcagtccaatgatagagtttcagattatagcataaaaaaatattaaattacatttttttaaaagaataatttacatcaaggtttatctattcacagcattttcttgtaaagtgatgagaatataatatttttattatgtaaaatcttgccatgagatagtctttctccaatgagaataaagacaaagagccaatgcaaaaaactcctaaaccaaaaatttacaaagcaaaaccctaacaagagaccttacccactgtagagtgatgcggcaattgcagatcagctatcggtgttgttgaagaatatcgaggatagtgaaaacatcaaagaaaacaacaatcagatcagaaatttaaagatataataattaaaattatataaagaaaatgatattatttacaaaagtttataatgaaagagagaacctcaggggaggagaaaagaggccttgagaatgcagtgaacaaaatcagaattggaaaccaacgaaggggaagagaaaagaggccttgagaatgcagtgaaccaaatcagaattggaaaccaatgaaaaagagaagcctccctgcctttttagttctcaacactaaaaaaaagaaacaaaaataaaattttcaaaatgagcaatttttttgg

SEQ ID NO: 24037 - DNA, 2622 bp, Cannabis sativa
tagtgatactccctaaaagttattatattaaactatatgtgacccaatacttaattagaccaatagcgatattgagaggatgcttgggactacgagtaacttttagcatttctcaaatgcaaaataaataataataataataataataataataagggagagttgtgaactacacgtctcttaattcttgtactcaacgaaatatttagctgtaataagaaaaacccaaatcaattactaagttgtcgtgtttcttactaattgcccttaaaatgaggtcctgcgtttcctcatttttcttactagtattgttcctacttttctccaccatcgtttactttacacacgcagccagatttgacatcaaaaacaactgtccttacaccgtctgggcagccgccactcccggcggtggaaagaaactgaacacatacgatgtttgggccattgacatgaaaccgggcactaacggcagaatatgggcacgaacaggttgtagtttcaatgaggctggaaacggcacatgcgaaactggggactgcggaggggttctggagtgtgaaggaagtggtggtcaaccgcccaacaccctggccgagttcagtcttgacactgccaacaaggatttctttgatatctcgcttgtggatgggttcaatgtccccatagactttagttccacgtcggcgcagtgcacacggagtatcgagtgcgtggccgatataaacaacgaatgcacagctgagttgaaggtcaaaactggatcagttggttgcaacaatccctgcactgtgtttcgaaccgacgagtattgttgtacgtctggtcccgataattgtaagcccacaaatttctcgaggtttttcaagactcgttgccccgatgcttatgtttactcttatgatgatcggcgaagcagtacatttacatgccctactgggactaactattctgttgtcttctgccctgacattaagcagaaaggtcaggcacaattataattaatttattaattattacttaatcatgatcatgtctttaattttatctacattaatctcgttacatatagcacttacagtagcttgttcaagatgacgagtttttctttctaaaatataggagtacaccaaatttatctcaaattacatatgaattttattttaatataattttttttttttttgtatgtgtatgtgtgtaaggagaggaagacacttacaagattaattaggggcttttttagccataaaaaaaaaattatatatctatacttatttttaatttgtctacaatttacccgttaatttttttttatccctcttagagtatatagtgtgtataattattctgttacatatttgatttgatgtaactattaaaattttctttatatattagacacactacaatatctattatttgctattgaattgtattaatagatggtgtaaaattataatatattttcaataaactcgacctcaacattaactatcggttaggtccggctgagtcttgaattaagtgttttttgtcataatatattgaaactggatcgtatcagattcgattcgaaaagaattagacagagcaaagagtcgattagatctgagatccaataatggatccgaatattttaaagctctgactcgatccaactaaatagatctttttgacatacctaaaagaaagtaatgcatagtgaaaaaaaataagggaaatttgagccataaataactatttcgttagatttcttgctaataaatatttaattttaaaaaatatcagcataaatacataaatctccaacctctactataaattaattgtattttttggtgtccgttgtaaactgatcacacttatatttttagtgtcacttcgtagaaaaagttaaattttggtgtcggttctaaaccgatattattgagttttagtgtagttttaaaactgacacttaatgtctacatatatatttttttagtgtaagtttaaaacagaaactaataagtataactgtaggttttaaatcgtgactaaaaggggttattttcataaaaaaaaaataattatgaatttctttttttataattttgaaatataaaacttaaaaggttataaacttaaaataagttatacatatcaattaataaatataaaaataatttaaaatttactaatacattgagagactattgttacacaacaaactacatactacattatatacattataacaaatacatattacagataataaatatagagtataatatatagattacaacaaataaatatattacataagattttatttcataaagtaaaataattaaataaaaaagcctaaatccttttatttttctcattcccgaagccaccgcgaccacatcatcatcatcaacgctcgaccacaaccagaccatgaccaccaccgcaagagccatccttgaaacccagaacacaaccagaccatgaccaccatcactgccgctcaagcacaaccataccatgacaaccatcattgtcgctcacctcaaccaccaaaatcaacattccaaccaaaaaacccagcaaaagcttctctgtcgcaatctactgagagagagagagagagag

SEQ ID NO: 24038 - DNA, 4849 bp, Cannabis sativa
gattattaagactgttcatgtggcttcctaggagcaactggtcgatatactaactaagcctctattccttactcaattcaagtacttcaaagataagatagggactaaagaatatatattgcccatcttgagggggagtatcaagttagttaattctggtattagttagttgttagttagtgtcctagagttagttagttagtgatgcaactaactcaagctactataattagctgaattgtaattgtaacagattgaacttcttgctctgttttctcgtctctctctctctccctcgatggattgctgatagagcatttcagagaaaagcttacaaacatataatgtgatatgtattttgataaggaaatttttaatgatcatattaataaaaataagacatcttaagttaaaacaaacacaactcagtgatgaaaaacatacatgtaacatcagcaatatgccaataaaccatctaggctattaggacaaaaaatgtaagaattagtataaaatttaaactccgtatagtaatttcattcataccataatttacaaaattcacagcagtattcagcctcatttcccaaatattctcttagctttgccttcactcttcatccatggtatatactggtatttgccataatttggtgttcttcttcggatcatcggtgaggctgagatctgtgttgtcttctttgaatgttttaataattgttttggctccatacaggatcagcctctctatcatgaataactggtaattgttctcaatcaagggatcgataatattgctatagtttgatgaatacgccaatttgtacctgcaattaagggccccaataataataatcacattagcatagatacatttttaaaaggaaaaggtcatttatgatggtgatttttatgtgcgggaaacaagtacagctgacaaattaggagtagcaccaaaatatgtgcatggcaagggtttacctcgcagcaagaggtgaaaagaatcctggtgtcctctcatttgaggcaataaagagagtttgacctggtggtacccattttgcaattctatggagaataaactctgctcttgtatccctgtctagatgaggatgcaagcttctttcgactccaaacctatctttcctggtctttattttatcccctcggcgaacatggatggcagcataatcaccaaggcgtgctttaatctggaattcaatacaggcaaagattagacaagtaggggaaagtgtgtagatgagaagtacagaaaaatgcaggacaaaaacaatcccaagtgaacaaagagtagtctagaaatgggaagtcctattagaaacttaactagtatgaattttatgttgggtgtttaacagaacagaacgaatgcagtcaagaaaatcagaaagttatttgtagacagcaacaagaatgagaacatagctttacaacccaaatcagcacagagataggtcgtgatttggaggtggccagataatttggtagtcatcagcaccactcaaacaccagtagttactagttagaatatttcttttcctttcaagtttaatgcacttcaaaacctttgatataataccatcattattcagttccacacaacactcaaaatttgaattagaaatcaatcatgtcctagacaattattatgggcacacagagttcgtcctttgggtgcaattcaggtcatgacacgacaacacaacacaaacttgatacgaattattacaggttagggtcataaaaattagacgcatgtcgaaattaggtcgaacccgaatgacaattattatttgggtcggcttaggattaacgcatgtgacacgaaatcgacacgaattgatccgtttatatctaatatattattaaaattattaatttatagttaaagtattattaattttcatagaaaaatataaaaattagaaagaaaattgcttacaagaatataagatagataatttatatttgatattaagaattttattcattgtattgataatttatgataaattatttttataaaaattaagtatacagtcgatacgcgaacacgacaggtcgatacgagaacacgacaggtcgggttagggttgagatttcttgacattaagtatatatgggcgggttagagttgactaattaaatatgtcaacctacataacatgaacacgaatatgacacagcaacacaaattgacagccctagtccttagctccacatacccccagcatggtattatatatctaagcaatattagcctaaatcttaagtgcatggttcagagcatcacatgtcccatacatctatctagctcttgatctcatggaaattaccttctgctattcagagccaacatatctttaaccatccatatctcaccactatacaatggcattatttaatgcacttcaatgcataattttaagtttaaaaggttattaaggatttgaattgttacaatgataatgctgagattatgattcagcatatgacacatacataatgagacttataaatcactggtaagaaaaatattatatgcattaataaactctgctcaacaaaccttttctgctgcaatccttaaattcgctgctgccattgaaggaagaaacgagtatggcaacattattgcactgcggttatttcggtccttgcactccataaacctgaatgaaaagcattaggaaaatctcaacaaaaatatgattcataatagatgtaaatactagatattcacataaatttgcaaggggcataattaaataaattgaataagtaactgcaatgcatctaaatgaagacaacatataaagtataaacaagatcgactgaaagaaacaagggcaataagaacataaaacgagcatgtcttagacctttacaaataaatggcttctcactcaatattactaagccaaatcacaaattattatattaagaaaagttaaaaaggtaggctcatatttagtccagtttacaggcagtgtgcatgaattacccaatccactgataggtcatgtgagctcatggttcaattctattgtattttgcagctatagctacagttttcactataacaattcagggaatgataactatgtattataggggaaatatttgtgaatccatacaaaaatgaaaatgaatacagcttatacccagttttttgtgataaaacatacactgtgacaaattagccaaactcacaaaaactcttttagatttaaccaaacacaggtttaatctactgacaaggtagtcggcaaatttatcagattatgcataaagtagaattctcgaattctgagttatgacaaattaccatgaaagacggctagcagttctgtttattagtaaaagattcgagtaacgatcgttctctttgagttcaactcgattaacaccttcaaggtgggcaatccctctggatcccaacttcatacttgttgatagcacctgatgccacaactttgaattgtctaaaattactggtacagtttcacttatgaaatccatatcatacaaagagtccatggcacacgagtttgctgcccacctaccaaatataaagaaacacacacatttgtagaaaatcaaattgcaattgcagattccctctaatttcaaaatgtgccaaagcatcaaattaatcagaaactataagctgagacccgatattattatttttagcaacaacacttgttatctaatcagcaaaaactgtttctttcaaagcaataatagtaattagaaaaaaactagcaaattgttttacctttcgtctgaactttcattactggcctgttgatgaagtattcccttcttattatgtattggattgatacacattcgagaaggcattacgaaagttctgtaacaataaagatcagtacaatagcaaagaatcagccactaataaatttcaagttttgctacccaagtccagtgccgatgttttccatgtttagatcgacactggtctgtctcaaatttcactaaatcatatcccatttaagatatctaaaattaaagattctctacttcctaactacgttttctcggcaaccaaacaaggaagtgaaaaagaaaatttaagtaaaaaaaaatacctctgcagaaacatagcctcctcaagagcacacctgaggctggactcctggtgaccgaggccctcacaggaatcacaatgctttccagggcagtcaattttgttaccccaatacaagtatttctcattccctgtagggcggtacttgggtctctttaacttggcaatgtattcagaggcattataagaaaataaagacccatttgtggagagtagagaggaaacgaggaagaggaggctaatggcagctacggcgattactaagtagataattgaggatctgggcttttgtttggcctttggagctctatgaaacgccattgaagtttgtgttgccgagagaagaagaggaagagtaggaagtgtcagaattcagatcttgggactgagagagtataataggccatcatcatcatcttccacatggggttgttggtctgtagcttatgcttaatgatttgaaaacacacatcatttcgatactatgatttcaggtttgagtaataatacggttttgagtaaagagcgtagcatcaccactaaaataatttactcatatgatttgagacatttgctataattttccatttatttattttagggtaatttggggttaaattttctataattttatatttattatggttaaaccctcttactcgaattagggtttatacttcctacactcgataatcgttttgctctgtagttagg

SEQ ID NO: 24039 - DNA, 1914 bp, Cannabis sativa
tttgaacaattttttcaattttctgaatgttatgctccgccctaagcactaataaataaagtgtttacgtggtaaagagcattagacaccttaaggtatccaactacccagcattgttaccatgaagtgcccataacacaatacatagtatagatattgggaagattgaggatatagataggagtttggtttgaaagtacttgaataggggattaaaattcgttgtaatttgttattgtagttgaacaatatacttgactgatttactaaaaaaaaatatccaacatcatatatatcgatgtgacaaataatagggcttaataatcttttatagcgattgaaattaatcttaagatgtctcttaacatttctctgtaaattataaagcgagaatattttcgaaaaacaaactcaaaacctagttagcaaagatttaaaaagtttgaatatcaacaatcatgatcattaattttatttattttttgttaatattggttaattaatttgttgtattattattatgtaggtacttaaaccaagcaagcattctaataaatgtgccatacaaaaagaaatcaagagatgatcaacaccaacaagtgacagttgattttgtagataagaatgttcactatggaagctttttttggattctagggcttcgtactttctacttctctttcactctcttcttatggatatttggtcctcttcccatgtttgtttcttgcttggttttgattttcatgctctatttcttggatgtttcctttgagaacaaggttattgatgtttctaacaaggaaattactatataaaaaaatattgagatttaataaaaaatataatatttcttttaatttgttgttatattatgtatagggttagtcaacttcttgattattttatttagaaaataaagtacatatggtgtaatctctaataagattattattatattatgtaatgtataatttaataatccaagtggagttacaaatttttctttatttatttaaatactattaatgcttacctagtgtaaatttaaactatattataattttactgaaacaaaattatttatatgcagtggcagacataagatttaaactgaggatgacgtaatttttttttttttgtaaagggagggagtgtactttttttcctacataatataacatgttaaaaataaatacaaacatatattttatagtattaaatataatttaaaataaaaaataacaataaatatagtagtactaaatacaaattttattgatagaaatagaaaaagtaactttttaaaaatcaaaagtatttgaacccttaacctctattatatgaataaactagcttaaccattataccaaaagaataatgaccgcatacttataatataaataattagtagagtaattagtattaattatttacattttatgattatatgtgattatatatattgtggggccctattttcaagaaataagtattagggttataattttttaattctagagattttattaaactcttggtgtattatatatatgctatatgtgaaatttattgtttttatgatttttgctcggtaacgataaaaatgtgacaaatggccgttagagtcaaatgggattgtttagaatattttatctagcgagacaatcataagtgatatttgacatatcgggtttaaatggagttgtagtgtttgaccattttcccttttaagtcttgatataactcaaatgagaagtaagggacaattttagaaatgacccaagtggttaactttgtctttagtagaatcctaggcttttttaagtgttttaagtcgaataatgtcttactagaattaatcaattattgattattgtttcattttcgcaaattatttaaaaaaaaaaaaaa

SEQ ID NO: 24040 - DNA, 2344 bp, Cannabis sativa
aatgttatatgttgaaacaagtagaagaatagtttattagaggtctactaaaatattctatatttataaaaatagaataagaagaaacattttcgttttgaaagcgaaccacttgcctggttcgtgggttcataatccgaagctgagcctcggggacatcaccaattttaacggctctgatttatagtctccataattcacctctttcattctctctctctcaaacatccgcggccatcattcgtcgtcgtcttcggattctgatgttgaagccaagatttttcaggctcttcggtagagaaaagccagtccgcaaggtcttcagtattgactttttgctggtttgaaatacgaatcgacttattgtattcatatctagttagttagtgtgtttgaaacaatttatttgatggcgtttatcgcagcatgatgtactaggaataagatgtatgtacatgttttaaatttactatgtatgtcctacagattgttgagggctggttttcacctatagatttttggagaaaaggagggaaaagcttccatcaatcttcaggtaccaaaaataaactaaaattttgcattgatttccacctaaagaaatcgacatagataatgggagcatgcataataataatatggacccgataaagtttagtgggatcgtttggggtttctccaaggatgggatttaaagtaaagggcttttgggtgagtttaaactcgttaatgggatcatttggggtttctccaaggatgggatttgaagggctttcgggtggtgagacagctacaatacaaacttcgactcctgaatggaagtggagaaagaaagattggagcgagtgttgggttggattttggagataatattaataagaagaagagcaaatactctgctttgaataccagtttggggcctataatatggcctatactctgctttgatggaggtaaaaagcttccaactttttctttttctcactgtttttacaaactaaattgcttttttttttttttttatatatatataaagaagcatggagaataaatgttcttagtgttgtaaatatagatatgttcaaaatcatatcacttaattgtactgtgtagattataagtacatgaaatcaaaaaatctaacagaaatcttccctaaaatatatggtaggttgtacccatatgggtgttcttcctcccattttaactaaatgaaatctgtctatgccaagttctctcattctcctagtgctaatgttaaacagtcccatgtccaaaggataccttatgttgaatccagaaccacctttgtcgtcggtatagtatattgtgtttcccaagcattctgtagaggttgttgtatcaatggagatggaagaattgtcacctaagaatatagcttggttgcctatattatgtacctcctcccatgtccgttggtcaaagttccatctgaaaacgtcgaagtagtctgttaatcgcactgccatgttaagtgtttcttttcgaaacctctgaatctgtagtatatctcttccgtcacatgactcaaccaggtactttctagcccagtccctggtttcatcaggctgaattccgtgaaaccacctaaatgttagtgtagacaaatcatcgctgatgttgaagcaagccattccaccggtatggtgatctacaccataaaatgcccctctgtggaacaagatatcatcgtaggaaaacctacaaacttcaggaatatctggcatggtagtccatgatgggtctctgaatggcctaatgtaggccacctgacatggctgtccaaaaataattgccatgagaaaagtatggggttttgatattgtatccaaagtgtatgtagtgaacttctttattatatcaaaagagaggttctctcggggtaataaaactggggaaggaaggaagatatctatggtgtgcataaatggcttgtacaaggttagcttgtaatcggctctaagggtacataaccatccttgcgatgaccctataaacggtaaggtgtatggaggaagtaccaaactcgaagttacgaatgatatatgatcggtttctttagttgtattgaaaacagtccattttgtattagtatcatcgtcttcatttggaacgagaagcttgggaactaaatgatgctgatttagcatcgttaatttagttatatcctccctcgctatttcgtgccatttttgacaaaccatagaaaatgaaagcgaatctttaacgtgtatcttctgaaacaatacttttagaacaggatatggaaggtgtccccattctggtacaaaagaaaaagaaaaaaagattagtgcttaaaatc

SEQ ID NO: 24041 - DNA, 1880 bp, Cannabis sativa
tctttaaacataaaaatgtaattattttacaaaaaatggtgtcttatgtaattattcctttattatattattgattttagattattactactcttcatcgtcattcatgatcacatgtcttattcgtatcgtgtcgagacttatatattccagatgtttattaaccgtgtcagaaaatgaaacctgaacacgacttgtataacccatttataaatatattttgtttaaatatgtcaaccaatgatacatttatgagatatccaacacatttataacctgttaaagtactaaaaaactttaaatataatgggccagttttgtattcactgtgtcaacccaaacatgatccgtttattaaaataggttagaagagtcaacctgaacgcatttaaaacaaactcaaacccgctaactttcgtgcagaatttaagtcgtgttatcatatctcacccgttttgccgacccttatgccatcctctttgatttgaatatgtttttctcatttgttattggatagtgaattaagatttatatctacatattgtttttataaatatatagtgtatataatatattatatattaatagaaaaaaaaaaggtttttcacattattatatttgatggatgattctttcttttattgagagtttgatcaatcacttccattttgttttttgatcttatatatcatatattaaagatgttattctctctttgtgtatgtcaaagagagaataacatggagaatattggaattggagttgatatatagaagacattctcatagttgcagaataagatttagatttactaaaagtttaagccctaggttaagcaagtgttaataaaggagtggttattttgcttcattgggagaaagaaaggtatttgctgttggagaattgttaaaaaacaccattggtacttagcaccatcttgagtgttatactgttattattgtaattaagtattggattccatgtcacttaagaaaataatttttagggaatatcgctaaccaatcgtggaacgctacctatagaaaatggtaggcaccactgatgcccaataataacgccaaccagcagaggatcaaagtaaagcataggccctttgatactgggtggttgtatttcgatctttttttttttttaaatcaataaaattatggataaatactattttagactccgtattttgcaaaaattattaattggactctctattttgttaaatgacaaaatagaccgtgtattttctaaaatagtacaaataggactctgaactcattttttgtcaaaataaaacttattaataatatgatctaaaggtgttatgacaaaatttgttatattaaaaaattgtcaaaaattgagctcaaagtcctatttttactattttgtcatttaataaaatagagagtctgatcaataatttttacaaaatacaaagtttaaaataatatttatcctaataattagtacttcaaatctttgtattacatgaagtggatcgtagtctaaatatgtgtgagggattcttcttgttggtaggtctttgcacctttatttctttttctttcaaatataataagcaatttcaaattttagaacaagtgcattcttcttattattatttccagtcaagcctgtaaatttattagtgtggttgtaatacatattgttaacctaaccaaaataagtaaagaaaataaaagatttacaaagatgtggtcatgccttgatttccaatcaaatgaatcttaagagctgaaatattttgaatagcaattctttaactgaaatatttgtttgttttgtgaaaatatttacttgtagagatgcttggtaagcaaattgtgttcttcacttctccttgt

SEQ ID NO: 24042 - DNA, 1614 bp, Cannabis sativa
  modified_base (1567)..(1569): a, c, t, g, unknown or other
ataatataaaattaaacattcgtatcttgcacataacattatctaatttaatcatgcccgacggtctaactttaaaaaaaatatatttaatgaaatgtacatttttttaaggaatatttaattatgtacctcttttttcaggaatatttattatttaattatgtactttaacttgtttcatcatcttatttgtttaatttgtcaaatatttataatattggctcacaattaatgcttacgtacgaataagttattgaaaatttctagtaatatattttttttttctatgtttaacatcaacgagtacaagtttacagaaagtgtcacctataccatatgaagtccacaagatgatttttttttcattgtttttagtgagaatagtttaatttaatttacttgtcgtttttggcgaccaaaatatagtcgataagggtgagaatgagagagtagttagagatggtttacctgaaatgagaaatataggaccatttcgttctgaaataactaacaaatattataaatatatttattcttgtccaaatatatatataaacatattcttaaagtaaaacgatcagatacttaagagaaaaggctaaattatactctaataataatgaagattgatatatagtaaattatatgtgagagagtgagagcacactattaagtaattaaaaacttaatttttggttgtgggagataaaatgatttctttttcttctttttatatatttatacatataacagctacatcatgatcaacccaagtccactgattttaattaattttcatgtctatattacaactacaaatgaaggaaactgtatttagggtaaactctaaagtcaaaatcctagcgtggacgccgctgtgcaaattaacgtatatcaactcggtttctctttttttaatattacttataaataaattaatatattggaaaattctagtgtagccttttttttaagctatagggaaataaattgaactaattaaacttttaaagaaaatagaatgtataaaaattttgttggcacacgttaggtgattattttcttctatttttatttttattattattatttaatggatgtaattattttattattttcacttttattgttttatttaattgttacagtaggagcaactaatatattcgttcgttgggaaatatcgaccacgtaatacggaggggagaagtcgacgagtcgaggagtgagaagtcgagaagcttctgccgtaactgtgtaggcgagtgagtccaggagcgtcgccggcgggtcatcgtccgttcggtccacgttgaccgaagtcaccgatcaatgatggccaccgccttgtcttttgtcttttgtctttcgttcggtttcgttaccgcaagtcttatcttttgtgacatggtgtgattgttttatgatctgagattgattcttgtttattggtttgagattgttctggtttttgccattgttattctggtttgaaagtctaagttttctagtttgagagactaagttttctagtttgagatgttttatggttgtctggtttgagatnnntgaaggcaggtttgggtggggttgcgtggctcgcgactgccatgg

SEQ ID NO: 24043 - DNA, 2610 bp, Cannabis sativa
tctcattcaatacgctcaccactcctctggcagctcatgattgggaatcaatatctctaacaccacccctcaaacgagaaggtgatatggtcacattgagtttgttgatttgaaactgaattcgagttggagtgagtccttttgttaagctgtcaattatttgatcatgagagggtacatatttgacctccaaactcttcataagaattttgttcctcacaaaatgcacattaagttcaatgtgttttgtctgagcatgatacattgggttggcagccagtgcgcttgcactaaagttatcacaccaaataacaggaacagtggaacatttgaacctgagttctctcaacatctcttgtagccaagacatctctacaactaattgagccaaagctctatatttagactttgtgctacttctagtaacaactgtttgtttctttgatgaccaagaaattaaggcatcccctaggaatacacaatatccaacaactgaatttctgtcatctggacaacatgcccaattcgcatcagagaaaccaattagattcagattggtactctgtggtatgtgtaatccatggtgcattgtacccttaagatacttgaggattttcttggttgctccccagtgtacattagtgggttgtttgaggaattggctaagcttattgactacaaatgatatgtaaggtctggtgtatttgagatattgcaaggctcctatcacacttctgtaagttgttggctcattgactggtgttccatctgttattgatagtggtttttcttctgtgactggagttacactaggtttaatgttttccaaattgactctctgaagtagttcaactatatatttaccttgagacaaatagatgcttgtattatccctaaaaacttcaatgcccaagaagtaatgaagtggccttagatccttcaatgagaatgtcttattgaattttgtaatgagcttgtttatctggtatgaattgttccttgtaacaactatgtcatcgacatagaccaatgccataacaacaaactgagcatgtttgaatagaaagaaagacgagtcaactcttaagtttttaaagccccaatgaatcagtgtagtttttagtattttgttcagaagtataaggacaagagtgatgaaagtagataccatgctcactgactatgtctgagaaagcttgaaatccacccctattagttcttagttgcttaattttcttgtcaaattaattttctactagctttttaaattgagcaaaagctggtaaggcatcaaattttttgtttaagtggaactagccttgtatagcggttgtaatcatctaaaaatagatgtaatatctataattggtgtgtgaggtcactagggctggtccccataaattagtgtgtataagttccaaaacttgagaggcatgactagttggtgtgggaaaaggtagagagtgtgcttggccaaattggcaagcatcataaaaactgtgttttttaaataacattaaatggtacatgggacagttttaacacttgatttaacacataactagatggatgacctaggcgtctatgctaggtatcctttagggaattgaaacttaacacactagactgactagaaatagtagaaatgtaactggtaggcactgtggaggcatgagattttcctggtaaggggccaagttggtagagtccatctttaagtgttccttgcagcaccgccttccatgtgattaagtccttcacacaaaaaaaatcaaggtaacactgaattgatacattgttttcattagttagttttgaaacactaatcaatttttttttgttattgaaggagcatgaagcaagtcatttagcatgatagtttgctttgttggtcattttctcaggttcaggagtaaggtgattcgtagccccattgtcagcataccaagcatcatcattaagagtttaaggtgtagcaacaagtgcagtcatctgactgtatttgtcctagctttggtggttggcccatgtaattgtcattgtatctgcagtagcatacaattattgtatctgcctctcacacgattactgttactattattattattgttgttgccacccctgttagtgttaccttaatattaattcccacgaccttagttgttgttgaagctacttcctcttctagagtaattccccctaatgttagagttggatggtctttgaccaaaattacaagaggggttatttagtgttttattggttggacagacatcttctagatgctcaagcttgttgtcaaaattaagaagagaaccttgcaattcttgctaagttagatctattttgtgctcaggcaaaagcaaaatagagagatattccatatcgagccctaacaacacatttgctataagatgcctttttggataaggattactagcaaaagtcccaattctaattttcaaactatcagcaacaatatttttactagcacaccaattgtatctgtttatgtcccaaatatggatttgcaacctgagcctacccatgtctcaaacagaaatatatttacccaattccaacttaaaccccaagtttataacccctctc

SEQ ID NO: 24044 - DNA, 3823 bp, Cannabis sativa
caaaataatatttacctattttatttaattatttggttagtgaaagtccaatactttaggactttggatatttttgctatatatttttttttgtgatatttaaatgttatgcttaactaactttagctattatgatggtagttttttttgatagtttttcattttaatacttcaaaatatttttttatgtatatatttttacagaaatccatatagaaactcacgtatcaactaacagaacaactcacataaaactactggtgcaactaccaaaataacgcaaaccataaatttgaaaaaaaaaaaatagtatactaagtaattcttttattattattattattattattatttcttttgaagaaacttttttagttaagtgttgtatatattgagtattattatggcaaatgtgtaaaattctgaaagaaggtgaagtaatttaaaagccttgcccgatcagcaccattgccattcttgcccaggctctgctactgtatctcttccttcatcctaaaagctctctttatacaaccattgaagaagcatcaacgaatttggagcttaagaaatgaagtcaattttcaagtaaaaaagtattcaaagcaggcaccttacatttatattttattaactttgaggatttaaagttaataggttcaaagttgtgcatgaataagaaatgccaaggtattaaagtgaaaatggaatcaccatttgcagttgaaaaaactcccacgcagtcattcagggaattttagcttttaagggattacaataaccttgtaagtatgggatatcttgagaggtgattcctttgaaacgggcctctgctcagaccagagctccaaatttacagtaccagttccccagtggatgaggcacttgtaaatctcattaatatcaaaatgattcactaaagccagacccagacatttgtcaatgagcatccattcacctagaatgacaaatacaaaaagccatttgaatcagtaagtaatcatctcaagctacggcagcaaatacaagtcagagctctaatagaaccccacaagcgtgttcaacatttggattcataatataatgtggagctaaactcctaacccattgtcacaagagtactcattgggtcatgctaggaacacttataaattacacctaaaaattacacgctggtgcaattgatttcaactacacaattaaaatttatagcataataactaaaaagaaaaatgtgaagaaacttcacagcattctatcaactcacaatctaatcatccaaatttcatctcaatttctctatacattgttgatacttaatgtttaagattactagtttctcaataccaaaaacagtagagaaataattaatatcataaaatcaggtgagcattcacttctacagtaaagagaaaaactaggcaacaaaagaaaatattgcccaatgcctaaaagccctacagaacaataagattgtatagttcaaagcaagagatcttgtagcaaaacatttcattccaataaattttattgagaaaatagattataaggaataccttggtaaaaataaatattaaaattcaaaatgaggaaaataagaaatctagcattagagcctaacacatcagcgttctccactccctacacaagtctaggaatgataaattctcaaaatgtttggttctattgacccatgatgctgtccaaaatctgattttctcccaaagaaccttgctgaactttcaattccttcgaatatcctgctatttctttcaatccatattgcccaaatcatagccaaaattgcagtcctccagattataaccctttgtttgccacccactggtttgtttatcaaagcttgagacaccaaccgaggcaagacccaaaccagctcaaattccttgaatgaggaaaacaagattttttgaatgtaattacattccatgaacaaatggtcaatggattcactgctggatttacagcacacacaagccaggggacaatgacataaatggctccttttttgcatgttaccatgcacattaacttttctcaaagccaccagcaagccaaacactatcacctttacaagcacattacttttccaaaccactttaggccactcaattccacttgaaatctgattcgcagtaaaccattgaaaatttgatttacatgagaatagaccccaaagatctggcttccaaattctgctataatcaactactctgaccaagtttacactttccatttgatgcatcaacccaactaggctaggaacctaactatccatcaaattccttctgaagttaaatcccagctgcaaaccctatatcctcctatcctccttcctcaatccacacatcctcccatcctcccaaaagcgaattttatctccttttcctactttaaaggaaaccagactcaaatattcatcatacatatttgatattcctttccataggcctttaaaggagaatttttcacctttttcggaaaactgtctgtgatcccataacgactttttatcactttatgccaaagtgaattgggttcaagaggaaacctccatagccatttcattagcaaccctctgtttctcatatctgatctcccgattcccgaacctcctatctaatctcccgattcccaaacctccttcatttctcggtctacacactttttcccaagctaccaaatgttcacccccaacaaatcacatccttcccaaaagaaatctctcatcaacttctccaactgatgtagtatcgaattcagggctttgaatatagaaaaaaaaagtgtggggagagaagaaaggactgattgaatgagagtcaatattccccctcttgacaagaaggcgcttttccatccgtcaagtctcttaccgcatttatctagaattggtgtctagaactccaccttcctgggggatccccccaaaggcattccgagatacttcatcagccaattgccgacttcacacccgatagaagaagcgcacctctccaccatactctcagccaagcatatccccaatatttgactcttgctcctttcaaccctgatatcgcagaaaaggcctcaaccaacataaccattctatggagcgaaatctcgtcattcatgaagaatagtatatcatctacaaattgtaaatggctaacctggatcttctcccttccaactatgaatccacataattgcacccagatttcactgctttgtcaaccattcttcctaacacatccgccagtaaaataaatagaaaaggcgaaagaggattgccttgcctaagtcctctagaccctttaaacttaccgatcggtttatggagtatgatgtagatgatatacatccccctaatccatttcctcaaagtgccaccaaaatccttacgctccaaaactagctcacagaattctcattccaccctattataggccttttcaaaatcaatcttgaataccaactcctctttacctctgcttctatactccacaaaatcattagtgatcaaaattgaatcctgtctcccttcgacaaatgcagctggagtctccaatatagtgtcctccaacacacaagtctagaggtcagaactttggcaataatcttgtaaacactcataatcaaactaatcggcctataatccttgaccttgcaactatcgacctttatagggattagacagatgaatgtttcattgatattgcttggtattctcccatctccttcaaatttcttgaaaaattcccaaagatcctctttaattatttcccacttgaattgaaacacgactaggctaaaaccatct

SEQ ID NO: 24045 - DNA, 1718 bp, Cannabis sativa
  modified_base (754)..(763): a, c, t, g, unknown or other
tttacctaaagcacctcttttaagacagaaggaacacagaaaaatgctttctcaccaatttttttgattgcgtaaaacttgaagagtgctgaacccgcaacgttccatgcgaatgaacaattcttgacactgccattacccatggcatggtcgtaagtcacatggtatatggcgatcgcctcgctatatatctcctccatactcctcgggctctcttccaaatcttcagcttcatacagtaactacagcacaatacaatgcaatgaaaggacaataaatgggcaaatttttgttaaattcaatggtttaaggtgtaaagccttacctttttatacttccttaggacctcatcagcagcgttggttttcaattcattatccttgttcttcaaggcatcacacatctctttcttgtaatttgtgtggtactccttccatttcttcaagctgtcttcagggatgatatcgtcaccgaaacatggaagcttccacacctctggcattgaaaaatatcatgttagttaaaactctgttttagttttgtatgacaatagaacataatgagttaaaaattagtacttatgctaaataaaaaagaataatttgcagcgtaaatacctaaatttaactctcggttacaaataaatatttaaatttaatttttgactgtaataacctaagtttaatttttgacctgaccgttaagtattaagttattatccacgtgtcatttcttatggtatgtttaaattaannnnnnnnnnaaaaataaaaatttaatgatgtgaaccaatcagagactctcacgtgactattgacttgacactaagtatctacatacgttccaaaaatataaattatttgttattaccgtcaactaggagttaaatttaagtatttatgccataaattactcaataaaaaatcataaaaatgaccactgaaaaagatatgatgacagagagatgcaatattattacctgttttcgaataatcctcttctttataagaattcactctatcatatatcaatcccaaaatggacttggattcaaatgattttggcctttccatatggtgagggaataatttcggctttaactctccgggaactataacctgtcgcagcaacaagaaaatctgtttaaaaggataaaataataggagacacaactgcgaagacattttcaaagaacaaggatagttgatatgaaagaaaaaaaaaacatgattttgacataaagcaccagttttatgcattggtctcataacttgatcattcttatgtttaaattgagactgcaaaaagtgactattcaatttcagccatgaatgtcttggcaaataaaacataagagaaatttcatgaactgcataagcttagacatatttcgcaagtctccttgattaaaagatactcaagaaattaaatagcctgaatacaaatgaataacacatacaggaggaatctatgagttaatgtatgaaatatattaggagaaatataacaaaaaaacacccaagtgattaatgagcctatctaaagttgtcttgataaaaaaagtacagacagaactaaccttcgtcccattctttgcagcatccaaagcatcgtagtaaatgttagctaacttgtttaagttcttttcaacaaattttttctcctcaacacaatcattccccagagtcaaatacctatccattaaggccgaccagcta

SEQ ID NO: 24046 - DNA, 5620 bp, Cannabis sativa
  modified_base (3852)..(3862): a, c, t, g, unknown or other
  modified_base (3977)..(3984): a, c, t, g, unknown or other
ccttaataaaataggaagtttacacttttttttttatttagtaaatatggatataattggatagataataaattataaatggttgtgactcgaaggtagttattaaggtgttgaatgggacatgttccagttggggtattattaattatgttcaccaatgtaataaactctttagtttatttttgagttataatttttcgtttatttcccaattttgtaattttgtagtccataatgtggctaagtgggcttacgccaataatattattggcatggttgacccttcaatcatcccaacgaacattatttgtaacgaccataaggtttaaaattgttttatctaaaatcgggttttctctaaaaaaaaaaaaagtgtagagtgtaactttcctcttttttttttttggaaactatggaagatggattcttaaaccaacttttttctgccttattactatactaggttgagaaagggtaaacaacaagcttcgttatgtggcttagttgagaagaaacaaacggtataggtgggtgggttcgtggacaatctttaatttatgagtgtaggataggatgatgagaaccaatttgtacgacactttgattgcttcacatgatgaaaacgatgtaaaattatagacagatgacaagaatgctagacaaaggaagcttggctaaatagtggtggagcaatttttggtgtggaaagcctaatagccccaatctggctttgttgtcaaagacaaataacattccgtattcactagaaggttgaatcatttttttgtttttttgaagcaagaaaaatgaatcttgagtaggggatgtggcgtgaaaccgttgccattattataaagccaccatgattgattcactcatctaaacgttccatgaacttgattatgcttttctcattggtttgcaatacacgagatcttttactcttttaagatttcattcacgaccaaacaggcacacaccaaaagcgggcagacaacagtatgttttcataaatacaccaactacaaacttattaatactccactgcttctactcacatgaagaaacactattgactttcttgttaattaatgtacataaatgtcttatctgaggttgttattaattaatttaattacggatttatcccagaaaagaagaatagttggggaaatgagccatcattttttatgatacaatcgatggagtggacctcttcacaataataaaaccattggagaatttttttttttctttcttaccaacataaaaaagaaggaaaagggaaaaagatatcaatattcaacaaattgtaatgctgaaaacagagttttgagacccctgaacaaataaagaaattatatcgcaaaagaaactcgtctaaaataacaagtaattctcgcagtaatgctttaaatacctgcaacttaactctcgactattataacaataacgtaaatcctacttaaaaactcttataacacccaaactggaaaaagaaaaagaaaacaatcttcaacctgcaaacatgacccaaaaagttcgacccaatcttgataaaactaccaagtgaataaggacgcattgaccaacggcatttcagcccataaaccacaatccactgacccaataccagaacaaatacccctagcacgggtggaaaagaaggcattcgactactctcttaatccaaatgtatagtaccaagaattatgcttaggtagaggaagcaggctccttcttctccgactcttcttccttttcctcagctttttcctctgtctttttttcttccttttcctcagttttttcctcggtctttttttcttccttttcctcagttttctcctcagtctttttttcttcaacgctcagcttctcaagaagcccagcagctgcagatgcaacttcattgtcttccttctgctgttgcgactcagcaacttcttggaaagtctccatgaagagtttgcaatctaatacaaaagccaagcaataaccaaccattaataacctacaataattgagttaccaaatacaaaatgcaacaccctgatataaaatgaacttacagatcaccaagaaccacaagtataatgtgaagtttatagcgtgaaaatatcaagttagacataaatttgaatgagtaattgtatccttagataagtttcaattcaaaccctacacaattggtgggttgtgaatccaaaccacctttttatgattacaagtgaacacacccacttaagcatttaaaacttaatcatattcatacgtacaggaaataaataagataacgaatgcttgacaggagcgttcacaaaattcttaactacctacatgatatatgcttagtaaattgggaaaataatgcatctaaattcaaaattaaggaccactgacccaaaaaagcaagcaaacaatcagtgacatagctggtataataagaaacgatgcagcaatgcataattcgcataatttaaatcactcacactcagataagaaaactgatccaagtaatttcaataatatccaaaacaattccaatgtaaagatcaaatacagaacaagctttcagatatactcactttcaactgatgcaaatctaatgcaaaaaagttcgtccttcaattcaccctcagcgaaatccgtagcgtgccacacacaagatttgtcattaccagcgtgttctgtcacagtcatggttggcaaaactgcaagcaatagcgcaaaacacgcagtcaaattcaaagccctagctaaaacaagcatatatatagatatattgatatacacaatattaataacaataatcgacaaaagagtgactaaccaagatgattggcgcagatcttgagggttttggattgcctcataacaagacgaaccttgccactctccttgtgcttcaaaaacttgacggtaccagcgcctcgctctttccactgatttccatctttgtcaaatcggtaaagcttcgacttactaaagcgacacaaattgaaaaacaataatcaattaactaaatgaaaaaaaaataaaccctagattctgcagatcgcaagaaccctaaaaagcacaaaaagaaaaagaaaaaagtgaaaggattaacatacagatcgaggatggcctcctcgtgctcttcaccagtagtgacggtgacctcctcaagtttgacgatcggagcaacctgagcaccggtgtcctcgtcctcggcggcggtagtctcctcctcgtcggctcttggttcgtgttcgggctccttggaggccattttcggatttgggagagaaggagaaatgaaaagaagaaaaaggttagggaaggagtgattggattgggtgtatggagtggtattgcaggagaagagaataaaacgattttatagtcttactgtgacttgtgttagagaaataatgcaaggacaagggttatatgaatttcatcattttcttttttaaaaaaatactaataataataataataatttatttaacaatgtagtttgtgaaagttgaaataacaattgtttttagtttgtaatttcccttttttttttttcaatctaaaaatattcccaacttttattaatgaagagtgtaatggtcaattttttattataatttttacatgttatattcatcgttacttatttttaaaatgataatataaattttattatttttaaattttatttagcttaaattttaagcaacttttttttttttcaaatattatagtgtcaaaaataaaatttaaaataattatattatattataggggaattgcccttatttattattttttatatttttttttttaaatttacggtttaggtttctaaagtggttnnnnnnnnnnntgcaataggagtttctatacgattttttgttgcaatttaagttgcaccgctagttgcaataggaatttctatgtagaattccataagaatgcaaaaaaaaacaaaaaaaaaaaannnnnnnntttaaagtgtaaaaatgaaaaatcacctatattatattatattaaatatttaatattataatttaatatttaccctcatttaatattttgcttcttactaattagtatttttgccctctaaatttttgacactacctcatactatttcctaaaatatataacttgttaaaaatctctcctaaaatataacagttacataattatatccctttggttagggtctgtttctttgattgttaaaaattactatttttaccccatgacttttgactaatacaaaattttgccttcttttataaaaaaaaataaaaaaaattataatattttattaattctgaaaaaaaaaattaataaaatttattaaaagcctcataaaaatattaaattaattaaaactattaagtttacttaaaaatctatattattcctaaaaaatattttcaaactttcttttatttataaacacatatcttaaaaaatcaaactaaaattataaacaaattaaaaatttttgaagaaaaaatcaagcttatttgtatttataaactcatatcttaaaaaataaagaaaaataattaaaaaatcaattaaaatgtaaaattattttttaaaaaaaaaaaaaaagttaaaaattaaactaaaaaatgttatgtgttaacccaaaaacacttcctagtaacgtggacatcaatgtttgacatgtggcaagaaggatgatgtcacgaagttgagtagacctgagtcatagcagtcgacctaagaggggaccctagccctgtgcccatgttgacttcaaaagctctgggatgaaagttcaaatttcaataacttgaattcaactcactatctttcagtattatgcaccatgaagacatggagcaatcaaatccaagatctgggagctaaaattacatgaccttgtcccccaaaagcaaacctgggcacctagggtttcacccagcgcccaagttgacattcccaactaggatttcagttttcgagaccgtcttagtgcaaatggatcaaactttgcattgggacatcaactagacataccacaaacatatttgaggtatcaaaattagattccaagcaagttcatttttgagcacccagtgcctgcgcaccttccaagtatcagatcaatgatccaattttttcatcttctttgtcttcatgaaaaatgggaaaatatgtacttttagggaagaaacaacactccctgggtgccggaaacaaggcccagtgcccatgttgacattttgtcaacctaggccaattttaatgatgttttctaagaactcttctaagcatcttctttgttttcagaaaagactaagattcaactatttttggggaccaaatggaattttcgaagggccataactgggacctagcacccaggttgacacctggcactgtgctcagcacctaggttgacatattttcaacctgggctgtttccaatcaagttctcaaaaaaagtgttccagacatttttttcgtcatcagaaataatgaggattcaagcaaactcagggagaaaaccacaaatttgagccctcggaaatagggcccagggcccaatttgacctagtgttgggcctagcgcccaagttgacaaacaacctggtac

SEQ ID NO: 24047 - DNA, 6543 bp, Cannabis sativa
  modified_base (2805)..(2807): a, c, t, g, unknown or other
  modified_base (6499)..(6499): a, c, t, g, unknown or other
tgtcccagtatttttgaaaatatttggtaaaaaaacagtatttttgtaagtttcccaaaatattttgacaactaaattgccaaaaaaagacctaacagttatatatgtaggttacttttcaattgtcatgtagaatttttgtaaaaatataaaaataaaaaatgttttaaagtttaaaaaaaaaaatcaaaaactatatcaagttttttttttctttctaatttgttaaatataaataatgtacgtaacgtggctttgatgttttaattattaaagttttattttaatgtttaattaaactacttaggcacatggaattaaaataaaaattagaaattgtgttaaatagaaaaatggaaattagcatgttctaactttataagtcttcttataatggtctttttctatatcatatattacgaggatgactttcaaatttcttttgtcaaacaattaattaattaaagcatgcagcacaatacatggaaattatcatgttctaagtttatttattaattttatacgaaacaataattaattttaaaaaattggtaacaagtatgaacacaagttgtaatgaattgttttgaaaaatagaaaaaaaataagattgcgtcaatttgaaagcaattaaaatacaaacaaaaatttatgtatactcaggattcaagttaatttactaatgatcattattgtgatatgaataattctttcatggtaaacgacacgttaataaaagatgtttattacatatcggcccaatcatgcataatcgaactatatatacaacactatttttactgcaagtctatccacatatgtgattcgaatcaaaatcacacacactaaaagtatagtgtattatagtaaatcgtacttatagcagttccatattaaaaagaaatagggaggtagagagagataaatcggactacatatctgggacagactaggggtaacttttaaattttttattgtaatagatcaaacaaaactattatacaaaaaataaattatatatgactttaatgtttatttttttttaagatcaagtttgagttcccaactgacaatcttatatatgttcgtggattagggtcttaaatcaatgtcgaaagagctacgtgactacagatcagacacggaaaaggcatggaagaagaatattgagaaatatgaagaggaagaagggactaggagaatattgtaaaattaaatctccattaacttatgttttttttttctcttattttgctaacaataaatttactttaaattataggcaagagccgagcaaaatatgaaaaattgagcccaaatgaagattcaaggtggatagaggtctaagaccatagtcggccacatgtcagcggtgtatgatgttataattattattgcctaaaaattaatattttttgaataatatatttttaatttttatatctataaaaataggctaatcccgagagggggcatcttcccagtgccgtagacacttttcaaatgttccactacaagaacaacaaatggcgcgatgaacacacacaacaactgcgtgtaagtaattttatatctttaagaaactcgttctatatttaatttctattcaactctaacagtttgttcaaatttttttataggccaaaatggttgagattcctgaaactcaatcagcaccaaccaatgcctcctgcagtacaatgtcgaccccacccatgcctgttatgacacaggtgctgggtgagcggtcacgccacttgaggggacagttgccgagacttagggcggcgccaagagggcaggtccctccgaccaacctactgtcacccaaaaagaatatgaggccctgaagcgaagggtggaagagcaggaagcatggattgagtggcagcaaaaaatgatgtagactcagcatcaattcctgaacacgtttcaagagtagtttaggcatctggcaggcttcgttcccgtcttcaatttgcccctaatggctctaatctaccattttagcctcttggtgttgggtcttcttcacaggctgcccctcccactcaggacgacgttgacgataacgatattgttaacttgtagttttatttttagtttacaattttcagtgtaaatatttttaattttaataaactaacaatactttatttagttttagacagtttatttatttttgtaattataatataaattttaattttataatataattcgaattatattcatatattattattttaaaaaattggttttagttttaatttagttttaattttattatgtatttaaaaatattagaaaaaaccttttattgtcgaaatttacatcgccagaaaaataaaataaattttttgcaacgttttgcgggcaaagtaagttgtgccggcaaagctttcgcggaaaaaaaatggcgacaaagttttgtcggtgattgatttgctgacagaacttcatgagacactctcatccgacaacttaatgccggtgctaaaacttatgctggccgagaaagtcgtcggcgtaaaatattttgccagaaaaattatgtgctttgcctacagacgacttatgttgaccaagtatccccgaccctttatgtagaccaagttattgcttcttgtctacatttcaattataggatctcggctctttatgtttttttcttgggttgaaatcggttgctctaattctctacagatttttctatttctgagcgaccatttactctaccgtcactataaaaaaatttacttttatagtcacaacaaaatttgtgattaaaaataaaaaagttgnnnctaattataaatcatcattcatattgtgactaaaatgtatgtggataaatgtgttagtcacaaaaaattataatttgttttgactaaattaatgtgtttttgactaaaactaaattagtgacaacttgtatctaaatacgatatttaatcgtaaaaaatttatgttatgaaaaaaatttgttattagctgttttttgtattgagctactaattgatagaggtttcttgggagtgaaagtggcttccacacctagacagtaacgatgttgatatttgtttagaaaaatttataaaaggaatgggtgtaataatgtagctttaatttattacttgagcaatatgatgtaatatatgtttatatgcatattaattaattgttcacaagacaaaagacacaattctatgaatgaagcaataattaataaggaccctagcagacagttggctggattcgagtagtttgcatcaaattaaggaatctttttttgtttttcgatgggctataaatatatgaaccagagaaatgttttcaaaaaaaaaaaaaagaaaaaaaaacaaagcaataatcttacaaaacaaaaccaaaaaaaagtgctattataaataataattatgccgacggggccagtgaaactttttcaagggtattcaagcgcgacggggagcggtcagtcgagtgcagttgtgggagaaagcaggactgacggagtccaatgccatgtcacttacaccatttgcgatggcgagaagtcagtgatgaatttgatagacctgaatcagtccgtgaatttcgatacccttatacgtttggcatcagttaatgagaagttaaatttcgtaaagagtctgaatatcaaggaaaaggacttgttgattgttgtgcacgctcgaaaagtggaagggaaggaagttcagaccatggctacattggcatctaatatttctgttccgatcgccaataatctgaaagatttctttctgcattatggcgactcatatgtttcgtcgatcacacgtgggggagaatatattggagtctactcatttcactcagaaaccaaaaatgaaactatgaagttggagttggagctcaaggccaatggagtattcaagtttggctccctcgatgccgattttaaaagtaaactggaaaaaacccttgacaatgttgagtcacaggtttcattcaagcaaatgatgttggggttggacgatgtacccttgcccaaaagagaagacatggttgagtttgcccgaacgttttccagccaaaaactcaatgcccccaaagttcttgcattcgaaaccatgggatacgaacacgtcgttgggagcgagttttcgtgcgtcgcattaaatcgggatatgttagtggaagtggcagaaaaattggagaaggtatcgaaactcatccaacgaatcaacgaaatacaatccatctatgaattttacggcggatacgaagactctcaagtaagcaatgtcctcgtccaagcaaaaaaggatttggtgtcactgaaaacaattttttcagattttaaaaaagatccaatcacgcctctgatcaccataccggagctgccatccctttccaacggtatgccgcaaatcaaatacaaatcttattactcacaggattatggcagacgttatgatgaagcctatccaatcccatttaacttgttcacaacggtggatgagtacatcaagaataaaacgaggattacagggattcagatgcgaaccgttaaggctgagatccaaatccaatgtatcaccgtcgatttcgaatccaccactggaaggcgcacggagatgtatggcaaagacataggaaatttgagtaaaaagctggtgttggaagatggtgattttatcaagaaaatttataccagatacgactcttatcttcatcgcctaggcatatttatcgatgaaaatagatccattatcgctggtggtggcgataatgaaacagaacacacgtttaacgtccccgatggttgtttcattctgggattttcgggattctcttccgctgtaatcactcagatccagatcatctatgcggagttccagccggccaaatggtcccaacttatttgaaaaccaaacacacttgatttaataaaacctgccattgtctcctcatcacctgatttggacacagaatctctttatcaatgtttagtttttcttttccatttaattatatatgtttgagtatgatgagaataagtatgcatggtcgtatattcttatatgcatgcatttaaataattacgtacgtgagtgaatagctgtataatatgcatgtatatttatgtattcatgcatgttttaataatataattcatgattgttatttctagttaattttggtacctaaaatatctatcttcattactaaatattaattgtacgtatgtttcttatcaacctcttttattgcctccttggataaagtaccaatattgtctaataaggataattaataaagtaggaaaaataaactatacttgcaaaattagaccattgctcttaggcatctttacagtaaccaacaccatatatattgatgtggcgcgttataattggttaataattttctatattattaaataaaaatgtgtgggatccaaaatttgcactgtaccacacctcttgatgatgcttcacaccataagagcatgtaccactttcaagattctttgaaagtgttggataataagaagaattaaataagaagctatatattatattatatatcaattgtactgtgatttttgacttggtgcaaaatgatgagattgcatctctatttataagattctatagactaatctagaaatattattcaatgattagcttctacattgttttacataatttcctctactaacacaagtgaaaaataattctaaaacgttcaagagtacttaaacaaacaagaagactctagacactttagtaaatataataatagtctagaaacttagtatcaacaaaaaaattctagaaattaactatattaaattaagtttaatatttcaacacccccttaaacttgatttgtgactccatatatacttcgtaatttgataatgtttctctcttgagtggcttcgtaaaaatatctaccgtttcatcttgagatttgacgtatttcactcttacttttttttttctttcaatgtattctcttatgtaatgataacaggtgtcaatgtatttgcttctttcatgaaagactggattctttgctagtgcaattactgatttgctaaagttaggtgttagttgttgagtcgttagtgtgctggtcagcaactaactctatatataaggccccatatccttgttattcaaaacagcaaaagtaagatttagcattttggttggcatgtgaattttcgtaaaaatataaaaaaaaataaataaatgctttaaagtgtaaaagtaaaaaaacctcataattatctcaagtatttttcttaatttgttaaatataaagaatgcacataacgtggctcttgctattttaattaattaattaattaagttttatattatgtttaattaaactacgcttacgcacatggaattaaaataaaaattccaaattgtgttaaataggaaactggaaagtagcatgttctaattgtttgaattattttaccatgatctagatntactaacaagtatgttattaacactctaaatatgaacttctaaa

SEQ ID NO: 24048 - DNA, 1465 bp, Cannabis sativa
aagtaataaaattatggctaattacaaatcattatttttatgttgtgattaaaatgtccgtgattaaaggtattagtcactttagtcataatacttgttgtgactaaaaataaattagtaataacttgtatctaaaaattatgttttagtcacaaataattttttgttgtgactaaaaatcaaattatttaatcacagaaaaaatttgttgtaactaaaaatttgtagtgcttgagaattgtagttacaaacccccacaccacgttcacgtaggcagtgcaatattaattaattaattaattaagcaggagttcaagcaattaaatggcctaaaaaatttaacaaagcatacaaaaaaacatatataataagctataatattattaagcatcttcttagagttgtcttttgggtcatgcaatcgatcttgcatgtaatatatatatcatataatcacgtgtaatatataagtcgttagatcttaattaattaaattatataactcaatcgcataaaattataataattttgtaattgtattacatatatatattcaatggctttctcaaaaaatatccatttttagtttagttttgagtgagtggggggcctagttcccattatttcataccgcgcgtgctggactttttttctctccaaagtggaattaattgtgaaaaaacaaatgaaataataataaaatgaagtacaagggctcagttaaagctgactaatataccacatatcgcacgtgccgccagttaggcgaaaccaaaaaaaggctgcctacatatacatatagcatgatttggagctttccctgctgcttctagttctgaagtcgggtcataaaaaatagtgtagaagtctaggtcaaaaaaatagaaaaataatgtacaagcagatcatagagtaattacagtaagactcgtaaccactatatagaaaaacatatttatatatgtgtatacgtataaacaaaagcaaacaattcaatatatatataaatagcagccaaaagtcaccacctaatacgttatacctagtacttttattagtatatatggtgaaagaataagtgattatgtcatattttgatcgaattgcttattaagggtttgtggtataggatagatacgcatagaccatgtaattagaacattgctatttatttgacaacacttaattgaggtgtttgtcacataattgattaacgtacggtatttattattaaatttaaaaatttgaaatatctgacagtagaatacactatgacttaatgcttatttgacacttcataatactccttgacatttattgtctaattagtattatacctttatatattatttttatttattttggcaattattagtacccttatatattctctttaatttaaaacaaagagaaatgctaaagggcattattggtgcctagcaccctcctacgtgtcaatatcgat

SEQ ID NO: 24049 - DNA, 3087 bp, Cannabis sativa
gaggatatactctttaataacgagagttaaataataaaagtatatatacttgcatttttgatcgtatatcatcgtatattataatacagaataacagcaaaccagggattctacttactgggtctggacaacacatcaccaacctttgcttctgcaattcaaaactcagtcccggctataacttttcttatggcagccttactccggtgtgtagaatataatatcataaataaataaataaatatatacctgatattatgctaatccttccttaatatgtatttgaaggattgaacaagtgagactaaacagaaaagacggtatatcaaaggttataggaaccatgttctgcgtggctggagcttcagtcatcactttatacaagggtcccactatctacagcccaactccaccgttacagagcgcggcagcacccttactagagtctcttccatctcttggagatgcgagcggcaagaactggaccctcggctgcgtttaccttataggccattgcctttcgtggtccggatggcttgttctgcaagccccagttctgaagaagtacccagcacggctctcagttacctcatggacctgcttcttcggtcttattcagttcgtaattattgctgccattgttgagagagacgcccaggcctggattttccactctggtggagaagtattcaccattttatacgcggtgagtaattaattaattaagagcaataccacctagaggtgttattgagcattatttttaggcatcagtggtgcctagcatcttcttgacatgtcgcgttgcgattggttagcgatactctttaaaagctattatattaaattatatgaggcccgatacttaattggaccaataacgatattccatatatataatcaatagctataagataaatggtatatcttttagcatttcttattaattaattatcattttttattagtaaacaagtagtattaattattaatgctgctttagttctctcaaatatgtcaatataggactttatatgtatatatatttggataagacactaattagctaggaacgtgcatgtacctatatatttatctctccctctctctttctggtgaggtatatatacgcgttaatatctgttaaagctggctgtcagagctctaatcaaatattgttgtaagaagagaaaggcaaaagggtttttttactttcacgtggtgctaaaataaaaaatggaagtggtgacagtataactaaccagttagtcggatctggttgagacatagaaatctgaaaattacttattatacttttatcttctttttttttttcctctcttttttcttttcaacttttctaggtattaaaatgacaaaacaagttgctatgcaataatgcataataagcagtgtggagtggacctgtggttatatgtacttaattatatacacgagaatgaaaccaaagtatattatttaattattattattattattattattattattaaaatatgaaaataaaattgtattttgtctgtaatatatatatatatattgatactgaaaatatatataatattacacagggagtggtggcatcagggattgccttcgctgtacagatatggtgcattgacagaggtggccctgtgttcgtcgctgtgtatcaacctgttcagactcttgttgtcgctatcatggcctccattgccttaggcgagcaattttacttaggagggtaagtgggtccttatccccacctcttatatatatcaatctttttattctaatctttatatttctcatacaataatctttttattatattttgggccaattattaacaaacaaatccaaccccaaccgtacgatcttgtaaatgaacggaatatatatacctccaaatctttaacatcaaagtccaagatagtgatcaattaattaattaagtggatttcatgcataattcctatgtcaaataacgaccgtgtgacagattattgagtttaattaattatataaggtacagaattattaataattaatatgtacatgaagtcatcattaataatagtgaagagaagaagtacttaacataaatatacaacagaatgttttggcttctcattattttattgtcttttattatggtatatatatatatctatgtatgtacatggaatgtgaatataaaattggtgcatggtaacaggatcattggagcggtgctgatcatagtgggactatacttggtgctgtggggtaaaagtgaagaaaggaagttcattgcactagaaaaggctgcaatccaagccagtactaatccagaccacacggccagcagcagaacaccagcccacatcatcaagacctctctcactcagccacttcttccttcttcaaccgaaaatgtttaaatcatcatcatcttcatcgatatattaacctagcttgtttttattaattaactagctactactacagcaagaagaagtactttggcttgggctttttttttaaaaaaaaatagagaagcccctactagctcctacgtagtactgatctatatatcagaaagcttttgtgtgtcatgtattgagcttctgttttcttttgtttttaccaatatggctttcttataattattagtaggtaaggtttggaacaaaaaaaaaaggtgaaatcctcaaggggatgaatatgatcattaatgtcacttctgtgggccacaaagcatgaaatatccccaaagcttttatatgttaatttaaggtttgatttactagaaaatgagtgatttcccacattttaaattgcctcaatttcactttttatcatatcataaaacagtgatccctagctgtgatcactatgccaatttgagttggccaagcgcatggactcttttatatcactgatcacaattattcggtcggtagaaaagtaaaagttacacttacacaaccatgcatatatattatgatttatcaaggatattaaatataactacttaattatgcctatttttattaaataatatttctatattttatcaaataatattaatatcatcatgaacaa

SEQ ID NO: 24050 - DNA, 3524 bp, Cannabis sativa
  modified_base (1740)..(1759): a, c, t, g, unknown or other
  modified_base (1946)..(1969): a, c, t, g, unknown or other
  modified_base (3130)..(3131): a, c, t, g, unknown or other
tctctctctctctctctcttgtacgcgcccatttaggctctctctctcttctcttcatctctctcacacgcctaccctacgctggcaagcaccctaggctgtccaacacttgagatcaacctacttattcatactttgtaatcctaagggtgcaatagcagatccgacctatagtgatttggatagtatttctctcggtataaatacaaccagaacaggaataggtcattacctactatcacaagggggttaaacctctataacaaatctttgtgttaattgctttttcattcttttagtgtaacacgtggcaagcatcagatctatacaactcagttgtcagttgatcattttttgaggtcaacagaaagtaaggatcagaacaatttgaagaaaggcaaccataattccaagttcaagtagagatgctttgtatgtaataaagctactcatctaagaaaagattgtcctgttctgaggaactacaattccaagaaagttggtaatgctgatgtagttttagatggagaagacactgatggatacgtcagtgctagtgttttgacaatctccaagaatggatcaaaaggtgtttggataattgactcaggttattcttttgatatctatccaaatagaagccagtttttaagttatgcaactattaaaataggtacggtgaagcttggggatagtcgaacttgtccaattcttggaatcggtactgtcatgttgaatctagatggaggaaatgttactaaattaaggcatgttcgacatgtaccagatatcaaaagaaatctaatgtcatttgctatgatggatcaagatggttgctctgttaaagttgaaaatggtatgttgaaggtaataaagggatctacgacagttatgactagagttactaggaatggtatctatatactgaatggaagttcagccaagaaccatgttaatgctaccatcttagataaaaatagatcaacaatgatttggcacaaaaggcttggtcatattagccatggttgtttgaaatatctgagaaagaaaggagtgtttgggaaggaacagatcactgacatggatctatttgagcaatgtgttcttaggaaatcaacaaagatcaaatttgggattggaaagtgcacctcaagcaacaaattagactacctacacttagacgtatggggacttccaaggactctttcaagaggtggaccaagatacttcctaactattatagatgtttataccagatatgtgtggattcatattctaaaaaataaatatgatgcctttaacaagttcaaggagctaagaggcatgcttgaaactcaaacttgaaagaaaattaagaaattaagaactgatatggcatggagttctgtacaaatttgtttaatgattcttgcaaaaaggttggtattggaaggcacctaacagttccaaggaacccttaacaaaatggccttgctgagagaatgaatagaaccattcttgaaagtgtaagatgcatgataatctactctggtttgcttaagagtttttgggcagaggctgcagtcacagcattctatctaatcaattgaagcccttcatctacaataaatttcaaaactccaactaaaatgtggtgtggccatgttaccagctatgatcattgaaagatctttagatgtgtggcttatgctcaaataagacaaggaaaacttgatcctagtgttgggttttgtgccctannnnnnnnnnnnnnnnnnnnaatcagatttactaattaatagaaatttatgttgcatggttcccatgatttatttcatgattatgtttaatgtataaattttgttgacttcacttttagccaacaacagtgagtctagattgtaagcgacaagtagtacaatgtatatgtaatataataaagtaaataaagacacaagaattttatnnnnnnnnnnnnnnnnnnnnnnnngtaatagcctaatcctcttggtttgtattgacttaagaacaaggaatatattgattcctttccttagagctcttacaatgatatctctgaatatgaattcttagataagttttttttcccctgcccagtgagtatgaatcactatttatagggctataaccttgagagggaagaatttcccttttgattacaatagatataattggaaagattacatattaaatacagaatacgctaatcacgagatttggacagcttgccatatctctgtgatttaatcccaaaattatagggatttcttcggtgactcacgatgttaaagctgaaattgctaagtgttgatgtgttgttcggattgctcactgcccggttaagaaggcctcgtccgagcgagtatatgtgctgctctgttcggtgtatctcttatgagcagatacttaaagttgattccccgtgtcaccatcgtatgatgccacgtcagagtgcaaaaatttggataacatttagccccaagtctgtataggactttcaaagttgtgtgtagacttcattcgagctgcccttatgtttgaatgggtgacacgtgttaggcgcgtctattcgcgatccgatgtgtggctgaccaggcatcccttcagtttttggctgattaatgttctaactcaattaatgcctcaaaacccgactttctctcaccacatttgacgggtacacttgattgtatttgattcccaatatttgttttttgggggaaccgatgcgtctaatgcatttgaaatgattaccctttttttcacttatctgcctataaatagggttgaacatcattcactgattcacttttacaaatttttccattaagcaaactcagagaaaaaaaggttttcacttcaagtctgtcatgagatttctaccaaaagcatccgagcagtttcgtttggactgaactcagacatcgaacaatgagtaagttttcaatcacttcctcttttactttgcatgtttaatttctgggtttcatacatgtgttcttgactttgctgtagaagataggtagaaaatctaggtctaaaacttcgcggttttctttgtaataatctgtgacacttcacggtttatgacgttggccttccatcgcacattgtctgtctttcaccttgnntattcaaagcttcgtgaaattttgccctaaactcaaaaatttcaaacttctaggctttgacttttttttttttaatttttccattcttctaatctgttgagttctcctggtcggaatatttgcctatttattattcagtatcccgaccaaacactgatctcgtgtgttgtcttttgaagatgaaccttgatgagttttggggaagcgaacactgaattgaccaggatctgcttcaacttctgtacgaagatcaccctcgtgttcgcgccagctcgtcctcttcgagtgacggactttccaattcaagctttgaagactgggagatgagtagtgaatgctcttctactccagaacccgaagtgcaaccccatttttacccttgccagatcgaag

SEQ ID NO: 24051 - DNA, 3614 bp, Cannabis sativa
  modified_base (1937)..(1957): a, c, t, g, unknown or other
  modified_base (2419)..(2431): a, c, t, g, unknown or other
  modified_base (2947)..(2972): a, c, t, g, unknown or other
  modified_base (3288)..(3293): a, c, t, g, unknown or other
gatggtacttgctgtgccagtgctaggtttgcttcccgagccagtctttagcaacttcatctccttcctcacttcctctttctgaatgaacacttgagctctttcattgaactcaatgatatttctcactggacgaccctgtaaatcgtcccataattcacctccagctatcgaatggtcagttgtgatccctgcttgaagagcagtaagtggaatactgtcattcaagttcctaactttatcagcagcagtgctaaagcgactcaagtaagccttaagttactcgcctggttgttgctttatgttagtttgggatgatgcttctggttgccaatctctagcaccttgaaattttttcttaaagtcctaggatagttgttccccaaaagttatcgaatggtgcatgaacttatcgaaccagctactcactgacctagtcagcgaggtggggaataaaatacaacgtagattattcgagacgttgctggctcgcatgatggcattaaaactatttagatgagcgacaggatcagtagtgccatcatactgcgagatgaaaggatttttgattccctgagggaattcagagttcataatatcaggatggaaaggctcagactcttcatcatagtcataaccaagtgatttcccatactccccatcatggtaccttctaaaagtatcctccaactcaatgatttacaattggatgtggtcctcttgctgtcgattaacattaagttgttggcgtaagtcagatgcattctgatttagtcgctcacacagattgggttaccttcgactcaatttctcacgaagatcatgctgtcttctctcataattggtcacagatcttgtatctgagtaactcttagattgataacacctcgtgttgctcatactctcttgatcagcataacaccaaggtctatctcctcctcgcgtatgcctttctgatcgactgtgcccttcggatctagaatgtcccgagctagaacttgcctcgtcttgcttgggccttctccttcaaaaaggattggatacatgtgctctatttaggtaggtgtatgcttcctccctatcagttcgagaaggatgctggggatgtttgagtgggaacccacttgtcctaggttgaatcccagaatttctctcgttattacgagggattgttgttccctagttatgggttgccttatgttatcgtttttgtgagaagactccgacacatcattattttcattcccctgatttgtaaattcttggggtctctgaggtacttcttgacgaggtgcctaataattcagttgcttatctactggaacatccctagttcccccaggttgctgctcctgggtgttttggggattttcattatttgtcttctacctcctggttcttgaacctcgtggccttcttgctctaggatcaggttgattttgtgcattgcttccttgagtttccctagccactgtagcctttctttccaactcagcatttcgctggttagactgagctaagcattgtcggagttgtctattttccgattctactaatggtacatacctagtgggatcataagcgtcctaacctatgagtacataactagtattagtatttgtttcttcatttcttccttctgggttttgattattaccaccatgattccttcatgaatgtgttgttcttaaagtgggtggtctctgtgaacccattggttatttcccaaggctatctgtagtctcttcaggatgactattatcgttttgattataatcatccatggacaaattttgtttgtaaggagggatcgcgtaggctctcaatgaaagcaccatactattaacgtagattttcgttaaccaataataagcctttttcgtaataaatttaagacatatatataaaaactaaataagtataataataataataannnnnnnnnnnnnnnnnnnnntaataataataataataagaccaagcattttacgtggttttgctgttaaatctgcatactccacgagtctatcttattctagatatttttgagtatttgatataatattacaattagtaatctttttctcttaattttccgtcattttctctgtagaatctgtccctatttataggaatatagggaatataggttggcagttatttacatttaaatttgaattagataaccgtttcatgaaacgtgggatttcatcacgtttcatttaaacacgtgtagataacaattgataaccgcataactgcttatcattgttatcttcaaggcggttgacgctgacttggatagtgctatctcactttacgtaaagatgaccacagatgacttgactaatcatatgccttccagcaatagcatgagcacaagtgtactgagcaaacttaagaactgctctttgaccannnnnnnnnnnnnctggacaatcatgtcctacatgtttccaagttgttacacttagttattataatatggaatatacgctaagtgtttcaacaactgattcgtctcgttaatatttccttatgtgtaacgaggtggatgtctcgttatatatggcccatagttgattcaattaattttacttaaaaacgaatctttttctcaggacttcatatttcgaggcatgtttgtgtctcgttaatacatatattaatagtgtgtgtattcttgtcttgcctaagagtatgtagtcaatgagttatgaatatactctattaattctatatttaaattcctttttgcattaattgatataatcgttattatatctggcggttcatattccacatgattgacacgtgtcactctctaaagtgcagctgaatttcaggtataatactatatatttagtcaacaaaaatttgcgctaacaattacttatctagaatatattttattaaactaaatgtgtttttctaaattaattttaannnnnnnnnnnnnnnnnnnnnnnnnntttattttaaaattaattatgtttctaatcaatttttaattaggttaaactaatataattagcctaataatattatttaaataaggcaaatgagcattcacagttggggtagttcatgtgagggaggactgggtttagtatgtcgtacccactactatggcccataactctcacacatgacccagaagagagaaatttgttttaaataaaggagaattttcataaatatgggaattgagggtataatttactttttcatggcataaataaataacactatagggttataggtttttttttattttatttatttatnnnnnnttatttttttacatttatatggatttttttatgccatatttttgtaaaaaaaaaaaaatagaaattccatatttgtaaaacaacaataagatttgtcggaaaagtcgccggcaccggaaaagtcatcggcaccagaaaagtcaccgaaaagtcaacgtcactggaaaagtcaacgaaaaagtcaacgtcactggaaaagttaccataataaatgtctcatatataactaaaaatataaccggttatatgaataaaatctaataactcaaacaggttataattgaaatataatcgatactataacataataaataaatataa

SEQ ID NO: 24052 - DNA, 2808 bp, Cannabis sativa
gaaatggccccctaattgaaagtaattagggttaaaaagtagaaacgaccctgacactcatttaatgtacactgagacccatctaatgtatcacggaatacattccgtacctaggactaggagtggtttctggtggctgagatggttctcttgctgttggggttggccatggcttccgtaccttgtccacgtaaacagctcgcccatcgatcacctgaatgcatatgcatatgcacttgtatcgtcatttgaaaaaatcacaatttttaatcacaatttttgtaccttcccatttgtgccaatcaatgccttttcagcatcatcttcttcagcaaaggtcacatatccatatcctttggatctgtttcgagttttatccataataatattaactgtaaaagaagcagaacaaccaatattgaggaggatcatttgactaatatggggatgttaatagcattaggattgtgacaagtacatactttcaattacttcaccaaatcttgaaaacactttacccaatgtctcctctgttgtagagaaagatatgcctgtgagagaaaacccaactcttaattaatacttatgagtcttttagtaaaggcaccatatctacaacaactcatgtaataacctgattctataaatcatcaacagcagcgttttacatccataagagtttaagtctaatcatatctatgaatatgatgattaaatttatgaacttttatattgccaaaccaccttattgactggaggatgtattttcttgtaaatttatgaatgggataatatttggcacttttgaagatgttctggttcacttaacagccctgagtaagttgaaaactcgaaaaaatttacatcaaacacaagtcattttacataattttcatagtttgggtgtgttttatgtgaaatgtgcttggagtgtaagtgatcatctatttagggtttacggtttagggttgagtggctatatagacttctaatacaaaggattctaaagttcctcattttccatgctttttaatgacactggtcattatggttgtacaaaaatccatactaagctaagctattcttttcaataatatagatttttaaataggttgctactttgcaattcaaacaatttctcatcatcctttataagaagcaaaatcaacctaaccaaatgagccaaattaagctatcatcacatggattcagcagccagagccgagaatcaagagtctaagcttctgtttggttggagttaatgaaatgaaatagaatcgaaatgaatcaatttttatgggtgcattttatagtattagaatatcattccgatggactgactttttcactattttggtggaatgactattctaattctattcctattctcatttccattcctaattctatgctttcattccatccaatcaaacgcaacttaagtgttgattttcaacttctttaccttagtattagagtgttctactcttacaaagtgtgagaaaattcaactatttataaagagattagttttcaagttgaattctatgattcttatatcatatatccaccatacatttatactgtctaaacttctgttccactaagttaagcatacccaaaactgtaaacttttagattcataaactcttaatacccttaattcatagctctataagtcaaattttaaaaacaaagtctctatagcctaaaagtagactggaaaatccaaaacacaaaaacataacatgacttagcaaacaacaacaacaacatcatcaatcaacacagccacagtttttacaagtatagattacatacaaaaatgatgatgttgaagaagcttagaattttaaaacccaatgctgctttaaaaattattaccaagaaaatgaaaagattagatcttttaaagaaaaattaaaagaaacaaggtgaggttgtagggttatggggtgtggctgtgatgaaacatatggtctgctttatcaaatgctgggattgatttgcatatctatttatctactacatatgcaaatcaatctgtcaaaataatccataaataaattggttcaacattgttcttcccattgctaaatctttaagcattatttattaacttttgatactattaaatgcaaataaaaaaaaatactgttaagtacaaaactaaagaaattagttttttttgatagataataaaaaattaaattaaaattttttttagatgccgaaacaatgtatcaatacatttacttttaagggagttcattgtggtatcttacatgagctttttttttacttttgtatttgactacttaatagtatcttttattttctattttatttgcctttaactacccaatagtatatttttgttttgttttattattttggttttgccaaaatttaaatgagattatatactacaaagtatcaaacacagtcacagactcgattatatactacaaagtacaaaatacatacaataatattgttgataaattcaacaaataaaatttttaaacaaaataggattaatatatactaaaaagaaaatataacatcaaaataaataaaaaaaaaattatatactactactaaatagtatcaatttaactaaacaatatagaatcaaattaagcttccattctctaataattcaacattatgctaaatagtatctacacgaataataatttacaattttttttaagcaatcttattaataccatttagtatctatataattttgtctttgtgaaattttgaaatcaatttgctatatcatataaaatcactgaaata

SEQ ID NO: 24053 - DNA, 3977 bp, Cannabis sativa
gatcattcaacctccattatatgccctatatacaagctcctaagttctcaggagcttctagaagataggtgtagttctagaaaaattcagtatcatgctcccagatatgtgattctagatgaaagattatacaaataagggttatcaatacaatatatgaggtggatagttggaaccgaaataagctctttattcatgaaatatatgaaggattatgtggagaatatacatttggactaagcttatcctagaaaatcatccaattggataattctggcccacaacaaagaaggattgtgtagaatgcgtctgaaagtgtgagcaatgccaacaatattctaaaaatctcaaagccccaccaacagaagtaaccctaatgaacaatctgtgtcctttcactgtttagagaattgacttagttggctctcttccaacttggaaagaaggagttaatacgctattttttgctattgattacttcacaaagtgggtcgaaatagaaccaatgaatgcagacacttcaaaaaaggccttggatttgtcatcaaaaacatagtatgttgttacggatatccacccaagattgtatgagacaatggaaaacaatttgatagtgatcaattcactaatttctgcattaaggatggaataataaaaagctttttagctgtggctgaaccacatgcaaatggacaagtgtaagctacaaatagaatttttaagaacacattgaaaaagaaaattaaagcttacaaggctcattgactgaaagaactttcaagaggtgtttgggcataccaatcaatagagagaaattaaatggggcacactccgtactcaatggcctacagctgcaaagcagtgatcccagtagaaaacactttgtcttctcatagaagagagacttatgataccacccagaaccatgtcttacttaaagaattgttagatctaattgaagagctctagaagcaatcacatgtccaactcaaaatgtacaaaggaaatatcagtcagtacttcaactcaaaagtcaaaacctagatgtttaaacttggtgaccttgtcctgagaagagtgtttttggcctctcaggagctatgagtaggggtcctcggacctaacttggaagggagatgaaataaaacaaaaaatatgtgatggaacctcccaactcaaaagaatttatgaatcttagtttccacgagcatggaatgttgaccacttgtattgatactttcaataaattggggtgtcaggattcattttatcttactacaatttatttcttttcttttccatatatgcctcaggccaggaaacagttaaataaaaaataaaagaaattttcaaagcaataatatagtctttcgttattttcagttgtgttgtgacaagtaattaaaagtccaaaatcctagatcacttggaaataatcatgcattatgtaccctgtaccttaaaagttatgtgaagattgataaaaaaaaaagtgggagtagaaacataaactgaagttcataatgtttaggccattggatccgtagccgtagggatccaggagtaagtttttatttttatcttaccataccaaggattaataattcaccaagtcaatctaggttgacaaatcatgaagaagttcaggcttcgacataagaaaaataaattgaagtcgaaaaggttcagccattagaatcgaagcctcacagatctaggagtaagttattatcttaccacacttgggattgataattcaccaagtcaatccaggttgaaaaatcttgaagaggttcaggctttgacataagaaacaaagtttaactcgaaaaggttaggcctttggaaccgaaatctcagtgagccagaagtatacaaactttgtttaacttttcaaagtacaaaattgttgaaaatcccaaggcccaggccattggaactaggaccttagggaatctagaagtaaacagttcacgaaaaagctaaatcaaaattctaaggttcaggtcgttggaactgaaacctcaggcagtctagaagtagaagtaacaattaaagtctgcaaggctcagacctttaaaattggagcttcgagggcctttgagtaaattacctcccatcacatccaaattagggattaatcgaaacatctgaaaacacacaacttagctaaattcaaatcaaaacctaagtatagaatgaaactcttaaggtcttttgaaactgaaatcttagggaaccgaaatgtgggagtagaaagcaatgcctgaaacctgagcctcatggagccaaaagtaagccgctatcttaccatacctaagattaataattcaccaagtaaatattagttagtttgggagtggaagcaacaaaccaaagtttgcatggttcaggtctttggaaccagaacccaagggatcaaggagtaaattacttctcactatatttggagcgacagtcaatcattacacccagaagtgggggtaacgattaaatttcatgaggttcagtgctttggaaccggagccccaacgatctaagagtaaattaattctcactctatttgacctaaaagtccatcaatacatccgaaagtggaggtaacaattaaattctgtgaggtttagacctttaaaatcaaccccagagattcgggagtaaattacttttcactatatctagaccaatagtatatcaatacatccaaaagtgcacaacctagccgaaatcctaaatcgaagcctaagtacataattgatgtcctaaggttaaggtttttggaacaaaaaccctagggcgcacagaagtaaattcacttagcaagcgcgtacaataattgacagatcaaccataatgcggataaataagttaaagaaaaagtaaactataaatttacaaaattatcttgccttatggtgaaggaaaaagaaattatctctgcattcattaaaaggaccaatgtcccaaaataaataaatataaaggttatggccatttcatggttgaatagaagcatcaacaggtttggaagtgttggtgactagagttttattagaagctggaagagaaggttcaataattggctctgtatctagaagctcggcctcaaacccacaatcctcaaccaaatttttggaagaagtgttcgtccttcaatttctttaatttgggaaaggtaggcattcttttcatcttcaagaatcactataattttggatccttctttcaaagcaagagaagattagctacaagagcaccaaccaactttttttttctctttgggtcatgttatagctagctcctcctcaatttattctttggttgtcaacatttgttttttgaccttcttctgggtatctagtttcgcttccattttctgtttcactgttaactggttgaataccaagtggaacttgttgtaaaagatccaccaaaatggaacgtttatcaccatcacttgaactttatttccaggaactgtctttgagacttgaggttccactgctttgtccttggtccgaggttctgaaacaatttctgaaactggagcctctactacaacctccaacaccttaacttttggcgatgaggttttcgcttatgtccgagaagatatttgaaacttgcctctacctttagctagcttagcagagtccctcacctctttggtttagagaataatggttcccaagaagtcattgagaagtcacatctagaaggtttaaagattttttgaaagaagacgacaagggttggatacctggaagcaatgaaaacaaaaagaaaatattaaattaaaagttcaagtctggatccaatcattagtactattatattttttatccctgcaaacaaacagtgaaatttcttccctaccaaaggagctttcatattggaagaatcgtgcatacttcatcaagatgaatggatctattctatcacactttgtaagcggaagaaaatggatcgggcattca

SEQ ID NO: 24054 - DNA, 1491 bp, Cannabis sativa
taattatctgctaattttaaaatttaagctaagcggtctttacatgctatctatgcattttggctttgttgtttagagttggcttgttaaccacgtgttccttgtgttggtagatactcctaaagaaaaaatgttgaagtccatgagtgaaaatgtccaagatgggggctcaacagaatggggaagggcaagaccaaggcccacaagactcgcaagctaaagcccccgtctacttcatccatattagatgtttgggatatttctcctcccatgaaggttagcgcccaagctttcagatctcaaactcctgctagggcagacaaagatctagccacaacaggggagatttacaaggaactaactatgtccgggagaggcccagctaaaactggccatctcgaaccaccatctcaggtggaagcttcacaaacactggccatggaggaaactctccaagagactttagtgcatgccaacgctttggaagagagtctgaacgggctcgtctttcccaggttggacgcgtccttgactcccaagtgcatgactccacccccacctttcgatagggatgctaagaaagtcaaatctgctgcagacaagcatcgttctctaggaagagagggtgatctccgcagatccacaattaatccatcctcgtcaaacacaaccagccaacaacattaacaacaaaaccagtagagaaaaacaacatcaacactccaacaacaacaacatccatcatccaaaccactatagccaccataacaccaacaacaattaggggccaatactctaattttggctggccacttgggcttgtcacctctcttccccaaatcccaccattgaactttaaattcctgctgaagcctactcgccttgaccatgaaattctaaagaaggtaggagaggttgaaggcatttaaaggaagtgtcacgagagggaaaggattgttctcccaaagagggcgaacaacctttccacgatgaagagggcagaaattgttaagggcatccgtaccactgtccagggagggtcgatgatagacactgagaccttataaaagcgtctggtacccaaggttgggagagaggtggcacattttttctgcagaatttcaagatcaagtggcaggtagtgcggctaatctgacctctcagaaatgggccatctgcagcagcagtaatgtgtttatgctgacccgggcattaaaacatgaactcatgggggtaagttttgactcttttatcttagctattgttgttgtgtatcgttttattatattgttctattttaccaaatggcattaatcgtagagtgcactttgaaggaagttgggatcttaatcatggagattcgtcaagtaaattctaaaaaccaagctttacacacaagaaacaaggtccttctcgtcgatcttgagaaagacgaatcccagaccacttttgaggtgaaccaagtcaaaaaagaggtcgagaatcaattaa

SEQ ID NO: 24055 - DNA, 3570 bp, Cannabis sativa
agaaagaggatttcaaaaaaaaaatagagaaggaaaggaggctctcaaaaaactctagttgtctgacagaatgaaaactaggttaaaatcatatcggatgagaatgagagcatcatgctctgtttaaaactcgagaaatcctcttcttagtagtgattgcagccgtgttgtttaggtgtggtataagggaagttaggggttgttgtctgtgtagtcgatcttttgtagtaaaggattaacatcatgctatttggagttgtcaaaaggtgaagaatttttggaagaatgggggtttcaaagctattgtttgtagatttgatggtaatgatgctaatgtttttttttcaagccaaaattataaaaattcttcttgctgatagatttgctcctttgttactataatttggtaagtttgatatgattgtaattgtgttcctcataaacaatttgtactcaatgtttatgcgatgtttgggtgggtagacatttacaagattatatggatcttaataagagaggggttaggttccaaggaacacacaaaagtggtatagtcacctcagttggaagaagggatgatgaatgttgacgctgggtgtggattttgcttagggtgtttgtagttgtgtggttgtgattcaggattatcatcatggattttccttcgatgtcatgaaggtacgttctttaacaaattatatgtgttaacactattaactaatcctagttaattttctgttagcttaggttagttaagtctgttcagttagtttaggtagttaacatttcttttatgagttctgtgctctatttttcttgcctctttctcttgtatatatacattgatcttcattaataatgtgagcttttccaattctgtttctctatgctttctctctctttgctttctttctctacatggtatcagaaatcttgactcaagattatgtcttcgtctacctccgatcctcaggccccttccatgacacctgcaactcaagctcctcaggctcctaccactgctactggatcttggaatcctttttccaattccctgtcctcctctctcactatcaagctcgatcatgtcagctttcttccttggaaatctcaagtaattcccactgtaattggacatgatctcgatgagatcttgttagccagagttcctcccccagcaactctgctcaatggcaattcaaatctggagtaccttcaatggcgatgcaaggaccaacttcttctctcttggctgccttcctctatatttgaaaatattcttgcatctgttgccaatcacaacacctcattttctgtttggcgcgctcttgaacaaaagtttgcctctcaaatcaaagctcgacgacttcagctcaagggacagttctcacatgttcacaaagtccaagccattgcaggttcccctgttgatgatcaagatttggttcttcaagtactcaatgacctaggatccgaatttgattctgttgtctcaagaattacttcaagaagtgatgccttaactatggaagaagtttaggctctacttatgtctcttgaaagtcgaattgaacatcacttgtccatgagtgatctcagtatcaaaatgcaagctaatatggctcttgaaaatggcaggtcttgaggtgttcaacctattgccaacaataaccaggcagctccaccaataggtagtggcaagggtttctctaggtttcccaaccaaaaagttgtcaagtatgcatgaagattggtcacactgcagcagtgtatcattattggtttgataaaaactagacaactcctaaaccaggtaacactgcaaatcgtgcctttcttactgaaattgactatgattatgatcctcaggcatataccacaactatgatccaagattgtgaagaggacaactcttggtattttgactccagagccacaacacgtcacttttggtcccaccactatcgatgattcaaagccattcattggcactgagacacttgcaattggtgatggtaagaaattattcatttctcatactggatccatctctattccatcttacaataaatcttgtcccctacatatgcaatctgttttaactgttccttctattgccaagaatctagtcagtgtatctaaacttactcaagataataacatctttcttgaatttcataaaaactgttgctttgtcaaggacaagacaacatggtatgtgctgctcaaagggaaagctagggatgggctctaccttcttggtgattcttcaagtccctcaagatcaacattgcagtgtcaccttgccacttctgacatatctcctactgtttatagttgtaataaacaatgtcattgtactaaaaagtgtgatctagcgcacaactcttataatacaagttcaatcaataaaattctatttcttatccctatgagcattttgttttacatgtttccaaaccctctgatattaacctctgacattgtaaattaagacatcctgctatgttaacattacaaaagctattgccctcaataccacactgtggtacactaaagcaatttcagttttgcaatgcgtgtcagcaagggaaaagtcacagacttccctttttatcatcaccaaacagagcctcccaaccccttcaactcatacatgcagacctctggggaccctctcaaccttctaaagatggttttcgatactacattcacttttggatgattttagtcggttcacttggatatacccactaacattgaaatcacaagcctttgaaatgtttatccagttcaaaaagtatggtggaaaagcaatttggattgccaattaaaagtgttcatgttaatgggggtggtgagtataaaccctttgctaggtttctagctgaacaaggtatattcttttcccatccatgccctcatactcaccaacaaaatggtagagcagaatggaagcacagacatataacagaaatatgtcttacactgctagcacaagctaaattggatctcaaatattggtggcatgcctttcaatgtgctacatttaccatcaacagattaccaacacctgtgattggtaacatcagtccctatgaatgcttgtttaattcaaaacttgattactccatattgaagccttttggttgtgcttgttggcctcatttaaggccttataactctcacaagctagattataggtctgaacagtgcttattcttgggttactctcccgttcacaagggatacttgtgtgaaaatacaaatggcagaatgctcgaaatgtcatcttcaatgagcatcactaccctgacatcactcacagcagccatatagattaggtaaatcctacagttcaatgtccatttgttcctactgctagtttttttttactaaaccatgcactaatactgagtttcctaatgttgtccataatattactgctgagacaatggtaccatcatcaacaactgaagtgcaccaccctatcccaatagcccagcctttacagcctataccagaaacacaacaactgtctcctccccaccctacacctaatactttaaa

SEQ ID NO: 24056 - DNA, 1792 bp, Cannabis sativa
aaataaggcttgcttttcaaataaattttatactttgggcggcactaaaatagaccacatgaactttcaccaacgaggttgacctgaggaagccgacacttaacccccaccctaatctggcgacagagctccaatacactcttagctatgtacatactagtatcagtaaaatgccaaatcaatctgtcttccacttaaacaacaaacacgagaattgataagataactctggcttcgacttcatcaaagagctctttaatcaacgaaacgtttcaaagcccattctctagtttcagatcactaacatattgaagctccgaaccaccccttaatgagcaagtccgacccacatggtctttagggatccaagcatcttccttaattcgaaccatttatcccttcccaaatcaaccatcgaactcctctcttccataagtcacggtcccaaagaatactttttcataaaaacaaggcccacttagtttcaaccacctctatcaaggagctattcacataatagaatcttttcattacattggcagccaagaattatgatagttatatagatgagatccatgcttagcgaacaaagattgattaaacaaaagcatatctcaaaaatccattccaccatccgccttatgccatcacaacctagatgacgtaaaaggatatccactcagctcaaaatcaaacaaactacaaatcatttaacatttctcggaaaccttccaacaccagttaggatacaccctccctcctctcttctcatcactattctctacattactttgattgccaatattacaccacgaaagaaaagaatgattcttcagagtacgaacccaagtatctcgtttaaaccccattttcgactatccatataaatgttaacctctaagtcgcccattattttcccccaaaaccgctagagctaagcggagccacctagctcctatcatatttgaagatttttgtggcgtagcacgaataaagttaccatatggctgaaccaacaaatggtctggggtaatatacatgactcgatgacacttcttctccgcatgactcatgcatgataccgcaaataaaacaaaaggtaaaaaacttctcatatttgaagttctctcccaaaaagtttcaccatttcccttcttcaatctcatgtgcttcaaatgtcttttaattatatctctaattaagttgtaataaatttttacttgttcctttacgtgagaatttatagaaatatatcttatataattatatgttatttcttaattgtgataatatgtattattgtatattcctctccttattatttcacaaatacacaaaaacaataaaaaaattacggctttacggaattttaaatatttttacgattttttgattttatttacaaaaaatacggtctttttatgttgtactcttgttgatttattgtttattttttgttatctgtatgttattttttgttattattttgatgttatttagatgtacattttcatgttacttttatatagttttcttgttgttttcgtgtaatttttatgaaaaactgtaaaaattctttaaacgtaaaaatgtaactttcaaatagtgtcttatgtaattattaattctttttatttaagcaaagaattaaatctaagggaagaaaaaagagagctaaagagagttgtggtaaagtaatatgttttaattatactttagttctaatattcaatttctacatcgagtaccggtttgaatattaatcaaattaatgtatataccaggccagatt

SEQ ID NO: 24057 - DNA, 8423 bp, Cannabis sativa
  modified_base (5850)..(5858): a, c, t, g, unknown or other
ataataataataataatgtatatatataattccaaatattattgaaaggattattaagaacacagcttgtaccggccgtatattttaattaataattatttttcttttattttgtaaattcctaattatttagctaggtcgattattacttccattatgaatgtattatactttctcaaagtaaacctacaaagtactatatgcataaggttttgatgaacttaccacaaacttgtcgcttcataatgaaattaaggaaagaaaaaagaagttatatccaaatatatatatatagatgattagatacatgcatggaaatatggaatgggacagctagggtcatatatatacataaatgaaattaaaaaaaatgcagttatttgtttggttgcacgtttggcgtatttggaaaaaaaaaattatataaataaatgaaacatgtagttataattgagttatatattaatgaaattaaacttagctcttttaagtttattttcctttttcttgcgattggcttgactgctcacgtgggtcttgggtgggtagctttgtccctacattcatctctctatagagatttgtgatctaatcactaaaagatgctcaatcataaacttttttactacaaaataaaaatataaggaaagaaataaatcatgccaattttgggaatattatttttttattttataaaagaaagaagaagaagaagaaacatgtcaaactgccaatggcaagtctagctagcctgaactaataatcaatgttttcttctttctttctttcttttctttctctgatctaaagctgcaatgtctattatatcttccacttctttgtatctttgtgtagtactttattactactgccatttctcttctgcttctgcatataaaaaacagtgacaattaattaatatatacccaaattgtattaattttatatatatatgtacataaatatataatatgcttagttgttgttgttatgaccacttctaatcaaaactggtttattaatcaccacacactagttcaacaaaattagtgaccacagattaaaaaagaaatattgcattgcattattatgtttgtttgttttggctactttatgctaatttcttctttgatcttcttttctctcaattattgtagtatatgtaataagaaaggcatattattattattattattatgaaatcaataatatctatgtttgtttcctacttggtagtctgtggttactttgaaaagagagagagaaacatatatattgaagttagttccaatattatagtgattaaacaattcaacaatcaatctaggtaattgtgttatttcaagtaacaaaaatctataaaaatgaattaaaatctagctacgtatttgtggttaatttattaatgcacctgtattaacatggtcgtctacttgtgtcgacatacgtaccaaaacagatttaatttcatatatatatttagtctaatatatatatataatatataacactgtgtacttatccagttatatggaccctgacaaacataagagacaatctatgagccccaaagtaaaatttgaccctttaaaaaatgaatacgtacaactaataattcagtaactcacaggcctatatcaatagtattattagtatagcatagtagtacaataaatcacttgccaattaattaactcatgcatgttactttcttctatacttacctgatctgcatactctataaatatattaataacttttttttaatttaatcatcttaacttagcatgatgctttaccaatgccaacaataataatattatttagtatatatgtaattttcaagcccaaaaaatattctctaggtattacatatatattatttaaatctcatatatgtactactccaatcgaatattattattaaagactgattatatacatagatgatcatgcatattggaatttattttaaggaattaatattttttaaaaaaacaataattgaaaaaaaaaaaaactatacctagaatttaagaactgaaaacaaattctccatcttactcataaattaaagtgtttcaatttaaaccatatacttttcttttttcctttatcaatggctttctttttcgaaataaaacatgtttggctttttaatgtcacaatataagtctcactatcattaacagtagtaaattaatcaaattattgtagtctctttgtacacgtattatattgattaattgtataattaattacattatatcaacttttttggcagcacaatacttatcctccaatttccatatacgaaactttttaattagattgagcacattatccacactaaatacaattaaaggtaaggtataatattattaatttggatataatgaaaagatatataaacatggaatattgaatttatagtgttgatatgcacctttttaagttgtaattcctagaatattcttttgtcaggacaaggaaaaaaaggaatatcatttgggtcattaatttacactaattaacctcgtagagaagtatatatagattaaagtaatacaactaaataataaaatagtaattattatataatgacaattaagaaagcatataatgttattttacaatttctatgccaagtcattggagagagaagctaggtagaagagatgaattattaagtagaaatatttggaggttacagaaaatcttgaaaaaggaagagaaacccgacagtgtatgatgctaaactccatcccttttcggttcagacagatttgtgggtcaaacctttcagcttatgggaattaaaatattgatttccatttttgtctgattgataatttccggtgaaaaagacatgaattcaccttgagagaaaattttattaattaaattaattttaattaataaaagcagattccattttaatccaatagggtagctgtagctttggtaccacacagcataatacactagtttagctaaacacagtatatgatattacatatacagtagtacattctatatttgcataaattatggaaaattaaggaccccctttttttttaattttataattagttttttgtcacattttctgatatttatatacatatataaatgtatggtgtttgggatcaacttggtgcaacttcattttatttagcctcacctctatgaacaaaagccagttcaccttattactcccttaatcaaaaaagttttttgttttggatttttgaaaaggagagaaaaaaatggagcttactcaacatggtttcttggaggaattactagctccaagaagagataattggagcagtttctcaagtgttttgaatgatcaattctacccaagtggatggagctttgattcatttgaagagaacccagttttggcaatctcaaatcctcctccatttgttgggttctctaacccaactgaccccaacaacaacaacaacaacaacaactctgaatgcccttttattgaacacaccttatacccttttgttaaccatgaatctgtagtactaatgccagagctcaacaacaatgatacgccgtcgtttccatcacaagatcaagactacccttcaatggttgaagatgaggagtttggctttcttggatgtgaaaatcagagctgtttggaagaaaataaagcttgtaaagttgaaatggaacaacaaaatacagagcttcctgtttttaacataggcctttgtggtagtggggcagagaaaaagaccaccactactattactactactactacttctaggcctaaaaagttagaaggccaaccttccaaaaatctcatggctgaaagaagaagaagaaagcgtttgaatgacagactttccatgctcagatcaattgttcctaaaataagcaaggtggtcttttctttttggttgtttttgtacaaaacccatgttttagtttccaattttattcatgaaatttcgatttagattttacttcttcttcttcttcttcttaactgaataatgtgaatactatactactggtaacagatggacagaacatctatacttggagacaccatagattacatgaaagagcttttggaaagaataagcaaattgcaagaagaaggaatggaagatgggaataatcaaatcaatctattaggcatatccaaagagctaaaacccagtgaagtattagtgagaaactctcccaaggtatatatatatatgtgtgtgtgtataataaaagatctcagttttgagtgtcattttaaataaacataaattggtttatgttaaatttctgagttttgatttgggcttttgcagtttgatgtggaaaggagagatatggataccaggattgatatatgttgtgcagccaaaccaggattattgctttcaactgtgaacactcttgaagcactaggacttgagattcaacagtgtgttataagttgcttcaatgatttttcaatgcaagcttcatgttcagaggtatctacttttgctttttctttaatctttgatttattttataaattttgttatcttttattgaaaatagttttcttctttttagggtgctcaacagaggacattgattagttctgaagacataaagcaagccatattcagaaatgcagggtatggagggagatgtttgtagaagagaagaaacaagagaagagttcatgagaaataataatattaatattattaatatttattaataataataataaaaataaaaaaataaaaaaaagggttttcttggaaaagtttgaaagagatttatgaatcttttacactcttcaagaaactcatttccaagtcacaagttgtgtgttgacaactttgtgttttcttgaaataatttatgtgcttttatctgatccatttatgtagagcatattatgccatgtaaattatctactcaaattggagtaaatcttttaacacaaaaaaaaggatcatttagttcatgtctaacacattaatcaatgtaatgttatttaaataactacttttattctctgtttcttcaatctctaatgttttttatgaaaatttgtgttggatttgactatgtattaaatttatttgtttctatatatgagcctaaacaattattgttgatatttttattgttatttgcaaacataatcaaccaaaactaattatgtctacaaattaaggttggttgatgacctcttgttattatagaagaatattagaacattctcaaatattacaaaactagccttcccattcttaataactcataacaaacattcctttttttttctttgttaactaattaaaatggaacttctgtaaacttgtccttacaaatccagtggagattttcttttatgtcttttttttatagggtttagtggtggttgaagagctagcataatgactaattttgtaaagatatatgaagatgcaatttggtgaaagattctaatgtgtggagaggcaaacaagttgcagagtggaagcacctcattttacatttgtggtacaaacaatcatttctaccatgactaaatatatttatagaatgtatttatttttaaataaataataacaataataatagtttagcaaaaaatagaaaaacaataataataatatattgagtatatattaagataccgtgggggtgggtcattctagctacctaggatcaccattgttacaagaagaaataagagaaagattttggccaaaataaaggacgtgtttaaatttctttaaatttctttctttctttttagaattaaagcttttatcttttcaaaaacaaataaacgaaaataataataataataannnnnnnnntaataataataataataatggtcgtttgttggatttaatcagcaccaaaaacataactaggaacaaactaaatgtgtattttgaagagggagcaaaaatatagatttgggctatataatgaaaaatgaaatttgagtcgtgttgtgtgtcgtggtaataatttataagataggatttgatatgacttgtaagtttcgtatttttgtatcttatcttgctcgtatttatgtatatttcaggttaatctattttcttaaataaactaatttgttttctattgaacttgaattttcgtccggctttttcacttatttttttttttttttatatatataatcaatgagccaactacttaaattattgtatataaaaaataactatataacaattttaacccatcagttaaaataaattagttttttcttttctaatagtttaaattataaaattatattattttgtattatatttgagttttattatcatattcatttatatataacgaatacataaatatttattatcattgtcaaaattataatttttttaatttttgtgcttctaaattaatctattttttgtttacatattgtgtcaggtttaaatttatatttttttctcatgtattattatgtcaatttgtagtattgtactggcaccaccaatttggaaaacttaatttggaagtcttaaaaaaaaattaatattaagtatttcattcatgaaaaataataaaattatactttgagatgtacttagttatactcaaaataatgattatattctattttaaaatatataatgtgtattaattagatgtaaaataatgttgtctgtatttttctaaatggtacacgccgtacgcacactttctacgtgacacatttatcaataaaatatttacataatagactaaaaatttgaaaaaaaaaattacaaaaatacgtcaatacgaaaaaaattattttaactataatataaccatatttgcttttcagggtgataaaaactctaccaagaaacatgaccctcaaggtcagaaaacttatcctcccaaacgcaacaggaatttttttacactcactgtaatgtgcttggccatacagtggaaagatgctacaagatctatgggtaacctcctagatacaaggtaaaaagccaaaggaggtcactacaaactaactccaaggctgcaacgatattaatgtcaatcctgatgagactaacgccttgtttcctcaactcactatgttcactatcaaaaacttttgaatttacttgttaatcaacaatttggtatgaccatcacggatcctagcacttcagagggtacgacaagtattatcttatctcataattctgtgtcatcttcaaatgaatcttgaattatagattcaggtgcaactacacacatatgcaataatatcaggttatttcaattcctatgccttttagctactactcgacttattctacctaataataaacctttacttgtctaccaaagtggttcaattgatgtccctaatcaattgttgcttggtgatgtactatttgtgtcgaacttgaaatttaatatgtgagttgcttaactgacagtaagcatatctctgtcaaattctttactaataatttttatatccagggcaaactcaacaaaaaggtgattggtagaggaagaattaaggatggactatacatgttggacctcaatccatttgttgctcatgtgttgatcgtctcttttgaattttgacatacaagattaagacacttatctcagaaacatttagctattcttagtaatagcctccactgtaatgtagattctttgcacaaacaatctccttgttatatttgtgttatagccaaacaaagaaaattatgttttcctaagaacaatacttttgctcaaaataaatttgatttaattcattggaatgttgggggtccttatcacattccctcacactctaactacacgaattttcttactttagttgaagacgattctcgttttacttggatatacttgctaaaacaaaattctaatgtgataaacataatacctcaatttattttctatgttcaaacacaattcaattgtatttttaaatgtttttagatctgataatgcccctgaattaactttcaaagatatattttctaaacttggcattatgcatgattttacctgttgaaagaaaacaccagcatcttttaaaatttgcaagagctcatttttttcaatctaaagtctccatcatattttggataaaatgcataattacaacccattttatcgtcaatagaactcctactcttaatcttgacaacaagacaccctatgaaatgctatttggaacttctcctaattgtgaacatttaagaaattttggatgtctcatttttgcatccactctaactgcccacaggaccaaattcgaacatagagcttgtgcctgtatttttatgggatatccccaaagtgtaaaaggatataaattgtatgatcttaatacaaaataactctttatttcacaaaatattgtgtttcatgaacat

SEQ ID NO: 24058 - DNA, 1818 bp, Cannabis sativa
acaatcctaaaaggacccaagccaaaaggtaactgaatgtagcacgaattgaattaatatttgcaacaaattatgaatatgtcttccagccccttctttcatgggaaaagaaggggggtgaataaagcaataacaaacctttgttgtgtatccgaattaactatggcatggttcactgtgagaatcaaatccgagttcgaattatcatgcccatcattggaaactccaatggatggggaggtcaaatatctctttggattcaattcttctgaatacttaaattgtggattgcatatttggtatgtttcaactatgtccttggttagtcttgacaccaactgcagaattgaaagctttatgtcaacaaaacattctggttcaaccaatgtcaaaacaatagacatgataagtacaaagatcataactttgcaatattacaaactcaaacaacacaatatcacacaaaggacagtttaaaatatattttcacatcaacacacagataaacatgttataaggcaataagaacttaagcccccactcaatcaaggaaccatgacaacatattaatcatataaatatacctagccctacaatcttaaaagaacaaaagaaaaccataacaattactatacaagtatccaggaggtactagaacctcagaccttcttcaagcaaactaaatgatggtttggtatgcatatataatacaatcacaataaatacaataataaggtaatttcatgagaagcagcataaagaaagaacaaaaattttgcaatataacaaactcaaacaacacaatatcacaaaaggacagtttaaaatataattgcacatcaacacacagatgaacatgttataaggaaataagagcttaagcccccattcaatcaatgaagcatgataccacaccaggggttttaacaacatataatcagataaatatacctagaccttagaccttcttagagcaaactaaatgatggtttggtgtgcatatataatacaatcagaaaaaagacaataataagcactgctgactgaacaaagtcatttacttttcttgattgaaaatgcatgattatccgtttaataacacattttcacatttaaattcatagcaaaggaaggcgatccttaaattcatttcaggtaagtataattgtaaagattgaataagaaaaaaaaaagaagaagaagaatacttacaggtcttctgacgaggactcggagagattgtgatgtttggttgggagtttcataggaagtaaagagcgaatttttagggctccaatgaaaccccaatgactggtggttgtcagagtgaggggaatcactggtatcagtttgagtagtacaactagggctaagttcatccatgaccatgaagcaaaagggaaaaagctacgacttgagcagtggaacagtccgttgtagcaattgaaattgggattcaataattgcataaccaactgactctaatcccatcattcagataaccaatcttctttttgtgttcgtcacaagattacaatcccatcacaatccctaagatctatcatcataatcatcatcatcatcatcaatcaatcaattaattaaaaagaataatccaatttcttcgtgacatgcaccactcactcactaatataaaatcacttaattaattgattgaagctctgagcttgaagcaattcgaacgaagattctgaaattaaacacatcaatcaatcacctttcttcttcttcttcttctgaaattgattgattgttccgattaagaatcggtggtgatgaagttagaaaagaacataa

SEQ ID NO: 24059 - DNA, 1740 bp, Cannabis sativa
cttgaatgtgggacctatagaaaatgatattgtcatcagcaaagaggaggtgggatatttttgggatagttcgggaaatttttattcccactgccctttcctcagcatcttcttgtggaaaggccttcagagcaaaggagaaagatataaggggataaatgatccccttgtctaataccttaagtaggaacagcttggcccagtgcttggccattgatgttaaatttgtaagtgtcagtgatgaggcacttcatgatttaagaagtaaatttgactggaaaatcaaatttcaacatgattttttaaggaaaggccattccaccctgtcaaacgctttggtcatgtcaagcttaactgccatccaaccactcttactagtttttcgacctttgatggcgtgtagaacctcttaagccataaggatattgtcaaagataagtctccctttgagaaaggtactttgatttagggagattaagggattgagaacttgtttcattcgattagctaggatttttgagacaattttggaaacagtggtggaaaggctaatagggctgaagtaacaaaggggttaaaggggatttaactttagggataagggtgatgacatttgtgttgaaataggaaaaatcagcaccactgttgaggatactcataacagtgttcgtgacagaattgcccacagtggcccaatttttttggtaaaactgattattaaaaccatcaactccaggggctttatcaagaggcatttggaataaggcctacctaacttcatcaggggaaaaatcttaattaaggagctgacactgatcagggtagagctaattagctatgccagattaggcctgatccatagcactatcgtaggtattttgtgatgtgaaaacctcagtaaagtacctttcaatctcagacagaatgtcatcaatattgacaacttttgagccatcatcaaggagttggtgattaatgtgattagtatttctcctagtggaagcaaatatatggaagaaacgtgtgttcttatcaccagcatagagccaattaactctagaacgttgcttccagtacatttcctccttggcaagaagattgtccaaatgagattgaagccttctaatcttgaggatggaaacctcagaatggtcaagggatgttctagcctgctcgggattttgttgggcttgggcaattttcttagggaattccaagaaagacttatgcttccattaggacaattgttcaacacaagaatcttgagtagaagcaagtttttggatgggggagtcactgctaattgagtgatcccaagctttaaaaatgactcgattctaatttggctcggaaagccaaatattctcaaataggaaacacctattttttaggggttggctaccattgggaagtttgacatcaaacttcaccatgatggctctatggcgagagccaaaaaataaagatggctaaaggaggcattaggaaaaatcacaaactagtgattattggcaagggcccaatctaatatttcctgaacattactaagaccaacatggttattattccaagtcatacgagacccttgaaaattaagggcttcgacatgaaacttattaataaagtctctaaaagcatctaaaggaccgtttctaatattgccgtaactcttatcgtcccaagtcaaaaaactattaaaatctctcataagaagccaaggtaagggaaaacaagaaatcc

SEQ ID NO: 24060 - DNA, 1349 bp, Cannabis sativa
  modified_base (966)..(968): a, c, t, g, unknown or other
tattattattagctagctagcaatgcattgagctaacaaccataaacattttataatgtttacacttaagactaatgattggactttaattaaaacatctcatcaactatatataaattaaatatccatatctaattatctatatccctatatattgattcttgtgaccacatctaataacttaaacaaatttcaataatctaatcaataaactattaactcaaaaagtttccttacacaaaatttctactttatttcttcacaatttctttcatcttttatatattgaacttctatactcaattcttagcttatatgtataacaaaattacatgatacaataattttgtttttggaaatcaaatctttcaacaaaaaattatatataaaatgcatgtgtaatattactattggcataatttcatattttggatgtcatatatatatatatattaatttaataaataatataaaaattaatttatcgttaggtgatgtacttatgtatgatttagattgtcatatataaaaccaagctagtacattatatattagtagtttgttaggggagaaaaatagtattaatttctatagtaataatggaagcttatattagatttttatttatttatttaatgaggaaaaaagatagacttaatatatattgtagtgcttgacacaatagtcatatatttttcaccaaaaagtaacttcttaattgtcaattatgggagttgatatagatatatagactatttcatttctattcctttcaaaaaaaatattaatttgtatggaatgggactatggaggaggggaatgctttaggttgtagtggtgtatattcaattgatttgatctcccccaaaaagttaaacatgttatgtgattgggccactttaatatatcttattcaaataattttttaaaagtaaccatgcaatatacatatataataataataannntaacaataataataataataagaataattttcaaatagctaattattaacattattaccttaatggtttcaagttcaaatcctcaaattcttctatatatatcagtgttaagatatggccttccaaaatatgtacatctaatcattattattataaaaaatcttactttaatcgcacaaaaacttatgtctaaaaataaaaaattcgtgactaactataattacttttatatcgtgataaaaaagttcgtgactaaatgtattagttacaaaaattatgattcgtgattaaatgtacttctagtaatattgtgactaaaactaaattagtgacaatttatatttaaatattatatttttgtcacaagtaacttattttatt

SEQ ID NO: 24061 - DNA, 2268 bp, Cannabis sativa
gcaatctctatttacaaatttaaaacccttacaatcaatcaaaagattagaagaaagaatttccaccaaaggaacaccccactcggctctaagagccttctttgacaccagctgttttatcaccgtgagactatcagagcacacaaaaaaaggctggtgaagcactttttgcatcagttgagccccagtttaatggctaggacctctgccatcagcaccgagatgtagccctctgtgtacataacctcagcagccaccagatttccctcttgatcacgagcaacagccgccataccactgccctgctggtgtttgccgaagcctgcatcacagttcaccataacagtaccagcaggaggaggacaccatatcaaattcctttgttctgtcttcgtattactgctagtatgggtgtgcataagtgtgttgtctaggtagtctagagcccaaggaatccagcttctcaaattagtgttcttcttttggaagatacgctggttcctttggctccaaaccagccaactcaaccccaagaacgtgtcaaatttctgttttgagcactgattttccatgaacattaggaactccaaaaagatctttcattaacccgagacttgtgggaaataagtgccaaaatcttgtttctttccaaatcactttcaggctaggacatgtccaaagagcatgcccaatggtttcgtctttgctccaacaacccgaacacgtttgatcaattttaatgcctcttttaaccaactcagtcttagtaggaatccagttatgacaaactctccaaatgaaattcttcatcttcggagttaagtttgagttccaaatccccttccaccaattcctcaccattactttgttggatgtctcgggtccctgtttctcaacacagtttaacatataaccactagaaaccttgtattctccatttgttgactcatgccacactaattcatcctctccaccatctcggtttgcttgaattcccaaaatccagggaatatcctccctatgcatttcctctcgtatgttttttatatcccagttcccattttcatcgaggaaggagcctataaatgtatggggagggaccgggaccttggcccttagacgaaaaggatagcctcgagggatccacctatcttcgtttattctcactttgtttctgttggtcacacgccatcttatccccttcacaagaagctcacgaccccataagatgcccctccacacattagagcaccaagttccaagaccagcacctaggaaatcagtatttgggtagtagagagcctttaaaacctatccgggttggtgacgagtttccaaccttgttttgcaagtaatgcttgattaaagtcttcaagattccgaaatcccatacccccagaccacttgtccttacacaacttctcccaattaccccaatggatttgatgtttggttgtcgaagatccccaccagaatcgagcaataagagcttgaatctcacttaagaggcctttagaaattcgaaaacagctcattacgtacaccggaattgcttgaataattgattttatcaacacctcacgtccggcttgggaaaatagacccatcttccatccttggagtttttcccacactttgttccgaaccaaaccaaaagcttctttcttgtttttaccaacaaaggcaggaagaccaagatatttcgaatggttctcagtaaaagtaactcccaaagctgaggcaagccattggccatccgtgctcttaatcttattcccaacacataaattggatttggtgaagttgatgcattgtccagataaggccgagtaactatcaagcacttcctttatagctttgctttcttccattgtcgcatctacaaatattaagcaatcatctgcgaacaatagatgtgtcaaccttcttcttgcttcatttaacaaacatgacagcccctccgagcaaattagaaataagaatggcgaaaggggatctccttgcctcaatcctctctttggaactatgtttcccctagcttctccatttagcaacacagagaaagtaaccgtcttcacacatcccataatcttgctaatccattgttcctcataacccaaacatctcatcatttcttctaggaaatcccattccactcgatcataggcttttgacatatccaatttgagagccatcttctttccattcccaaaacgacccttcttcatgcaatgtaagctctcaaaccctataatggcgttatcttga

SEQ ID NO: 24062 - DNA, 4829 bp, Cannabis sativa
gtattatattatattcgaaaataagtctacgaatatgtacattttgctcttaaatttttcattatatttgacgcgttcaaatgttaatgtgccatattcttgctgatcaaatgtaggcagaaacaatcaattcaacagataggggctttattcttgctgatcattgcagctgttcttctgagcattggtgaaggctccaacaaaggttctactggtgtcaatgctgatcaagttttattttatggcatcattcctgtcttggttgcctctgtgctctcaggtcttgcatccgccttgtgccaatgggcttctcaggttgcctagaaatttactctctttaataaagaattatttttaacatttcctctgatcttttgctgtgtgtttgtattataggtcaacaaacgttcctcatacttgatgactgtagaaatgtccattgttggaagtttgtgcatgttggctagtactttcaagtccccagacggtgaagctatcaagcaacatggattcttttacggttggactccattaactgtggtaataatcttgaatatggtatctttcaccaaaagggaaatacagatggattgcttctttattattttctctgtacaaatgtagttacaatggcctttcattaattatttctgaaaaaaaaattgttttcctctttccagatcccagttttgttcaacgctttcgggggaattctcgttggccttgtaactagtcatgctggtggtgtaagaaaggcaagtttgactaatttctataatttctataactaattcatctgaatgatctcaaactcagcttctttataatatatttactatcatattgaccagtaaaatcaaaagaaaatatgaagttgcatctgtagcattgaagttagcacctgtaattttgtaactaatcaccttagccttcatatttccttgaaaatgtatttgatcaaacaacacgtaatggtttgtaaatcgatgaatatacttatttgctggcaggtttagctttttattaagcactctgatagaaatgactgggaggattactctattgttttagtactaatttcaatagtcattaacacatcataagctgttttctttatcatatttgcaggggtttgtcattgtttctgcacttcttgttacggcattgctgcaattcatttttgaagggaaaccgccttcgatgtattgtcttgtgtctcttcctcttgtggttagcagcatttccatataccagaaatatccatacccaattaaaaagaaggaacactaaaatttaatgcttaattatgcaaagtgttcatattaatcagcctttattagttaccattgcaattggagtagcttgctgcactttacatagatgttagttagagtttcttttagtagcttactagcttctatgtttgctgtgatcaaatccataaactagatggatgataaattgttaagacacaaaagaattagaccatctccaatagagatgcgaatgcaaaatatagctcactttgttaaaagtttactctaatagtgtgttaaattataatgcaaaaatctcatgacaataaatgctatgttcattaaactatttttaatattttattattaaattttatttacgggtccggggtcccggatccaagtctgggttcgggtccgggtcctgggtcccgagtccgggttcgtttgggtccgggtcttgggtctcgggtctcgggctgggtccgagtcccgagttcggtccgggtttgggtcccgattctcggtccgggtcccgattctcggtccgggtcccggatctcgatccgggtccgagttcgggtcccgcgtccttgtttgggtcctggtctgggtctgggtccgagtctaggtccggattcgagtctaggtcccaagagatccgagtcttgaattaagttttttttttaataaattgaaatcgagtcagatcatattcgatccagataaaaattaggcgaggcggagcggatctgatctgatccaagatccaataagtattcgaatgtttcgggtcggagctccaacccgctccaactaaatggatctttttgacatgcctaggcaccagtggtgcctagcaccttctcgacatgtcacgttgcgattgactaccgatacttcttaaaagttattatattaaattatgtgggacccgatacttagttggaccaatagcgatactaacacataggagggtgttagacaccacagatgccctttagcatttctcttaaagatactaataaaataataaaaatgacataaatataaatgaaaaagtaatgcatctattatggtgtaaattttatatcatagcaaatgttgtggtaaatttggcataaaatttgctatgtgccaaatttacatcactttttggcacactattggagtagactttttgttaaataagctatattttaacttttcaccacttatttacacctccattgaagattctcttatacctatcaaagtaaaagatgtttttacaaaaatattgaattttaggcaaaagtttacaattttactatcgcacgaaattttttacaaaaatattatctttttataaaacaacataaaataacaaaacaaaataattaaaacaatagtgaaataactaaaaaataactgtggaacaacattgaaaacttaaaacagtataaaactttcatagtatttttgaaaaaaaattcgccttatagtaaaaaagttgaaaattttagtttgtcgtgtaaaaatcttcagtaaaaatgtagatatttactaacacagtcctgtaatttgacgccatttaccataatttgctatgaaattttttgagaaaattacattgtatacccattttattttacttgctttagttcttacttctattttcaaattttttaagatatacccacttttatatatgatatctccattagaccccttaggctaatataaattatatgctagacttaaataaagactgagagtatattggacaatctatttaaaaaagtgggtatattttaataaaatataatataaaagtatttttaattaatatataaaaaatgaggtatttttcaattgaggaaattacactctataccctttttatgttgtttttttttttatttttatcctcttttttaaagtctattatttttacctcttttttaaatattgttccaattttgtccctgtcacttcaagatgctctccacgtgagtcttttatggttggtagagtattttgggtacaatgcatataaaaaaaaagtatgtttcatttaaatatgaaattagaagtaaatttgatgaattaattaataagagtagtatatttcaacttaccccttttcaatttatccataaattttcccaattctaacgaaggtgggctttatttaggatcgtccggcccattcgatttccatttcattaggggaaaaaatgcttgttttcgtcttcctttacagtcccgcagtgaagctcagctcagctcagagaacgaagacgaagacgaagagaagtaaaccatgggaagcagactcggtagaagaatagttcactttgctaacctacccatcaagcttctcatgcccactactttcaacaacatcacagaaatcgctctcaagaccattccttccgcttccaagatcgaaatcaagcgcgttctcgaatccctctacggattcgaggtcgagaaagtccaaaccctgaacatggaaggaaaaaagaagaagcgcggtggcattttgatcgccaagcccgactacaagaaggcctacgttactctcaagaaccctctctctatctcgccggacctttatcccattcggattatcgaggaggagaagcggcagatgagtaagcagtcgaaatccagtgtggtcgaggaaggagagaccaagaggcattggcttgatgggaagaaggaggatcaaactcacacacagactcagagatataggcctggaaggtttaggcccgagagggttaggcccgaaaggacttcttccgtcagtcgcggtgagagcgaggctaagttcccatggagcagcatgaggtcttctggtgctggagctaggtagttctttttctttcatttttatggaaatgggtcttatagttttcagatgttctgaaagtggtttatgctatctgagttgagataatgaattattgctatgtaataacctttctttgatgaatttttgttttgtaaggacacagataatgagtaatagtttttcttcattgaaattatgcaaatttgtttttatttttttttactcataaaactttatgcataatactttaaacttgtaatgttggagaagttgggagtggaaggaagttgcacgatgaatatgataattgtatttgttgcaaaagattacaaaaaggtagagaaaagacatatagtattatagtgtgcttttttaagtaatgtaatttccggtgctggggaagggatccttttttattgagattttgtagctgttattgtattcagtttgtgggtgatggactacattacttttgtgtgtgttgtgaagaggggccactagtgaaaacttaccagacttgtgacaagagtgaagaaatataggcaaatgatgtgttggaatccgggtagagagattttgagagtttattgatagtttttgtttttcatcttaagaacaagtaaaggcttgaacttgttgtttagctactgtttggtaaaatgactttatatgaaacattttgttctatttaatttatttgatttgatttgaacaatgacaaataggaaatt

SEQ ID NO: 24063 - DNA, 2648 bp, Cannabis sativa
aaaaaaaaaaagagaaacaaatgccttacatatatatgaaaaaatgggtttaaacaaaatactggtcaaaattattcgtaagatctaatcaaaattaaataaaattgtagaaaatttaaattaagttatatatatatattgttttaaaaaaaaatatgataaaattaatgttacacccaaaaataaattagttattataacagtaatttcagtgattccatttgattagtaattgatgtttttgttagagagcacaattaatgtgtaaaaagaaaatagaatatataaaatttattagttaattaccctttttattgtcaattaattatgagataagactccatacactttaatctcaaattctaactaatgttggattattaactacaaatgaaaaaaaaatatatatatttgtaaatgataagtgacaaataatgaaatacatccaaaaggtggttgataaaaaaattaatgatgaacaaaatgtgggttaattataatgaaaaggaaacagacgtagataagtgaagctaaaaaagttttaaagccggaaaattattttatttgttttggtcttatatataacattgaatggatataagtgaatttatgttggtgctgtgaaagtttgacacgtggatataagtgaatttatgtttaatttattttttatttttttgaataaaatgaccaaacataagttagttttggtgaagctaaaggcaacaaaaattagatatacacctacaaaaaatagataacaagaatttagaatttttaaaaaataacctcataaagaataaagagaatggagtgagaatatgtttaatttttttacaaattaaattattaaagatattcatttgcaggacctaaaaatttacgtactacctagaggcgaaaatgaaaaaaaaatatatattaataaaaaagcaaaaattttataataaaatagtaatataaataaaaaatttaatataaataaaaaatttatgtaaaataataaataaattataaacaaatgttatatttagttttagaaaaaaaaaaaatcacgtgtggggttagctgcctccactattgtcttcatttccattgggcactgttaatgtgtgtcaatccaatgagctaaaaaaagcattaattattattgggtacatatatttttattacattaaattatatataatttaatatttaatactatcaataataatatttattaaaagatgttagacattattagtactttttaatatttttcaattaaaaattatataaaaaaaacaaattactatgatacactaccctaatctttaccccgaaattataaacttatataataaatattaattattatttatttatgtaaatttctattgctaattatattattataattttagtaagcaaatgataccagtatatgaattgtaataaccatacaacgctaggggttatcattgcttgtttttaaattttaattgcttatacatatattttgtgatgggatgggattaacttaataataggatattgggattaattatatattattaaaatttataagaaatctgaaatcgtataaactgttcttctgttgggtgtactacaataatggaagatcaacctagggtgtgacaaaataataatagaagacttgggcatgtggcacaacgtgccatacacgtggacggacggcccactattacaattattaattatttatttcaatatttatattgagtaccaacaatgtctataatttttataatagcgtttctcataattaagttaacgatattatttgaaaaaaattcatttatatgaaatactaataaaaatattagacactaataatatcttttgacaattctcttgtaagaatttattgttataataattaatgcattatgtgtaagttcagttttacacgcttcgatatagacgaaaaattgtgacacaaatactataacttgaaaataatacaaatatgtttaagtgattcatttaatttttgtatcatgcataaacatgttcataggtttgttaatcatattttttggaggttaatatgttttatttgaaaataatataattatagcacgtataaaaaactgtaattaagtattttaattttgtatattatgtaaataaaaagaaattatatcttacaaaccttattttcttcttattctcctaagaaaaaattattaaatattaatattacaattaatgttaagttatagtatatgatatcgggtggtaaatgtgcattttgatttgtgtcatacatatgatatatttttattaaatgtgtgattcgtcagggtcagtcttaaagtatacgtggtttaaggcaaaatcaaattttaaagcttttatatatagtctaattattatcaaaataatagttctaatatagtgtaatggtaaaatttttaaaaattcttaagagtttaattcttcatagctacaccctcttagcttaaagtaagactctttattactacatcaaattatatttttttcttatttaatattttatctatatactaatattttttttacaatttcgagaccctaagcgttcgaggacctcaggttcacacctagttatcgtgttatgtctagttgtgtaacttgtt

SEQ ID NO: 24064 - DNA, 2782 bp, Cannabis sativa
tttcatgtaataaatttttaaaatatataagtttttaaaataattttttttgcacattttttataattatgttgtttttgttgtacatttatgaaaaaagccctaataaaaatactaaacaccataaatgtcttttaacatttctcaaaacaaacaaaaaaaaacatcaaaagctaaatgtaaagcaaagcactattgtgctatccatagtcaagctgaattttgttaaattatgagcctcaacatttttagttggtgtcattagtagacattgacagaaaaaaaaaagttaatgttgtatttgactcactctttatattaagtgtgcttcaatagtcaagatttaaaacatgtaaaaaatatataattattattatttattatttaatattttattaaaaatatataaaaaatattatttttattatttaaataataatatgataaataaaaaaataaagttatgtaaaaaataataaatcataataattaattatactataataaataaaaatataaaatttattgtgtactaaattagtaaatttagtacaatattatattatgtgacaaatttaacacaatttttagcataagttaaatttgatacactttttataacactattagagtattttttttcttcttaaatgtactaaaatataataacacattacttttttagcactttattggagatgttttttttttttttaaatccattggagatgtgctaaaaatatttaaatattcaattacaaacttttttatacacctataattaattattttttatattaactaccaagtcataatctcataatagagtatggcaattggaaatgctatgagtttgattaaaatttattaaaaaaaaaattatgtttgtcccacattgttcatgtgtgagtaatttatgagatttatattacactcaaagctaccaagttataatctcattataagattttagtaattcgatcaatggagtttgattaaaaaatttaaaaaatcgtactaaaatacttttatattatctaaaatgtgatttagaaaacagaaaaaacacgcacaaattatgcattttttttttaccatcaacatgtatttattaaaagagtaaaaaaatttgttacaactatttgaatcagcacagatctaataataataataataaatcctaaatattatttcaaaagtcatattttttttttcttatccattaaaattctatatataatattaatattggtcacacgaggtaaatatttttttttaaataattgaacatagaatagaaaagtaaggaagaggaagaggacaaatcatttgtcaattccttaagcaatttcttttttaagtttttctatacaaaattgatatcctaaggccaatagggcatgctcagattcccaccaaatacaccagaaaaagatagaaagctatatatgtacacacacatttaatatttgatgtggaatacatatatttatttatataatcttattttattttacaatgaaaaaaaaaatattatccaaaagatcaccaaatccatacataagattcattgttttgatatatcataacttgtattgatagtgattcttttttcttttctttttccttggattcaaagttgtcaagtctagctgtaaaaaggaaactgttggaattggacttgtggaaaagataatcaaaagtgagcttatttgttcctttgcttttgaataataattaattagttacaaatcccatttaataattaggtaatacaacacaatctgtttgattgcaccaaaattttgagaaatgacataaggttgaagttttggatagctacaaaactagtcactgttttggatttttttttttcaatttgcttacaagtttacaattactaaatcatgcttcctgaatttatttttaaaatttagtagtggtaataatttatgggcaaaatcctaaatgaccttttaaataaaatattcagaaaggtatttatgactgtaacaagaaactgagaaaattcaatttactgtttgtgagacagataacaaggatttgtacagagaaagcaatgaaaggacaattcaattagcaatttaacaaacctaagaatgacttcttcttggtctatatctcaaacttcattacaaaagattctattcagagaatacaaaaataaaatatacaatagaagaagacaaagccttacagcagagagaataaggacaacaaacaagccgtgacaaaatttaataagcttttaaggtccatcatctctgtatagagtcatgaaaaggagggaacaacttcaatatcataataaaggacaacaatttatttccatgttttcgaaattaacacaaaataatgccctcaagagaaagaaagaaagagattaatggaatcaggagaaactagtgaaagatatgaagttcataggagtgagtttgttgttggtagggactaatgtttatgcatgaagaaatgagcaaagtgaaccttgagtaactgagttagttcagacacttcagataatcataaactactacaaattaattttgaatatagtaaatatttttatgtcacttcctacaaatccatatccagtcataacattaacaacaaacctccccatggaaacataagggaagaaaacttgcaagtaaatagggcggaaaaatcccatgacctcccaaaatgcagagcctaataatagacaacactcccagcctcaaatccttctataatgtcttatgatttcagatatatatat

SEQ ID NO: 24065 - DNA, 6237 bp, Cannabis sativa
  modified_base (2988)..(2989): a, c, t, g, unknown or other
  modified_base (3020)..(3021): a, c, t, g, unknown or other
  modified_base (3047)..(3048): a, c, t, g, unknown or other
aatagtgtatctatcaaatacaaactaaaaagagagtaggtcattacccggtaactaagagggccaaacctctataaaaattcatgtctctttttactttctagttataattgtataacacgtggcaagcatccgtttaatatgacttcgctgtcggtttgccactttttgaggtcaacagtttggtgctttcattaagagaaagttgatatcatatttgatcaaatgtcatggttaacatgagaagaactcccattgcaccatctgcacctttgggtcttcctcaagacccacagactgcaaatcctgatgtccatgttccagccacgattggaattcccatggacactgcagatatggtcaatcctgctaccacgtcaggtactacaaatctgacatctacagttggcaagagtgacacgaacatcctggtggatctgaacagcaagcctttgcctccgagggaggaccttccactgacgcctcccactgaaggaaggacccttggggaacagtctcaggaacaacaaccggacctcgtccccgatactatgcaggagacacgagaccaggagttggcgagctcaaaatttctaaatcttatttcaaaatttcaagtgatgagctcaaaattttgcattcttaaacttctattatgctgcaaactttaatgcacaaattagtagtagttgtctgtaaatactacaagaaaattatcttatctcaatgattcaaaacccacgagatagacctatcttagcagttatcaactgtcgaggatctgatcgtcaagatagaggtaatgaccaatctcggcacttgggaactgccgggatagggtaccctatctcagtagttttaccttgaatcgccgagataggttttccatcatctcacaattttgagcaatctcgatacttagaactgccaagatagatagcagtctcggcggtcaccttttgaaccgctgagattgctacctttctcgacactaaaaaaccattgagataagttaattacgacgggtttttaacaacctccgtaattaattttagtagggataaaagataattttaatatttaaaaactttttcctgcatcgatattcacagtatatgcaaagatatgttgtagtaaaatattatccaataaaattcataatatatcacttttcataggttttataaatggttataagtatgacaactacaattaattctaactataaacctagctaagattatacttgctagcaaaaaaaaaaaaaacaatagtaaaactatgctggaaaatactcatgatagtagtcggcccattcttcatgcacagtgttaatatcatcaattgttattcaatcttaccatcacactgcaacataagtgtataaatcaaatttaaactttatgttagtttcttaataatttaaaattgattaaatttagaacaatatattaattacgtgttttgaaaaatatttatttgaatattttgtaatagttaaattttttattagctgcatgatttaaaaaccggacataatgttattaggttgcctaaaaatctacatatatataatatgtatttatatttgatttatatattaaagaaataatcaaatgaagtacttttcaattttagcctcatacttgattgaaaactaaattatgctcttattctactagggtcattattattattggtccaattaattatggggttccatataatttaatgtaataacttttagaaagtatcgctaatcaatcacaaagtaacacatctaaatgtgctaggcaccactggtgcctaatagcaatgctcaataattaattgttgtggttaattaattaaatgacacggccttttctgattggtttgacaggaaattggacaataaattttgacaggggatccaactccatagctactctaaaacgtgatagttagttacttacatcaaatctaaactaacattgtacatttttattctatggtggttattaattgaaaaacaaccttataattagcctgttcacagtatcaaagataagattaattggtctttgttgtggttttacaccagctcatatacaaccaaaatagcccatttcctagttaggcataacaatttacagatcaaaatctattaatagaaaatccttctatttttcttataaaaactagaaaaatatacctctattcaattcaaataatcccaagcagaatataaaacacatttctaaactacattgagaaagaataagaggaaagaaaaacacttctaaaatggctaacaaaactgtcaatattcgagtcctttcgatgatgttggtcgtgctactcgttggggcattttttcaaacaggcgaggcgctttcggattgcggtaaggggtgcatgcctgtgtgcttagcagagaggggtgcaactattccaatgtgtgagatagcttgtgaggactattgtaggcaaatatctgcagaagattcaaactttgggtttagtgatattggacttggaatttttaaagatggtggtcattaaagattgacttctatacttcatttattgttatttgttgtaataaatcattcatatacaaataatatttattctacatattcaattgttgatgtatgccatggtactaactaatcaaactcaagaatgagtgttacaaccacgacaccatctctctctaataataacaaataaagcttaagccggatcatatagggatagtattgttaaataagaaggtctcaatgtttgtataaaactttgtatttattattaaataaaacttggtattaaactcaaaccgtgtatactaggaatgacaaatgggtcgggtccgacccgccctgacctagtagaactctgacccctcgtcccgttagcactcttgaactgaggcgggtcatgcccgacctgaactaatcggggcggacttgacccgactcgacctaatccaaatatttatttaanngacctaatccaaatatttatttaatttattnnatccaaatatttatttaatttatttnntttttttttaaaaaaataattgtatgttctttagcataaaaaagacaaatgtctaaaaaaataaactaattctaatattttttattataattaaaaattaattagtaattttttatttcttagaaaaaaagactaattaaaataatatttgtgttttatcaaatatttgaaaatattatacttaaaacattattctaaaaaaataaacttcgaaaaaagctctatctatattttgagttgagttaaattgaagttcaaatatcaattacactcatattactaataacaaaatatattaacaataaaaactaacaatgaaaaaatatatattttaattatcaagatcaacaacatagacttcttaagaaaaagtattaataataaaagttaaatttatttcataaattacaaaaattaaataattaagtaccattgaggtttaaaatcattatctttgtaatgactacataattagacataaaaattagtagctcattagtgatttagttactatttatgttacatatgtgcattagtactaattaagatctattgtcagatataggtatttgtaatataatttctcatttataaaaattttattgtactttaagtatgcggtgtatattaattgtgaattttaatatttttaagttttgtacccggtgaccgtggaatctcacgatttggtaaatagaatcacatagatatagttgaatatcttggttttaataggacaaattatttagatatttagaatgttggagttgagcaaagttatgagttttgacaattttacccttaaactctaaggttacttcctaggaaagaaaattgcattttagtctttagctctaagattattattagttgagttagtgggagttttataatttcattaagtcttttatgagcttattattgttttagatgaaacaaaagaacttaaagacaaaagtcaagttaaaggataattataaaaaaaattcatcctcacatttctttctctctttcttggtcggcctcacctaaaactcaaaggacctgaccctttttcactcaattcaaggggggatctcaggtaggttttgaagttcaaggggtaagaaagaacaagttgagccctaactactttcttctctttaaattcttaagctcaagttggtttcgagttgagttttgagaaattacttctattagggttttggattgttagaaattgttttgagagctgttttagagttgttttggctattattgataagttttgatgcttgtagtgaggttaaactgagtttgaccttttgaatgcaaatttaactaaacaatgacatttttcatttatgagctttaatgatgccatttctagatgaattgtgtttatattgatgttattatgtattctagagattttggttcgatttgaggtaaaattgaactaggaataggaatttttgtattttttgcagtttaacagtccaccgttttcgcaggcagaaccccaagaaacggtccacagtttggggatccgatttaccagatagtgtgattttaggagcctcaatttttatgttttcttgatgtttggggtattttcacgctaattatcaataggaaaacttctaattgttagttgaagtccctgaaagcgagttaataggccgcttacctattttgcataattgtgacttaagacctcagaatcgttgaacaatatttctaatcaagttggttgggatacttaattacgtaagtgatgtaagattattataaaggatgcacatatatatgttgtatgcatgtgttatgaaagttaagctatttctaccaacaatagtatgtttgatatacttagtgtatgtggtatagtatatcaagctagctctaccaacactagtacactagtgaatctgagtgtatgtggtatagtgacttaaactaatactactaacactagtatattacaggtactaagtgcatatggtacaaaagttagaaggtttgaactaccctactaacactagtgcgttagaggtacatagtgcatatggtacaaaggttagtagagcttcaagggggtacgagctatttgtactcttgtcaagaatgtttgagactcgtacgcgtaggacacgtgattttataatagtgaaatgaataattggttatttcatgtattatcttatttttttttggtgagtccttgtgactcacaggtgtttagtggtgcaggtaaagacaaagaaaagctagaacaatcatgaggtgacagtcttttacagcaatgtacatattgatcttatcggcctgtgtgacgagttgtcagtagttgttttggggtgtatctgctgtgtattttgctttcatattttgacttgttgttgtatatatagtctttttgtaaaatttttacaatagtaatcattggaacacagttttagtgtcgttatgatatctgttttcagtattttatattagtaaagtttttaatattatcacgaattttaataattaattaatttattagtactaaattagtttataaaatcacacacgtgcgtcccaataaattagggcaatacatataaaaataaaaataaacaaataaatcacacttacgaaccactaaccacaaaataatcaaatataatgaaacaactcataaaacacccataaaaactattttagagaataaaaaaaaatccaataccaacaccaaaatcaatcgaatacaccatcatcaaaacacataaaaaaaaaaaaacactaaaagccaatcaagattaaaactcattaccctgaaaaaaataaaaaaataactaagagaaagaagaacaaaaattacaaagtaccctagcactagagcggaatacacaaaaatcaaacaataaaaaaatactgaaattaaaaacactaatacccattaccataaaaatattgaaattaaaaacacatatacctattactattaccaaaaaacataaataagcaactaaacaaaaatggcaaaaaaaatgtacaaattacatacctattaaattcacacgattaaaccaattatattaaaatttgtcatacattgctaatgtgtagaaataaattttaaatataagatgaatggactactcttccattgtcaattagttttgagatagaaccctactcaccttatcccaaaatggtatcaga

SEQ ID NO: 24066 - DNA, 7630 bp, Cannabis sativa
  modified_base (2694)..(2696): a, c, t, g, unknown or other
tgggaggggtagttttggaaaattggtaaaatagtcatacattacaaattttaataagtatgcatttaagaaaaaaattataaagttatgtaggtatggaaattcaaatttcccttttattaacctaaataatgaagaaagggtataataggaatattacctagaaatgtgggtataaatgaaagaataagaaacagaaggtagaaattaaaatgcttaagctaaaacgggtataatgtgtaatttctactatttattatgtaaactatacattatatatattatattatatatatataaagagatgataaaaaaaattaatataaaaggttttgtgcaatatctgaagctaccatatgcttgagccgaccctgcaagaagggtagcatgaaattagcatcctcctttttcattccaataaaaaaaagtttaaaaaaatacacaaaatgtgggaggatttttttaatctaattttttatgatattttttaaattcttacatttttattggatatgtttagtttttatattttgttttttctcttttagaaccagtttcttaatatttatgagtgcattataataattaattatttgtgttattttttagtttgttttttatttaattattttagaaattgattttcgatttagttatttcatgtaactaatttgtgtgcgttagttttcaatttagttgttttatatggtcagtttctttgtgtcttactttttaattaattaatacacccaactggtttctatgatttttttaaattaactgattttttcgtttcaattgatcttttattatttacggatcttatttcttaattttaatagtttctgtatttaactattggttttgttacgtaagatcatcttcaatgggaaatgtaaaaattgtgttatatttagcacataaaaagaccttgtgatatatttgcatcaatttttagcattcacaattaaaaattttgatacaaattaatgtttttattgaaattataaatataataataattttatcattaattttattattattttattatgtaaaataataataaataatataaataattcatgattattgttatagttaaatatactaataaaataataaaaatgacataaaaataaataataaaattatgcatttatggtgatgcatattttatatcatagcaaatctagcgccaaatttgacacaacatttatcatctaccaaatttgcatcaccttataacacactactaaaaaaagccctattttttttttttttttggctgagttggttatattttagcattgaatcatttatttacatctccattggagatgatctaagtttaagtttcagattttgaatttgttattttatgaattggcttttgtatgtgagtttttatttcggctgctttacgaaattagtttctctgttttaaatttttaactagttgataaatataactagtttctttgtatcatatttcagcgttcaactttggtgactttccagtgactaagaaaactctgacgactttttcgacgatgatgattcttgtaatttttccgacattcaatgaaaaatttggatgactaatccaacagcaatgacaaatttcaatgactattccgacgataataattgctttaacaatttttccaacaatatttgtttttaaaaatattgttaactttatttatggtatttcatgcaataagttttatgcccataaaccataaaaatgtaaactaacttttcttttcccatatatttttttttggggggtaaattctctgagaaagccttgtaagttatagttgcatgcattatggaaaaataccaggcattcatcgaaacccactagggtttaattttatccaactttaaaatgttgatgttatgattccagacaaaagaaaatttattctacatacttgagactatcgagcaattacatcttcaatagcttccatctatgacagaatggaaaaaggcatccatgattttgcatagaaatagtattattgaagtgaacaacaggactgtttgaatcatttttacaatggaacagaaaacacattagatcaattagagataaggaggcttggactgcatttttgatttcttatgctcttccgagaacccttcctaccctgaaaaatcgactgattaacctagtaaattaagaggggagataggctcaaactgatccttgttcgaaaggtacacgcacaaatagccggccatgcagactaacaacagcagatgtgtgaagtggatcaattctcgccggcaggcttaccacctgaaagccaatccaacataaatgttcttaattcaacccatttaaattggaggaaggtgaacaacaacagatatagagatataacaacattcacggctctttacatttcatattacaagtgtcaatctcatactactgtaggctctcttctcagttattagttttttcagtaaatgtatgatcaaataccttctgaaatggtgtaataccccaaggattgtcaagctgttctggttgacctgttatgaccaaacgtccagctggatctgattgaactcgcacctgagtccaccataagagttgaacataagaacataaaagcaacaccatatcatagaaaagccattattatataaattcatataaatatatatatatannnatatatatatatatttataaattctcttccactgtcttcatttcttactttccacaaattaagttaaaatcgatccgcatatcatttcagaaattgacctcccaaaaaaggggggaaatcacaccatagaacatccaatggttatgttaataagtacatgcattttcttttctgatttggtcccttgctttccacaaaagcataataaacaattcttacacatcttttgacttcccaatcaactaaatgaaaaacttagcaactacaaaaaacgagttgaatctgctgtcttgtgaaacaagctaaaatattacacatcaccaagtgggatgggtcaaagggataaggaataaatttcctatcaccctctagcgcctatacgttaacgtctaaaatgtagtgacctcacatcataaagacaaaaatgtagcatgttttcctcaatggagtatagaaagttgacatgaaacttagaagagtaatacagtatctgctactgaatcagagcaaacttataacgcacaagctcactagcaaacatccataaaaacacttatactacagactatgagaagacgaaacaaataagcagaagattgcaacctctaatctagatcaatattaattgttaataattatcaaaagtgacctaataagattaaaactgtgcttacaccggtattacaaattagacagaaacaaggaaattgaaaaaaaaaaaaaaagagggggcggggggctcaagtacctcttctcgcaggagcccagggactagtgcatatatctcgaagcaatccttctgggaaagtacgcagcaaatttagttatgattgtactaaagtttacatcaattaagtaatttggagactagagaagaatattatatttgattagaaaaggaaggccttatgcactatagccaagtaaacttactgtttctcgcacattaatcttcacccaatcagctggaggtccgacatcaactatagtagtgtcaactctacaaaatgcaaaccatgagtcgttgattttatcgaaaaattacacacaaaaaaactgtaaatgcatggaccatccaccctctctccccgtcttggtttgggtgttgatgggaggccttagtgaaaatcctgtacctcttttttttcttacatttttttcccctgtgaaaattgtaagggaggataaatttgttttccttgaagaatgttaacactgcattttgaccttcgttaaggccataaagcaaaaccttcataaactatagtattcctagtaagcattttgacattattatcagtactagttgccttgttatttctcaaattattaaaacagtctcattttggtccttcaattattcttttggttcatacacttataaaactgttttttgtttagtcatttttcaacattttccaagaaataaatgtttagggaccaatgcaataataaattaactgatagtgcccataaattaacaattttttaacagaataagacaataagtcttcaaggacaaatagtgatcaatttttaatcaacagacagtaaaattttatttttatcccatacagattctttcatctcataaggtaattccaacttcaaatattcagaaatgacattcagtgagcattgttccattcattcttctaattcatgaagataaatgcagatgcaaccaaaggcatgaagcattgaaatgagttaaatttgtaatatattgaaagaaaatattcgtaatattaactgcttatctgctgcagctacaacagctatagttttctcagcaagatctagattggggggcttgtgtttcagggaccctgatgaaaagcacaaaagtgtaaatgaattttggctcacgatgcaagttggcataaagaatttttgtcacaggagctcataccaatgcttttaaggtttttttcacgctttgatgcagaatttgagttcttgtcctattaaccgagagaaagtaaaaaaaaattgttattgttgtaaatgtcttggatggattaaattacaagaacattttgttaagcatgagaccttgccctaactgtaattacttgcaacacaagaaacttaatttaatactatattactacaatagaaatgacattattttaacaaaccttagctataggctcagcaacctcaccatatccaataagacgctgagcatgccaaccctgcatggcgcgggctgcagcatcccttcgtgccctacctgatccaggagtttggtaactacttgcctatacacaaaattaatgaaataaagttacctaaaaaaaccgttactaactaaattatacaaattgatcaagattgagaggacaaagtaaaatggggatgcatgtatgtgggggtattaaatgtaacaaagaacccataaaactataagcttgggcgtattttaactacatccagaaaacataccaactatgtagaaactaaattttacctccttttcaacattggtagactgggaaaagggtccagctggaagttggagttcaccaacttgccttttatgcttttcgtattctaaaagggcctgcacaaatcataaatgtcacagaataaaaaacaaaggtgcatttgtagaaccctccatgacaagtggcactgatatgattacgaaaaagataatcatatcatataaaactaaaagaagaaacaagtagaggaaaaataacatactgccctacacacacactctctctctccctctccctcatcttatgaactcgtgagaagttacaataagatccatatattttgttgccggttctcaatcttgaaacaaataaaaatgatagaaattccgtcacatatgtaggtcaactaaggatattcaactacataatattaccttttcataaaatatgcggaatgtccaagagactgttgtgcatgttctgaggaagtaaaaatgaagagattaagttcatttactgaaataatgtatttttcagtgaaagacaaataaaagtcagtaaataagtgtggtttgatatttatattaaaagcatcaacatatgatagaaacattatttttactgcatgagctattatagtacagtaaacaaaaaggacaaaggaaaataaaaagaaagaaagaaagaaagcgtgtgtaacaatagaaagctaattcaaaacataaatatcaagtattttttttaagaaattatcaaaaagcaataaaaaatgcagcattccttacttaggaggatggaatgactctcctacttgccgccacaattttgatgcagtcacctacagttacccgtaaacaataagcagcttaatttcatgatacaaattacaaaacacaaaacagtaatctaaaaccccagatgtaactgaatgcagaaaatttccaacccaatgctccaaatatatttaactcttcctagtgttctgtcatgtttggaatatttctacaaactcataacttgcctacttggaaataaacaagtaggcgggacagaaagttagattcatgaacattaaaaataaaggaaggatcaatatattaacatttacataggctatttcacatgagcagcagccatgctcagtcctcgccctaataatataccagtttaaactatcgattaggattcagaaacattacatctttttttttattttctttttcttagggaaaaacatattaccacatttaccattctacattaaagtttagatgtttcttagtatttattcctctttaataaccttgagcactctgtgtaacaatagccataaggcccataaccatatgtcttaaagattctagtcttgtgcaaggtttatcaaaacaactaatgatgatggcttacaatgtttttacataagagtaagaacaaccatcaggtgcaggtggaaacttaccacttcatagccacccaatctaataacagctctccataatctacaatacatgacattaaagcaagccaatttagaggaagacgatcaaacccaaatacagataatttgattcgaatgggtgagcaaggaacgggcttacttaagacaattgaggggttctccataaaactttggggctttgaattcaaaggcattctccctgtaaaaagtctcaagctccttcatgaaagctacctgctgcgctagtgtaccatcttctggtgaatcagaatcctcaacctcgaccatctgttatataatcagcgttatatatggttacaaaaaaaaccataagtagatacaaatcaaactagtcgcacctgaacatcattgaatccatgctttaagtcgttctcatgtaaatggaagccattgccctcaatttcaatctcggtagaggcaatattagcattgtctttattgatgtccacgttccgatgctcaagtggtgatggttcactaagaccaccaccattacccttcttggcatcatcttcgtcatcaagatcagacaattgtgtaggtttgggggttaaggaaggagattgttgttggacttgaccactagcgtccacatcagaagcattaggcaacaaatcagggttggcctttccgttctcttccttcttctcgcccatatttatgatcgaaaccctaaaataaaggcgcgtttgggtaatatatcactcgaaaccaaacgtaaaattgagtggataaaaaaacagggttgaacctggaaagataagaagggattcaaaccgagtcagtgaggatatgtaagaagatgattgatgaactgagagagatagagagagttagaacatagagaaatggggtgccgtctccatctccatctccatctccatggccatagccaacactcaggaaactcggaactcagaacttggaactcagtcagttattagagtgaaccaataaaaatcttacccttaaatttacattacttgttaaaaaaaaaaaaaaaa

SEQ ID NO: 24067 - DNA, 3835 bp, Cannabis sativa
tttttaaaaaaaaaagaaaatagtgatagaatgaatgtagagtgccacctaaacttctattgtgctttcctttatttatatatatagattaaacaattatatggagaaaaataaaataaaataaaatattcactctctcttatttctaactttaaaataatattttaataaccacaccgctagttgtttggcctcaaaaataatatcattgtgacatactttttaatatgattttcaagatatggaaaccatatatttttttcaccttttcaaaatcaaagcaactatttagttgtttaccatattaattatatactcattagttacatttcaacaatatataattataaaaatatagtttttttttttaacaattaactcattgatattgcattagtttactaattaaaatatcatcaataattataaaaaaactcaacattacaacgctttttattggcatagtaaacaattattattattattaatttttcttgataaagaaatacatattaataaatgaatgaattatttttgtgttgtgtgtggaaaggtaacttcctaagttattttacattttaggtattataattaactaaatagttactttttattatcgtaacaatggaaaaatatctataactacaataaaaaaaatagtttcttttcctatttaattaaccaaaaagtaatcagattttataaataaacaaaatttaatatgcaaactaaatttgtaagttactaaaatatattttgttattcatatttaaaagttattatatatatatgataattaattagtttctacagtaaattaagattaccaaaatgtatcttaaataatattagtatgccgtgatgtaaccttaaaataactaattagttattaatttagatgtctaaatattttactaataaattatgtgatttattttattttttgttaattaacacattagtttctcaataagattgaaagtaacataaatgttacacaaaaataacataaaaaatatatatcttaaataatataatataaactaataataacatataattttaaaagtaactaatctaaaaatcaaaagttatcatatttttactttaataaatagattattttataaaaaataactaattggtatcttatcgaaataataactaattggtccaaaaaaatgtgtctcgtttgtaatattttaaaagttatttttaatttcattttttatttaattaatcaaaatgtatatacatttaaaaatatgggtggctaaaacgtgtatgatatatttttttttcaaaaaatacattttactaaaatggttgcttactgcatgacaactcattattttcgaaaataaactcaaaggttactcaaatgtattaatataacctaaataattaattgattattaaggtgtatacatataaattttagagctagccaaaatgtattttaaattatataatataaaaagaaatatttttttatgaaaaaataacttattagttttgtatcaacatcataagtaactaaaaggttacttttgaaacacaataaaacaaaaaaaaaaatagaatttcgggattagtttcatttcaggtatatatattagtttgtgttgcgaaatgaatagagagcagtattgaacaattgagaagaaaagaaagaactgtcttattgaattgaaaatgaacaggaaaaacaaatatatatatacatatatagcagataaccaactagctaaagtcggtggaaactaacttaactaccaactaatcttctaacaaattaactaacaccagaacaggcatataacagaaaaacagttatacgcatatgacaagtaagtgtaatctaatatccccccctcaagatggactgtgtatatcataaacagccatcttgcggacatgggaaagaagagtagtagagggcagtggcttcgtgaacgcatcaactagttgtaagatagtgttgacagggataaggcgaattattgaggctttgattttctcccttataaaatgacagtcgagttcgatgtgcttggtgcgttcgtggaaggtaggattgttagcgatgtggattgctgattggttatcgcaatagatgaatgcaggattgtcttgaggtatttgaaaagcactcagcaggtactgaagccaagtaatttcactgctggtgccagcaagtgcacggtaatctgcttcaacagagcttttggaaatgattgtttgctttttggttttccatgaaacaaggcagtcacctaaaaatatgcaaaagccagttgttgatcttctagtgacggggcaagatgcccaatcagaatcagagaatcctcgaagatgaagagaagaattggagctgtagagaagtccttggccagggctacctttgagatatatcaataggtggtgaatagcttggagatgacttgtacgaggtgctgacatgaattggctgagagtattcaccgtataagtgatgtcaggacaagataaagtcaggtagagtaagcgtccaatgagctgtctgtaagatgaaggatcttcgagggtggtcccttgttgatcatctagttttgttcttgggtccatgggggttttggcaggcttgctgcccgtgtagcccgtatcttcaagaagttgcagagtgtactttctttggcaaaggaagataccttcagtagatctagcaatttcaaagccgagaaagtatttgagttgtcccaaggctttgagttgaaattgagcatgtaaagaactttgaacttgatgtaggagttgaatgttggggccagtgatgattatatcatcaacatacacaagaagggcaatgaaaatctcattcgaaccacgggtgaacaatgtgtaatcggcttgggattggtggaatccatctgagataagagcttcagaaagtttcttataccattgtcgtgatgattgcttgagaccgtaggtagatttgtgtagtttacatacgaggtttgaagtgtcatcagtgtcgggaagagataggctagggggaagagtcatgtaaacctcctcatgaagatcaccattgagaaatgcgttgttgatgtcgatttggagggtatgccattgtttgatggctgagatggcgaggagaagtttgaatgtcaccatcttagcaactggagataaagtgtcgaaaaaatccagcccctcttgctggctgtacccttgagcaacaagacgcgctttgcatctttcaacagacccatcactattgtacttgattttgtatacccaacggcatccaatggctctttggtttggtgggagtcttatcactgtccaagttttattccttaaaagagcatagagtacagtttgcattgcttgatttcacaccttgtattgactagcttgcttgtaattccttggttcaaagagggttgttactgcaagaacaaaggctttatgagaatccgaaagcttatcataagaaataaaatttttaagagggtgaggtgtggaggattgatcctgtatgacagaatggcactcataatctcttaaatatgctggaggtttggtctgtcgacttgatcttcttggttgtgtgtggttagatggacttgtggtgtttatagtgccacgggtgtcatcagtagcaggtgtggttgtggtagcagtagtatcaggtgcatcattgatcacttgatcttgggagcattgatcttgtgattcttgttcaggagatgtggatataggcacctgtggaactactgtaacgccccgataatttgccttattttacaaaaaatactattttcatgcataatttgaaaagataaaa

SEQ ID NO: 24068 - DNA, 3730 bp, Cannabis sativa
agctcaggctcactcctattcagctttcgcctttcctttacctacatatgaaagtagaattgtgagtcgacagactcagtaataaaagcatatagcatatgatataataccgacttgtatctaggcgcccatacacttatttacaaggcttaacagatgagtaagaacattccatactagggtacagccactgtaccacgtacactgcgtacctcattgcacgagtgttggtagggtttgttttgtaccctgagtaccactgagtgatataccacacacaccatgtactttcccgtacttgtgttggtaacaccgtaatgtactccttaacgatatacactataccaatgcactctataccattcccgtacaagtgtatgtagtgtaacaattataacaagcatgcatatacattaacacatacatacactcgcatattcatatcacatattatacacaattcttacctcatttctgaattcaagtgagttggccgacctgaacaaaaagtctcgtgctggatggatgccctaatcacaaattaaaaccgcgtaaatcacatatcaaaaccctaatccgggaaacccaaacctaaaactcaaggttctgttatttctaaaagggactacaatatcctaggaaacagggaaacacccaactaaggcactgaaatgggcaagaattgagaaaatgagttgttcagggaatctgtcaaaactggttaaacagttttacaggacctggaaaactgggtaaccggttgcaccagggttccccaacaaccccaaaactcactcaaaacttatccaaatgccaccaaacattccagaagacctaaaatgagcatacacaatataatctaaccaataaaactcaaaaaaacacctataatcaaaatgtgccatcaaactcaaacttgatcatccaccaccacaatcaacaaaactagcattaagaacttaaaatcaactcaaaatcacaactcaaaccctaacagcccctataactcaaaatcacatatccaaaccaacatcaaagcttgaaaacccaagagtaaatgatctaggggttgcctcaactttgaaacctacttgaatatttgctgaaaacacaaaatttagtagctaatccccttagttccttgctggtttgaagagagagaagggaaagagagggtaatttcttaatttttttacttttcttattttctttgtatttctctaaaaggttaattaattaaacctaattgttgctgaaaataacccaaatggacagctgccacaacatcaagtagccatataagtcacaatttgaaattactaaaatacccccataagcataaacttaggcattttaaagtctaagggtaaaatggtcaaaaaccataacgcgctcaaactcagtattctattttctccaatatacattccattaagaaataaggttctagacttacccatgcgaataaactagccatccatcgcatttgccgttgtcgccgagcaaaaattataaaaactacataattcacatataatacaaataatactcctagagtttaataaaatttccagaattgaaaaattataactctaatgcccacttttgataatgggacccacaaatactataaaaaatatcaataattagtgctaattgcctttactaatccataatataaaatgcggtcattacaattttccccccgttaaaaggatttcatcctcgaaatctaacctggatagctctggatattgagtcctcatgtcaaactctaactcccaggtggcttcctccaccttgctgttcctccaaagcactttcaccaaagcgatggtcttgtttcgaagaactttttcctttctatcaaggatctgaactggctattcttcgtaggataagtttaactatagttcaagggcttcgtaactcaagacatgagtcgggtctgaaacatatttcctcaacattgaaatatgaaatatattatggaaagtcgataatacctgcccgaccttctcgagtatctgaaatggcccaatgaatctagggcttaacttacccctcttcccgaagcgtttgatacccttcattggtgaaacccgcaggaaaacatgttcccctgcctaaaatgtaatgtctctgcgcttcagatcagcataacttttctgcctgctttgggaggcaagcatccgagccttgatcttgtctatagcttcattggtcctctgaactaattccgaacctaagtacttcctttctccaatttcgtcccaatgaataaaggaacgacatttcctaccatatagcatctcatagggagccatccctattgtactttgataactattattctaggagaattcaattaaaggcaaatacttactctatgaacccttaaagtccatgacacaggctcgtaataaatcttccagtatctgaatagttctctttgattgcccatcagtctgagggtgaaaagttgtactaaacttcagcttggtacccatagccatctgaagactcacccaaaatttcgatgtaaactttggatccctgtttgaaacaatagatttaggatctccatggagacgaactatctcctttacgtacagttcaacgtacagatccactgtgtaggtaattttcactggcagaaaatgagttgactttgtgaatcgatccactatgacccatactgaatcatacattcccgtggttctaggtaaaccaaccacgaaatccattacaatgttctctcacttccactcaggaagtgctaatggttgcaataaccttaccgacctctgatgttaaactttgatttgttggcaggttaagcattcgaacacgtaatctaccacatctctttccatcccataccactagaattagggttttaaatctggatacattttggtggttcctggatgcagtgaataaggtgtggtgtgagcttcatcgaggatttctttcttgagctcattaatatatttttttgatgaatcagtgtattcattgctccaaaactcatttatataacctaaaagcaccataattggccttaattttatctatacaacattatttacaataattggaaccattctttatcttttttcttaactttttttggcattacaaacaatattctatttttttatagcccatttaacttgcttcacaatctcagctttttgttgtctatttgagttccaaatcaagtcatttctagccttccaaattgcataaaccagagcagcaacaaaggctattttaacacatttttgaaacatggatcccttagatttttgaatccatttcaacaatccatgtaaagattcagattgcacctgccattgtaaccaaacttttagtagcttcaagcattcaagagaagtctcacacttgaaaaataagtgatccacactctctttgtcattgctgcagaaaatacactcaggagaatctattattctgaaattgtaaagcctttcccgagtcttcaatctgttctgaacagcaagccaagtcaaaaaactatgcttaggagaattgagcctgctctagacttcattactccacacaactttgtcatgatcagagtcaaaccagcaacgtgctgattttgtatttagaaccagagaacacttctggttactttacctgttgaactctatcttttatttccaccattttcctccaataccagctgctggttgtgggagca

SEQ ID NO: 24069 - DNA, 2766 bp, Cannabis sativa
tttcatgaatggttacattttaaatcgatccatgtaaataactgccaacctatattcctataaatagagacaaattccacagaaaaagggatggagaatttgagaaagaaaagagatattatcaattgtatcttgtatttagaaaatatcataaataagatagactcctggagtatgcaaatttaattgcaaaaccacgtaaaaatatctggtcatatgtacatatttgttatttcttatcatttctgtgacaaatttattacgttaaggctaattattatttttagtttaacaaaaatctgcgttaacagttttgtgctttcattgagagcataagtaataaaactcagaaaaattcctccttacaaatagaaatctatccatggctgatcacaatcaaaacgatagaaatcgtcctcagaaaactacacatcaccctgggaaagagccaatgggttctcagagaccccatatacttctagaacaacacgtttaggaagaaattatggtggtgataaccaaaacccaaaaggaaggaacgaagaaagcaacacttttacaggatatgtacctagaagtgaggatgtgtatgatccaacaaggtatgtacaattagcggaattgggaaattcctccttacaaatagaaatctatccatggctaatcacaatcaaaacaatggaaattgtcctgagaaaactacacatcacccttggaaagagccaatgggttctcagagatcccatatacttctagaacgttcaaaaagaaattatggtggtgataaccaaaacccagaaggaaggaacgaagaaaccaacacttttgcaggatatttacctagaagtgaggatgtgtatgatccaactaggtatgtataattagtggaattggaaaatagacagctccagcaacacttagctgaatctaaccaacgaactgctgagttggaaagagaggctgcaacagctagggcgacttagggaacagaatcaacctaatcttggggtaagaagatcacgaggcagaccacggggttcaagaaccagaagacaggaagcaaattaaggaaatccagaaaacaccaaggaggagcaacctaggggtactagggatgttctagtggatgaacaacaaaataaccaagaacaacgttgagaagttcctcaaagatcctaaggatttatgaatcaagggaatgaacgtaagcggcttctcgcaggaataaggacacaaggaagccccgaactagggaacaggaaatccctcgtaataacgagagaaatcctgggactcaacctaggacaagtgggatactaccgagagaccctcgacgtccttctcgatccaagagggaaggtgtatatacatacctaaataggggacgtgtatctaacctcttccaaaggagaatgtcagtacaagatgaggcaagttctagctcgagacgctcgaggtctcgagggcacaattgatcaggaaggtaaacacgagatggaagcagaccttgatgttatgctgatgaagaaatcatgagcaatacgagaatctatcaatctcagagttacttcgatacgagatcggtgagctattatgagcgaagacaacctaatcttagtgagcatttgaattgaaaacaacccgatcttcgcgagcgactaaatcagaatgcacctgacttacaccatcaacttaatgctaaccaacaacaaatggaccccatccagttacgaatcattaagttagaggataagtttagaaaataccaggatggggagcatggaaaattaccttgctatgactcggatgaggaaaccaagccatttcatcttgatattataaattctaaattccctcagagattcaaaaatccacacgtctcatagtatgatgggactatgaacccagtcgctcacctgaataacttcaataccataatgcgagccagcaacgtctcgaataatctacgatgcattttattcccaacatcattgactggggcagtgagtagctggttcgataaattcactcaccattcgataaattcttgggaacaactgtccaaggactttaagaaatgatttcaagctgctagatataggcgacctgaagcatcaaacctaactaacataaatcaataaccaggcgagtcacttaaggcttacctaagtcgcttcaacactgccactgcaaaagatagaaacttgaatgacagtattcaacttacttctcttcaagtagggatcacaactgacctttcagcaactgggggcgagttatgggatgacttatagggtcgcccggtaagaaacattaatgaattcaacaaataagcacaagtgtttgtgcgcaaagtagaagcaaggaatgagatgaacttgctaaagagtggctcaggaaacaaacccaacacaagtactgccacaactagtaccgtctcgacaaaaggtgataatccaagtggttcaaataccaaaagaaaagatgacttgagagaatcatctaaaaataagaagaaacagaaaaaaaaaacacgacaaatatgttctgatttacaccgtgtacaccgagttgaatgaaactcgtgaaagcatctttctcgcaaatgggcacagggttgcattttgcaagcctaaactaatgagacatgtgagacataaacaagattcaataaaattttgttgatttcataaagacatagggcatacaaccggagagtgtggacaattgaaggatgggatagagagcctaatctcacgagccaaa

SEQ ID NO: 24070 - DNA, 2062 bp, Cannabis sativa
tgtctagggtagaaattttttgttaaggttaaggcttggtatgtttcgtgttgaatatcaagatagagtatgtgacagaaattttccaatactagggtattgtctggggtctattgagtgtgcatgtgtttgttggtcatgagatttgatggagtgtagtgttagtctagtgatcattttccttttatccatcagctacttcaagaggtttgcttttctcttcatttttgtgttagtagaaatggacttgaactaggatcttccaacaggagcggttgtacccactgagaatacctccatcccttccgttgaagaaactatggtggggaatgattaggtcatgctcttgcggtggtacctcaatcaagggaaactttggaggccattcctgagaatgaacctgctattggggaggatttccttgcgaaagccaaaaggtggaagagggcagagaaaccccctatctcccaagccaataatgactctgttcggaaaatggatcaaaaagccaactgctttcgatcttatgggatgttgcaagcttacaccaacgtcgctagcctctgtaacgtcctagattaatgtggcataggccctctatcatgggagaatctacttccaccaatatagagggatttagcgcatggagttggtctcatatttccaatggtgctcatctacctttgagaacttactttgcatgtctatttgcaaatattggaatcgcccctttccagctaatcctttcgtcatatagacttcttgctgggtggtatgtgctgtgcaagatgaacgagctagaattatcctattcggaggaggtcctttacttctacagagtgaaggctaaccccatgaggacaaataaaatgaatttggggttctttagattggacaagcgtccagattcttattatcctattagccaaacggatcgtacccacaacctccacgaaacctagttcttctccttcagatttctttcaaaaggggtgccttctcttcgcctaaacttccatcttctaggtactccaatcacttaacttgaatcttgtttgttcccgagtttattgcatttttaaagatctactaatgtgtgtgatatttcagcagaacttccttcccaaagtgctaggaccgtggagatagcaaagaaggaagctcaatacaaggcattcttcgaggaacagctaaaggttgggacatagtgacaaccgagcgtcttcgtagctttggcttgatcacaaaattttaaagcatcgatactgtcaacctctgaggacaacatcaagcccctaaggaggttaaggaagccatcgcaaccgacatggctgtcatcattactaaggcagcaaaatatgataaggtcttgcatcctgactgactatcacgtcatcctgatcctttgtctgaagtaaacaaaattttagagaggtttgctaccacgtaccccaatgtggggacttcgagagccaatactttagaaagacgttatagacccttccgtgtctttcgtaacccaagcctgtattgcacgtcctagggaaatcagtgaggatttgataaatacttcttaagtatagaccaccgtaggtaccccatgaaggactacatagacaaagttgaccaaatcgttaggagacctagaaatccaggggcacctcagacactattaaaatggatcctttgatggctatgtctttgcccgattttaaggaatatggaagcatccttgctcatggagacatagcttctttttcaaatgggcaaccttatattagctcaatgaatggttgcacccacgcacaagtctttttactggattttactttttgttacaattattccattagttgcaccagctggatctacagcttttacttgcttatgttgctattacgtgtgcagatactccagagtccctgaggctaaaatccctgagcagtaagaccactgccactttggccaaagctgagtagaactaggagaaaggcaagggaaaagccaagacttgggctttcaggaacccagaagcaaagttctccctcaacttcctcgtcat

SEQ ID NO: 24071 - DNA, 3253 bp, Cannabis sativa
ccaattggtaactttaacaaaatatagaattggaaatggtatttacactttttttttttcgtttctgctaatttcatgatggttattattcaattattttaaaaaaaaaatattatcgttaataaaataaggtaaaagagtaatatagatttttggccccattatttggatatttaagtgtaaaaacaaatccaaattcatttgcaaactcagtgctctctctttgaggccccttaagatggaaaggctttgaacctattggttttgatattataaaattaccaaaagaatcaaaaagatctcacctgaaaaaagaagaccaaataaacaattaaacttgaaaacaccttgaattccaactctataagaaagagcttagatattttattcaatgaggtagatatgaattatatattgtatattctttacacatactatgtcatgtttcattcaaaatattttattattaggtttaaggtaggaaaacaagtatgtgttgatttaaagttgggtgttggtatgttagaaacacaatataattcaaagtggagtaggagctttgctttgttttgtttagagaattaataatctaatggctgtatttttatcaaacaaataatattgttttgcacctttgcaaggagatctttcaaaaatctttcctttttttaggttgaattattattatttttcctctaccactgtttttaaggatcttcttagaaagtttataaaatttgtaaccaatagttataatacagttgtgattatgatgagagaaatgttaaaagatactcatggtggctaacacttataatgtgtaatattattattggtgcagcttaatatcgggtttcatttactttactttaataaatattattaaaaaattactaacaaataatacggtgatactttatcgtagtactaaacaccatgagtacgtcataactcttatgattaagaacgtgaaactatttgattttttcttttttaattaatttttcattttaacagaaaggggaggatgggctcaccaggccgtgcccacgaatatttgccaagacccttttagacagatcgtatatcacatgagccactaagcaccaggtgcatgaatgttcttgaaatagatgtcaaaaatggctaacttgatagatattatcctcacatttaaaacgtcgaacttagggttgtttacaaagtatctaatctaatttaattcgtaggatccaatccaatttaatctgcaaaatatggatatatgtacttgcgcgaatcgaatttgattgaaaaatctaaaatccgtacttgtgtggattggatattgatcgacctcaaaaagtaactgatctaatataatctgcacttaattatatatatttttaaaaaaataataatatataatatatattaattttctaataatattataaagatacaaattggagcttctgacacaatatttttctgtaattaccatatcgtgagaaataaaaactcaaagtatacgtagctcaattactgtcgcgatacagggagtgcactactataaattcaatgtgtctctcttataattacttaactacttattcatctagcgagcgagtgtggcttagaagtctagtctagatttctaagtcaccattttggtactttcatttagagtcacatctcaagaaatttaccaacaagatggttgtaaaacgttctataagtgttgacagacagactccaatagatggccaaacaactgagagcatgccagttgttgagatgggaactgagactgctcttgcgccctagataccaagagcaagcctcgaaaccaactcaataccttgtcctccaaggccactgaatgctcctaggactagcaccaacgaccagatcccacctggggagccttatgtggagattgatgaccctgaggaggccatcatcgagtttctcaactcagccaaactgtggctgacctgcaacaacaactgcaagactctctcgataagcaactgaaggaacattgaaagccaacgtattgagcaggaacagcggagggataacatgtctcaacggattagcgaagcttatcgctctaattgcagaactacttccatagaggttttttcaagttggtgtcgaccaactagtcacgtggtaattaatgctcaaggcaaaatccttaatgctcgaaataccaccacacatggaaattgagcaagcactaagcaaaatccagcgtggagacttctcaaagggaaagtaccttcgagcaagagcccaaaatgactcaagctcgtgggatccaaccaatgggccctccacttgatgttgaacgacctcacaacgatgagagaaccaacatgactcctccaccaagtccttctcaacgttctcatgaaacaaggccccaagacactacgaatggaaagggacttgctactcaaactaaaggaggtagcaggggacgctacttcaaaactgaaggctacaaaatttggcaggtaaggaccaatgaaccacttcatactcaaaagtagtttcgagatgaaagaggagaattgtatcgttactttgcttgtggcaccaatggccaactgtacgagtacttccctcgagtacatggagaggaattaatcctaagcgaccaattcgattctcttcgtacttgtgatcctgctgaaaactactttgagggaagtagcaactacaatgctccaaatgaacactcccacagcgggtcatcctgagaagatccatagctcattctggaggcctcactagagttgctttcacgaccccgtggtcaggagacaacgacaagacctaggtcgaccagagtataagatcaacctggaagaccaagaaacctgcatgacctcttaatcaagaagagaacggtggatggggaacttttagagaagaccctacttgggtaatagaagctctgattgggacacagaccaccacccataaggtcaaccgagcataattcgacacctttgcagctttgagttttgcaagatttgccttgaagaaaagaaaactatatcaatataaagtgtaaattattagaaatatacataaattttgaaaagaaaataaaagtacaacaaaatataacacataaaaagtaaaatattgaaatataaaataagataacaaaattaaacagtgtatgatataataaacaaatcaacacatatataatatatatacaggtgttgctccagaattcgcccaaaatacgtgg

SEQ ID NO: 24072 - DNA, 7598 bp, Cannabis sativa
  modified_base (1779)..(1788): a, c, t, g, unknown or other
tttttttatgttatatacgtaaaaaaatataattttgtttataaaaaatagcgtgttatatacttattaagagaagctaaaattcaaatatcaaccccacttgtacagttcctgcgccaatgtctaaggcgtatgcttgctgagtccttaagtgactcaatcaattaaacaatatataaagattgatttcagcggaaaaaaaaaatgtataaagtttcaaataaataatcctctacactttttcaacaaaagttatatacatctttttttttctaattacagattagttaaaaaaactactttatagcataagtacaatatactatgtcctacgctagaaatacactatatattaatgtgtaagtatttttcatgtggttgaattaaaaccaatgccatggacttgaaattaagtggtgtacacgtatactatgactactttccaatgaaaaataaaaaagaaaaaaaaaatatagactatatatatagttaaatgaattagagcatgaagaaaaataattgtaataatgattcgatcagtttgtgtggtccatttggcagacaattgtaggaacagaacacagagatgaccattttgtgagcacatttttccatcttatgcttcacttccaacctttattttccacactttaattatattatatcaattagctaactaggtggatatatgtgttacggaaccttatagtttttgatatatatatattgaaaattctaaagtctatagttttttaatattgaaatatatacataatatacatatatatacttgcagataacgatcaaaatatgatataactaagttgaaaaacaataatttggcatgacatggattgtgacaaaataggtatatatatatatatcgtatgatttggtaaaagattttggcagtatatacgtacatacatatgtcatgtttgacatgcacaatataaatagacatatactggcctcttcttcttgtgtcatggtaaaaattgtctttattaacatccaacctattacaatctcttcaacggattaaaaaaggtttgatcctttaaaagttagttattgtaagtagtgtctatctatgtgataaggtttttagggtggttattgattacctaagtaaaagagattaagatatcaaatttctataactgacacctaatttctgataaagatgaatccaaaaaataaatcaaaatgagattaagtttgtagaattattaataaaaagaaattatactttttaaaaagtatatgcatataatttatagaggagttactttaattttatctaattaattgtagataaataattttagatctttaatttattttttagaaattactgattaaattattttaaattttttgttaaataacaaataaaatccgattaaaatagaacataataatacaataaaatggaggtattataatcaaattggttatatttttttgcacatatttatgttagaaaatgactttaagttagttatatttagtcatatttagaaaattttgattgattgtgctcaaaaatataaaagacccaattagtaaattttacaaatgtagagtttaaaataatatttactcatattattgttacattttatagtagtttctttttgtattttttataaaaatgcatacagtaactcacgtagtaaagcaagtaacggagtaacttaaatcacaaccaaaattcagataacaactcatataaaaattatcagagcaattcaaactgtaaatttaaaaaaaaannnnnnnnnnaaatagtatataaaataatttttctataattaaaacagttatagtaaacaataaatataaaattaatgtataatataaattattgtatataagttataaatatttatatatgttgtataaatatatatatatgagtggggaaggagaatagttgacgtgaggcagttgcctcaccatggctaaagtagctccatcaatggtccggagatcatcaaaaggacggaaagaataaggaagaaatttgtaccaagtgatttttcttatttaaagaaaaaaataaaaaataaacacaaataaatatatataaataatactattatttatagattgtgagttgcaattgcatgatatttatatatacgaacttgataagtgctgtagctctagctgcgcctaacaaaacaataatatatggatcagtcgacattaaaatttattatgttaataacttaatttatactaatttagcacattaattatataatatttgttataactcaaatttgtgatgattattggtgtcgtgatcagttagtctatttcgtaataatgtaattatttaattaatacagttgcgttgtttgtagtggtaaggacacttgaaatattagtagatatatagctacctagctaggttgcacgaatgttaattctaactggttaatcaattaagtttgatccttttatatatatatatatttatatatatatatcacgcagatgcacaatatatatttatgagcattactattaggcactagtggtacctaacactttctcgatatgttatgttgcgattggctagcagtactgtctaaaagctattatattaaattatataagacttgatacttagttggaccaatagcaatattgacacgtaagagggtactatgcatcactggtaccttttagcatttctctatatttatatagctttgtaaaggaccactattaatattgagatgacattaacaaaagattgagctactttcgaaccacacagatatgatattatatgcgtatatttagtaatagaactactcaattaatggacaacactatcttttaaacgtaaaatatagtattgtaagaactactactaacatctattatcattaaattaacattgaaaataaaagaattaaaaatttgcgtttgaactagaattacaaatccaaaacccacaaccactttagagtcactttagatattggagatgaaccaaatatttgagcataggtcaactctatatcctcatagtcaaaagttctgtcacattgacattaaactcacccataactcccacatcccaagagatacaaaccactccttcaccattacaaataacccttccccaagtcccacaaatctccttcccgccaccactgatgcgttagtcaacatggaaaacccacccacaccaccgatagcgtccacctacccgtctgtcccaaatccccattgtgcccaccgcacttcaatactacccttctatgctccaacaactcttttagatggttttcagctagctttgaaataatatcaagtcttgattgtacaccaccgaacaagacaaagttcctataaaaccataaccaccaaagcaccatactaaccttttcgaaaatctcctaggagagctccttaaacaaaagaattgatacaacagaaattcgaataaatccacttagtaatcacaacaaaaaattaaaaataaaaccactcaggccctaacgggattcctcgcctaaaacttgcaataaatcgattctcaattctcatacaagagaaattaaaacaaactaaagctaagttgtcacttacccctaagctcatcagctcaagccaaagtttataaaagggggttccaaactttttccaagaaaattgaatcgttctgagccagagttgtagagtgtagagatagaagcagtgtttcagaggtaggtcgtagcatgcctccctaatgcatatggttacattttttggagatgtccccaactacccccaagtgactgaagggtgtaggtcttgagtcacttgttgtgttttctcaagctaagttaacaccttatatgcatgtaatgttatcagcttattaccttgtcaaaaaatattaccttggtcaaatgacctacaagtcttttccaaaatactaaagatgaaattaaatgctgaactcctaactattgatagtattttcagaggtgatcaacattccaagctcttgggatttggaatctgggatccatccatttgattgaggcaataagttctgacgcatacttcatcttaaatttcgtaaggtccctcctagttggggcccaacacccccactctgggatcttgtgatgcggggaagactcgtcttagtaccgagtctccaaccatgaactttctgtccatcacctttgagttgaagtatttaattggccaccttcctcaatttggtacgatgttaggcgcatttgagactcttccctaagttcttcgataaagtcaagagactcttgaagaaaggattagttggtggtcagatcataagtggtccttctgtgagttgcataatgtgttccactgggagcatgacctcgcatccgtaaaccattgagaagggtgaatgtcttgtagatgtccatgtcgtagttaaatgggcccacaatactcatggaaattcctcttgccaactgttcttgcaaacatgtaatttcttcttgagagtagtcttgaggatttttattacaacctctacttgtccataggcccgaggtcttgccacggcagaaaaactaagaaatcccatgcttttcgcaaaactccgtaaagtaatcagtatcgaactatttctcgttattcgagactattttgtggggcaatttgtaccggcaaatgatattcttaatcacaaagtctaaggccttatttgcagtgattgagttcattggctcagcctctttccactaagtgaaatagtctacagctactatggcatacttgaccccacctttcccagttggaagggatccgataaggtcaatcccacacactacaaattgccacagactagtcatcaaagtgattttcatttggtggagatctagggatatttataaatctctggcaggcatcgcacttctagacataatctgggcattccatttccatagtgggccaaaaatatccgtgtcttagtatctttttagataagttgttacccccagtgtggtctccacaaaatccttcatgaataccttgcattattgcttgggcttcagcttcagccacacaccagaggtaagacatggataatcctctatgatataacctgtcgctaatcataacatatcgcgggacttgatactacaactttttggaagcagctatatcatgtggtagctctccgaatgttaaatacttgaccaagggatccatccaatttggtccttgattgatcgtctggacgtctggcttggccgtgatactaggctccaagagatagtcgaaagggactacccctagttctttcatttctttgtcggatgccagcttggccaagcagccaacttgggcattcgtttcccttagtatctgttcaattttacaccccttgaattcttggaatagttcccaaacagttgagacataggaagccatacgttctccgcgagcctgatattcaccttttacttgattgactatcagcttggagttgctgaatatttcaatgtgtgtggcgcccagcacctcggaaagtctcaacctagctagtaaggcttcatactctacttcattgttagacgcgttgagcatgaactgtaatgcactttagagccttaagccttttggggatatcagtatgactccggctgacccgttctcattggcagcaccatccacgtatactttccaaacaggcaaggttacttttacagcgatagaatcctcattagtctcgttgcattccataataaagattgttatggcttgtcctttgattgagacgtgaggaacataatgaatgttaaactgagttaactccatggcccatttgaggagtcaatcagaggattcagggttctgaagtacttaccagagtgggtggttagtgtacactttgatgccataagcttgggagtatggtcccaacttttgagaggcaatgagtaggcagtaatccaatttatcaatttgtgggtatcatatctcggctcccaccatccttttgttgatgtagtaaacatggtgttagaatttttcttcctcccgaaccaaggctgcgtttattgtgtgttttgaaactgtcaagtacaaatataaatcttcaccctcgactaacttagataaatttagagctttagacatgtgctctttaaggcttataaatgtagtttcacattcatctgtccattcaaatttttgacactttcttagattgttgaaaaacgggacgcactttttggctgacttggatatgaagtgactcagggttgtcactttccccgtgaggctttgtacatctttgtgcttcgttggagatggtatacccagcaaagcttgtatctttttagaattggcctctatccctcgctgactgacaatgaatcccaaaaactttttagatttcaccctaaaagtacacttttcgggttcagcttcatcccgtatttttgcactactgtaaaacactccttgaggttagtttcatgattcttggcggtcttggattcaaccaacatgttgtctacatagacctccatgttgtgacccagaaagtttcgaaacatttagtttactactcgttggtatgttgctccagcattctttagatcaaatggcatgaccaagtagcaatatacccttttgtcaatgtaaaaacttatgtattcctctacgatatgcattttgatctggttgtacccagaataggcatccatgacagataacaacttgtggttagatgtcgcatcaaccatctggttaattctaggtagagggatgcaattcttaggacacgctttgttcaaaccagtgaagtctatgaaaattctccaggtcctattgggctttaggacaaggactgggttttctaaccatgtcgagtaatatacatcctagatgaaaatgtttgctaacatcttcaccactcctttctttgaagcttctacctttaaggggtctaaggaacgtcttttctgttgcacggttggcatttctggattcatatgcaatacatgaaaattttcatttgggtcaatgcctatcatatcctcgtgaaaccaggtaaagatgtccagagattccctgagagtgcctccgatctcctccctaactttggtgtcaaggtttcttcctatgtgaatgactttggttggatactgattggaaattttaatttcttctgtttcttccatgggctccgataccttctttgtccccacaggcggatccagcttatcctcttcatattgttggtcaccatcctttccataatcgaataccaaaactgatagatttgtagctacaatgtagcactttttggcatcggcttggtttccacagacagttctcactccttcggactgggttggaaacttgagacataagggtcagatcgaggtcacgacccaaatttcaccaagttcaatcgtcccaagatggcattatatgagttgggcaatcaataacgatgaaagtacaatacttgaaggtgctttgtagggtgtctggacacaacgtgatgagtaatcgaattttccccattaggatcaaggaatctttgttgaatcccgtaagtcgtgaaccactgg

SEQ ID NO: 24073 - DNA, 1998 bp, Cannabis sativa
aaaactatagcaattgctatgtagttgcttaggagggtcttcaaccttaaccttgtaggagtaaattgcaagcctgaccatttgtgctgccctcttgagccagagtgggttttgaacatatgaatataatatatatattttttaatttttatcttgtttggtgccttttctgttctgtgatgtcttttgtcttttatgctctgaagctctccacagaactagtaaacaaagtttcagggaatttgaactaatgatgtgaatacaaattaaagtcaattgatttgtaatgaaacgaaaacactgaatttcctattcaacttgtgatgccaaataattttattttattttttatttttctgaaaaggtcttattttgttaatcgtataataattattttgttaatgagcagcatacagttatgtatatacaaaaagatatcatataggattcatttgtggttaaagaaatcttatatgttgtctctttcaccaattaatattcattctgaacaattaattggggttctatagaaatactttaaactctaacaagttaaacgcatatatttttttaaggctttatcaggttcggcttaaaatctatgagctacttgtcaattgtatacctccggagatcatcttgaaggtaaatgctttccattttattgctcactacaaattttcatccttttttattcaacttttggtgttgcatcagaggctgctttacgagttactgaggaaattagatgcagaattgaagcacgaggtttgccactgggcggcatattatgtaagttcaccattgctaatactgactacggaccaatgtcaacttttctattattttttttccttgaaatattaatcaagtagagaaataagacggaaatgacgtgtgggtttggtttaactttacaatttgtttctgatgttgaattaaattattagggtgtgtaataacttttgctaacagattaagcaacttataaatatatatgttatatatgcatggttttgacaaaacctctttagtttaggaaaataaggtcacttagattgagagaaatgagaaagattactggatgttgatacattggatctctgatgagtggcagatgttgcttcaactttcttgcaagtatataaagttgttaagtttgttttttttgataaaatcctactagggtccattcaatattcaccagagataatagacaaaatcatagagggatttgagaatagaagacaataaaaatagcgaagaagacctgatatttgatattgaataaacaaaatgataacacacacgaacatgaggaattcgcaagacctcacctgtctcacctgctactgcccaattcattacaatcatcataccctcttcattcttcttatcctcctatttataccatcaaataactcttttatatcctgtattctatcatttttattctcaaaatagttaatagtaaccttgtcccatgtgttactggctaagtgggctagtttttctcgctccggagtgtgtcatctgtgggaccacctgctgtggtaaccaaaattttcccttcattttcctttggatatatgataggatcataaaattctcttcaattcaatggtcagtgactgttttcccagaggtgagtttggctgatgaaaatagggtgtgttttctgttatctatctgttttcatttgttatttttgtttttctgcaggaacacaggatgcgacttggacaaaaagctatatttcacattgaaggtacattttagttttcatggcattactatatgctgcgctgtgaacgtgccaaaccaagtgcagcatatatctttatatggctctaatttttcttctcttgatctatcttttcagcgtttgtggccaagttcatgagcatttacaagtcttttcttattgcaacatttggctgagtaacagaatgtggaagtgtgttggaaattgttgtaacagttttaggtgattccatc

SEQ ID NO: 24074 - DNA, 2724 bp, Cannabis sativa
tatatacaactgacatttgcaaaaacacggtttttcagtagtaatgttattatttttaaataagtattttataatataaattaaaaaatcatttataagtattatctttctacaaagatcaatcaaagtgtgacctttaactatccaagttataaatattatatatttatgctcaaatcataataaaataaatttttaattttttcaaaaattgtgtcaaacatgtacatagactcttggtcgtggctagatgctctagttacaaaaaaactaaagatccaacgactaaaaaaatcattagagccttctgttttgaagtgtcattagttattaggaaatttaaacagtgtaatgataatgcaaagccctttcaccaacttttatactgattttaaaaatgcattctatatattgaaaaataacttcattttttcataaaaagaactaatgcacctaaacgctaattatagttaaatagagaaatggaataatggagaaatattttaagagtatattatgtaagttaagttagtttgattttgaatggaaaagggaactgaatctttagaaatacattgaattataaacaacaaaaatgtataaatatatatttatataagtgggtcttataatgtgactaaatgctcatatattggtggttagaaatcactacgtatacattatgcttctacatatgctcaagtattatttgaacagaaaatggtccacaccctcatattaatgaaagcaaattcgtttaacctacttccaagtagtacatcatatataaatataatacatcctaaccaaaaatttcttctcctttaacccctgaataaaattactttaatgttgtatggtgaagcactatatatactcacgtactaataaaagatagataattattattattattattgtatagtattcttctgacaaaaattcctagccagatgtgcaatattaactagctaagatttaagtgaaaaagaatgaaaccactattagttaccagcacggtatataataatttttacacagagacagtacataagatttatggtttctttttaatacggggtaagtttaaatttataagggtagttttgtttatcttataagaaaaaaattcctgtacaagaaaaggaaacaaaatatatatttatattaattaaagaacctttattatgttttgaaaagcctatatatgtagttaatattcacgctaccactggttttaattagattttagtaaaattaaatgtagtagatttttttttttttttttttgctttggtttacttataattccttggttatagaatccatttttgtactaacttgtacctaacaataagaattataacttcatttttttgtctataattaaaaaaataactcttgaccatgtgaaatatgggcataactggtgaaacttaaatgaccgaatttggaaccaaagtagaagtcaagttattatacatattatatctgtcttatatatatatatataaatatatttatcaatgtaaatgtccgtacacaattagattctaaaataagaataacaactcagtgtatatatagcttagttggctactaataaccattattattttcctcatgttgaactctctacccttttctaaaagtttcattaattaaagaaatacattaaatataccagaaaacgaaattccagaattacatatataattgtaagaggaggaaaagtataaatacatatatatatatatataatggtccaccaatcctagttgcataattcaattacatatttagcttgtgcttccaaaacagctggcatattttgggccttatcctattccattatgtacaaaatggaagaaaattaatttatagttaaaacatacaaacaaataatagagaaatagtaaaccaaaatattatttaaacttaaatatatgtgtttatatagaagaaaaaaaagggaaacagggttgatgacaaggacacgctcacatgagccaaaccagataaaacatgggtccctaccttcaatatcactcttttttttttttctttttgttttgtgttattgctttttttttttttttttggtaaagagagaaaaggaaatgaattattattcaaaaaaaaaaagactaattaaaagaaaaaatcgcctaacatgagaagcatccagggaggcatattattagtctaacagctggttagttattaataaactaaaacaaattctacttataattcattattatatatattcacagacacacatgtgtgtatatatatatacatgtataaagctaatagcaatctttctttcagaaattaaacacatcaaaaagaaaattaaaacaaagaaaaaaaaaaccctactactctctaacaaggtcaacaacaagagaagaattaatctttagagagagagagggaactcttttgaaacttcaatgggttgcgaagtagtagtggttgtgagcctcagtctcaatcttggtcaaaccatacaagaataagaaaagcaccgaccgaccttcattctttttcctttctccttcttcttcaacaaattatcttgtgctgggtttttttctctctcacacagaattttcattcccaaataattcatcatcattaaccctaaaagaaagagagagaagggtttttaacccaaagccaaaaaaaaaaaacccccaatcggggattctcgttgta

SEQ ID NO: 24075 - DNA, 4261 bp, Cannabis sativa
  modified_base (586)..(601): a, c, t, g, unknown or other
  modified_base (705)..(706): a, c, t, g, unknown or other
taaaataaattccaacatatatgtcaataatggcatataacttcacttatataatgactgaatatttatatataaagttatagttgttttcttcttgatgaaaaaacataatgagaaatgaaagtcttctcaaacataatgtgatattgtaggttacatataaagttacacttgtttctttcatgataaaaaaacataatgagaaaaggcttctcaaacataatgtgatattgtaggttgttagcacaaataagatctcaaaggaaatatgacaaaaatctaagagtacataaaaatggtattctatattcgacatgaattgtgctattgacaacaattttattgacatggatactctagctagacaaaccgtcggattgtcaccaatccaaaactacattaaaatgagcactaggtggcatttagttgggatgaatgaaaatataggaataggaatgggaatgggaattggaatggaataaaatttaaaatgcataaaaaaaaagttgataaaaaaatcattaaattttttttcttgttacattggaatggtctttctttcctttttaaaatggaatagtcattnnnnnnnnnnnnnnnnaagagcattccattggaatgccattccaatacttttatatgcaaccaaacaaagaaatgaaatgaaaattgtttcgtttccattccattccattttattacctnnaaccaaacgccacctaagtgtcttcccaacataaggcgcagcagaaaagtctataacatcacatttataaaattaaagcatggtaaataagaaggcatcaacatacaaaatggctccattattaccaatgcaacatgatcattcttgtcacatgtcaatgagttacaaacatgaaccattctatctttgaaggataataacctgaactattttattcatttagatacacaacaacctgcaacaaggaacaaaactaattaaaaaatttctaatgtaaatatatttgcattatttcataaattcctacagcacattacctataacgaacatgatagtaaatatcaaataccaaatgaatagtgactcctcttgaaatttcacataccaattaaaatattaaacttaaataagcaagtaaactactacattgagttcaaactatgtcaaattatgcacagtttgaaacaaaaaaaatataagaaataaagaaacaagactttaataaatggttccacaactatatgtaaacttgggaaatggatagcaaccgtgtgttttcaagccactgttaattgcaatataataatatggtgttgttgtgctcccacttcaaagcatagtaggtaacatgctaattttatatataaccaaacgttttcttaccttgaatttttaactaaatttatgtattggaatgatctcacctactaatgtgattgactcctacggccaaaacaatagagacatggctaaggacccttaccttagagtccaactttagttgaaaagaggctagatgtgaactttgtagctcacattaacccaaataaagaattaacaaaaaaatttaatctaatgtgaacttattaactagagaaaaataaatcacaaactaaatgaggaaggccacagcaaagattggactcttttctttatctacaggactccgtatgggcgagagaaaaaggtcttttggcaatggatgacgaatatagttcgacactgtgaatctaaatggatggtttgtggagatttaaatgttattgcgaatgaagcagaaaaaagaggaggcaaaaagtatcagaatcgggagggtgttgatctcccaaatttcttgattgatacggggggagtcgaccttggtttcgtgggaccaaagttcacttggatgagaaaaagagggtctctgaatactgttagaaaatggcttgactggctatttccagtgctgattggtgtttgaactttcctaaagcaacagtgttactccatccgattatggcttctgatcatgctccagtggttctggatacgcaaccgattactcaaaagcttcactacccttttaggttcttggaagtgtggaagtgtgactcgagatgcgaagctattataaaagatgcgtaaagtaacccgtgttatgggcaagttggcatccgtgtgtgtaggaagcttagggagactaaagttgcacccaaagattggaataggaatgttttcgggttctgtgatcaacaacttaagagactctatgctagactgagtattttgcagtctcagcacagtgaggaggcttgtgcagaggaggcagaggtgcaattggaaataatcgacatggaacataagcttaaaaggatttggaagcaaaagtctcgtgaactctgggtggcgcttggtgactgcaactcaaagttttttcacacttcaaccatgatacgacgtcggaggaatactatctgtgctcttcttaatgatggcaatagatggattttcgacagggaaggtatgggggagtacttctcaaagaaattttgcttcctatttacaagccaacaacctcggatagaggatgagttcgagacgctctttgaaagaaatgtgaatgatgaagacaatgtggagttatgtcgtgtgctttcaagagatgaaatcaaggcggtagtctggaaactgaaccatctaaaggccccggggccggacggttttttgggaattttttacaggaaatacagggactcggttggtgaggagatatgtcgaatggtgcaggagttctttcagtatggcacgttggtggaaaaactaaatcatactttcatttgtcttatcccaaagtgttaaaatccttcatcatttgatcagtttcagccgattagcttgtgcaactttgggtataagattattgcgcgcttgctcacggacagattgaaaccgatattggataagttggtgagtcctttccaatcggtgttccttcctgggaggtggatagcagaatgttcggtgcttacttcagaagcactccatgcgcttaataagatcaaaggtcgaaggggattcatggctgtgaaaatggatatgcacaagacatacaataggcttgaatggggattcctaatgcgggtgcttaaggctaatggattcaatgaaaagttctgcaatataatatttcaatgtgtgtcaacagtatctttctcgatcctcctgaatggagcgccacttgaaccttttagcccagggagaggccttaggcagggggatcccctctcgccttatctattgattatgtgcagtgaagttctcttaaagctgatggtgcgctccaaagtaagaagtcagctatcgggaatcaaagtcgataaagaaacccagcccataactcatttcttttacgctgatgatgccatatttttttgtcgtgctaacacagaagagactgagcacttgaaagcttgttttgagacgtacgagaaatggtctggacaaaaaataaactagaggaagagcgggttagtgttttctcctaaggttaagaccaaagagaaagcactcatgcatgggattctcaatatgcaaggtcttattactaaggaaaagtatttggagaacccgtttttctattcggcaaagaaacgagatgacttcaatttcctgaaagataagattatgtctcggttggaaggatggaaagcgaaacaattatcgatagcagggagacaaactctcatcagttcaattttacagagtgttccttgctatacgatgtccactataaaagtgccggtaacaatttgttctgagatggatagcattattgctagattttggtggaagggatccacgcaacatagggagcgttaccatgctctaagaagttgggcggactgttgtcaacccaaaagaaacggagggctggggtttaggaagttcaaagatataaacatggcactcttggcaaaattggcatggtatatgcttgaaggagaaaatagcagaagaccttgggtccaacttttgaatgcaaagtattgcaaggtccaggatttctgcagtgttcaggaaaagcaagaagattcgaaggtgtggtgaggcatacttgcaaaccgggacttgtgtatcaaaggtgctgggtttttagtggagatggtaagattgacaattggaccaggccgtgggtgccaaggtatagcccggaagaggttcataatgcattctcttacaatgtcactcatgccttcacagtagtttcacatctatttatccctggcactcatc

SEQ ID NO: 24076 - DNA, 1864 bp, Cannabis sativa
tggtgtaaaaatttctaaaaattaagatgtattttttgatatttttttttttaattaagtagctaatttaagcgtagaaattcaaatttctcttttattattattcgtcgtcgaattaaaatttaatggcttaatatttttaaaattaatatttataattaacatatatatatatacgatccttatatatttatatatttatagagataaatatacatgtagttgaaaaaagataaaccaataattgttttttaataaaccactccaagctagcaccaggggaaaggtattgtggtatgtgtgggtggggggctatggaatccaataatataaataaaaaaaaatatatatttctattttttttttttttttgaataagtgttcttttattaaaatgagcaatcgctctccaggatagacataaagttcaaaggaacactgttaatgggaaacatacgttcagctaaagtaacagagtgccgggcaacatagtgcgcagcacagttcgcagaacgcttaacaaatgaaatcgaaacattgaacaaatttttaaggatatttttgcaatcatcaaccaccaatccaaatgcagagactagagtttcttcgctccgaatagcttcaacacagacaaggctatccgtctcgataatagcccgtgtgtaagcattgtctttgagccagcttaaagcctccctaatacctatgctttcggccagttcaggagccaccgagccatccttgatccctgcaaaaacagagaccagatcaccatctgagtttctcaccacacatccgaagccatgcttgaaggaggaggcgaaaatggccgcatctacattgagcttgatacccgaagacggttttatccactgctccgcaccatctccctctttaaggggagacaacaagggtagattaccctttccttgagcttttatccattggtcaagactcaaattttcaaaagccaccacatcactcacccttcttacccgctgcttccacaccaacacaacattattactcgccccaacatctcactggtgacagaactagcagtagcttcaagccacagcagcaaagaagagaaagagtcccttgctacagcagccaaaccagcaacattgaagcaagaccaagcaaaatcgcaggccaccagtaagtgccattcagtttcagcgaagacatcgcacataggacaattactttccaccaataccttcttgatacacaagtttctttttgttgcaaggcagtttgaggccgctctccagacgagatctttggctttgggaggcactttgagggtccacaagatcttccaaaacttattgctcactgtgttggccgaatgatgtttttaatcctggaataaattatatgcactacgaacggagtagaacccgttcttctcagcagcccaataccaggagtcgacgtcaccagattggtcaatgggtattccaaggatgatagccgcatcagtgggggagaaaaaatccttcacaacatcactatcccagcagcgattgtggacttggaacaggctgttaacagtaaaattctcaagtccttgaaccataggaacagggacagagtgatccaagctaggaagccaaggatcgatagtaatttgaactgaagtaccaaggccgattctcttccttaggcctagcttcactgtatcttttgcagcaaaaatactactccaaataaagctcggattcgatcccaactcagccgagagatagtcaccatggggaaagtatctagctttgaacactttactagcaagggagtctatgttgaataagagccgccaaccttgcttgccaagcatggctagattaaagtccctcaa

SEQ ID NO: 24077 - DNA, 2587 bp, Cannabis sativa
  modified_base (2109)..(2112): a, c, t, g, unknown or other
  modified_base (2410)..(2413): a, c, t, g, unknown or other
gattaataataaacttgctgatttatcaaaaaataaataaataaataaataagaacaaataaaaaatttaattagaggtaatgtacaccttcgtgtatataataataataataataatagtatcatgatatatttctaaaatatcaaaaaaaaaaaaaaaaatgcttgcagatgcaagagtactactagttcctctacctagtccttgtgttaaactttttaattattttattctttatccaacttgtctacaaattgtacgcacttgttaacatcattcatagataccttaaaaagtatgataaaaaaaaactaatgcacaaactttgtgtaaataaatatgcatataagtaattcttctgtaaatagtgtacttatacatagattcaagtgtgttacatatatatatatttatacaataaaatattattataaatgcaccatattctatataaatgggttgaaaatgatgctgtccattctctttgcctccaatcgcacaaacaaagctctttcagttttggttaccaaggtgcatatatataaagatgacgcccatatcaatgaacccttttaaataaataaaaaaaaaaaatataaactaatcaattaggagcataaaagtattaattaatatatggaaataaaaaagtgaaaagaaaaaaaatacaaagtatgagtaatgtgtggtactgattttagataatatctttttatgaagaactcatttaaaaattattagctaggaatagaaggttttaattaattaacatacaaattaaaaacaaaatacttttccaaaatgattattgaaagaaaaatatataaatgacttatttataaagaaaatatgttaaacagcaggagctaataattaaaggctaccaaacttattagactttgtgataaaatctaaatgatgttatattcctgattgaacttttgatgtatttttgtgcatggatatatatatatatatatatatgacattaataattataagttgaattaattaacaaagaatatttaaatggaaggtagttgtttggttgtgggagttggagtgtgaggtggacccaaacgcatggcaagggtgatgacaatatcaattcctcaaattaaatcacaaattagagcttgtgttaaggcaaaggcttctccttacacacgtgcccatgtctcatgaataatatatttatatatacaccccatcacatgattaattcaaacatatattaatttattatctaaactatgtatatatagtaaagcaactaatctcatccatacatatggacaatcaaacaaaccccatatatttccattgcatgtctaatcagttcaataatacataaagatcttaaaattttcattacaattgtagttgtcttttattcacatgtatatattttagtgttgcgtatttgaagctaagaaagtagtttttggcttttaattaggaagcatggattggaaatgacataaatttagttagaagcgacttgtgattgggaccaacaatcttaataagcctcttgttgggacaaatagtataagtataccctttagagttgttttggtataattttttatagctttggcattgaaaagaattttttagtttaattattattttcatgtctataattatttttagaactttttgtaatattgaaattttttgaataatttacagtatgaaaaattcaaatattttgttgattgtttttttcatacatatttaagcaattatttgaatttttttttagtattataaattattttggtttacttaaattgtacaaataagagtagaaaactaattataagaaaaaaaaaaaaaaaaactaaaaactctctgaaatgctaaaaagaaaaatgtgtactaaaaggattttttttagaattgtactataaatttcgaatagtaaatgaatataatacatagagagagagctgagattaatggtgggttaatcgtttacacatggcttgggataaagaagataattttggtctcacaaagagctgacaccattattttttggggtgagtgtttgtgatttgatttgttctcctctcccattcatatatatagatatatatatnnnnatatataaatatatatattaaattcaaaaacttgctgatgagtatggttctgtactttgcaggctcgtaagaaacaattcttgtttcttctttgatttgctttcttatattttttccaattattatttgaaataataaagctcttaattattaccaaaatttaaaatatatgataagaacaaaatcccctttgattctttatgtttctatataattattcaattcaacatatatatgtgtcaaactcttgttttttttttccttcttagtacaaatgctacatatatatatatatatnnnnactagaagaaagttacgtgcaaggcacgtatacttaattttatggtaggtgctctataatttaattgaaaaagatttaataaatatatgtgtttatgtatatttggattcaacaaaatatatgtgtttatgtatatttgttttggcatatcagtaaacatatattttcaacaaa

SEQ ID NO: 24078 - DNA, 5198 bp, Cannabis sativa
aaaaaaaaaaaaaagtgaagaatgagacttgaaaacagtattggtcgttgtgaaaaggcaaaatgtggcaacacagatagaatattaataagctaaggaagaagaatagtaatagtatagtatagtacattaccatataagatatatatggcagttgaaaagaaaatctgaaaatgtataatagctgaagcttaacttcatggcaatggggaccctgcaaccaacaacaacagcaacaacacctctaataacgtgtgctcattaggtgagacaccttcacaccaaaattataataaaaaatatatatcccataattctcttttccctctccattcataataacctacaactctcccctctttcactacttcacacctctcaattctcatctctcaccacatttgcatgctctctcccatctttctgatcacaacatggaagctagcgccggacttgtcgccggatctcataaccgaaatgaactcgtcgtcattcatggccatgaagaggtgcatatatataagacatgcatgttgtataattattgttacgtgcatgacaattattaatagagtatatatatatatgatgtttgtgtattgcagccgaagacattgaggaacttggatggtcaagtgtgtgagatatgtggagaccaagtgggattgacagtggatggagagttgtttgttgcttgtaatgagtgtggctttcctgtttgtcgtccttgttatgagtatgagagaagagaaggctctcaaaactgcccccaatgcaaaaccagattcaaacgtctcaaaggtacatacatatattctaaactttttatatgaattatgaaggtgtacactatagttatagtaagcattctgtatgtttttgagaaattttgaataatttgttgcataaaaaataaagtttaaaatgattagttacacgcatataaaataaaataaatacccgagcaactgactatttgaatcatatttttagcacgtttgttttttgttttttctagtttagtttaacaaaattatgtgggttgttcatagtttttgattaattaatcagaaaactatttttaaattattaccaaacaatacttaaattattcataattttctgaaagtggatagatactacttataatgtataaatcaatttttctaaagtgattctctcacctaattttttatctatatataattacatctataatttgaattataattttattaattatatatataatgctgttattgaagggagtcctagggtggagggagatgaggatgaggaagatgttgatgatattgagcaagagttcaacatggaagatgaaaagaaaagacaagaacatattgtggatgctctgcttcatggcaaaatgagctatggaagaggccatgaagatgaggacacttccaatgctcaattcccacctgttattgctggagttagaagtagacatgtaataaaaaaaatataatatttaaaatgtattcacttgaatttgctctaaaacttctgttcatgtaaatttcatatgtttacacaggttagtggagagtttccattggcatctcataatcatgatcagcaaatgttgtcttcttctctccataagagagttcacccatatccagtttctgaaccaggtacccttttggttacttattatatttctttataaagattataacaaccttaatgattcttacgtttgtaattattggtttttgaaaatgaagggagtgaaagatgggatgaaaagaaagagggaggatggaaagaaagaatggaggattggaaaatgcagcagggaaatcttggtcctgatcctcatgatgatgttaatgatcaagacatggctctgtatgttaacttacatattaatcaatacatgtatatacaaattaatatgatatatgaaaagactaatactaattattttatgtaggattgatgaggcaaggcaaccactatcaagaaaagtaccacttgcatcaagcaagctcaatccatatcgaatggtgattgtggctcgtttgttcatcttggccttgttcttccattatagaattttgaacccagttgaggattcatttggtctatggttgacttctgtgatatgtgagatttggtttgggttttcatggattcttgatcagtttcccaaatggttccccattgaccgcgagacctatcttgatcgtctttcaatcaggtatgtaaaactaaagagcataagaagcaagtgaaaatcaaaataaaagttgtgtattttgacaagtgagtttactaactcaaattttgtgtaggtatgagagagagggagagccaaacatgcttgccccagttgatgtgtttgtgagtacagtggatccaatgaaggaacctcctattgttactgccaacacaattctttcgatcttagcaatggactacccagttgacaagatctcttgctacatttctgatgatggagcttccatgtgcacattcgaagccttatcggaaactgcagagtttgctaggaaatgggttcctttttgcaagaagttttccatagagccaagagctcctgacatgtacttctgtgagaagattgattacctcaaggacaaagtgcaacctacttttgtcaaggagagaagagcaatgaaggtttgtgaacaaaatgttacacaaggatttgatttgatgctttgcctagttgttacatagcaatgcttgtgttggaatcaaaagttagaaacccttttcagcgataacaaaatattgtttatttgcttgtttttttgacagagagaatatgaggaattcaaggtgagaatcaatgctcttgttgccaaagctacaaaggttcctccagaaggttggattatgcaagatggaacaccatggcctgggaacaacaccaaggatcaccctggtatgattcaggtttttcttggtcatagtggaggacttgacactgagggaaatgagcttcctcgccttgtctatgtctctcgtgagaaaaggcctggtttccaacatcacaagaaagctggtgccatgaattgcctggtaagaatttcaagcagtctgttatttctatcttgagaaaatcaatgtgcatgttttagtaacaacaatgattttacttgccaatgcttctaaacttcatgaaaatcattctttcacatgttgcaaaaatttcaggttcgagtttctgctgtgcttaccaatgctcctttcatgttgaacttggattgtgatcattatattaacaacagcaaggctgcaagagaggccatgtgtttcttgatggatcctcaagtgggaaagcgagtctgctatgttcagttccctcaaagatttgatggtattgataagaacgatcgatatgccaacaagaactcagtcttctttgatgtaagtcacacaaaactctcacatcataatggcctttaatcctactatttcaagtagttaacagctaaaaatgtttgtttttgtagattaacatgagaggtctagatggtgttcaaggaccagtatatgtcggtacaggatgtgtgtttagaagacaagccttatatggctacaatcctccaaagggtccaaagcgtccaaagatggtgagctgtgactgttgtccttgctttggccgccgtaagaagcttcccaagtatgtcaagaatgaagccaatgaaggagctagtctacaaggtctgtaaagatctttgtcctttaaatactttccttgttatcaaatgcaaacttttctttccaagccgactaagtttacgttcgtttttcgtgtaggagtggaagatgacaaggagatactactgtcagagatgaatttcgaaaagaaatttggacaatctgcaatttttgtaacctcaacattgatgacagaaggtggtgtgcctccttcctctagtccagcagccttgctcaaagaagccattcatgtcatcagttgtggttatgaagacaaaacagaatggggtcttgaggtagagttcaaaagcttatcaacatttacattctatataatgagttttagaaaaatggtagcttggacaaagaactgaatattttcttgctcattgcatatgcagctaggatggatttatggatctatcacagaagatattctgactggatttaagatgcattgccgtggttggaggtcaatatattgtatgccaaagaggcctgcattcaagggtacagcacccatcaatctttctgataggctcaaccaagtacttcggtgggctttaggttccattgaaatctttttcagtcaccattgtcctctctggtacggccacaagcaaggaaagctcaagtggctcgagcggtttgcttatgtcaacacaactgtctaccctttcacctccctaccacttcttgcctactgtaccctccctgcaatttgtttgctcactgataaattcatcatgccaccggtatgtgcattacattaactctttcaactcaactcattttatgaggaagataactattcatttaaccatttacatttatttgattctgttggtaaaatgatgatttggtttgttcatgttctagataagcacttgggcaagtctctacttcatttctctgttcatttcaatctttgctactggtattcttgagctgagatggagtggagtaagcattgaagagtggtggagaaatgagcaattttgggtcattggtggtgtatcagctcacttatttgctgttgtgcaaggtcttctaaagattttggctggaattgacactaactttacagtcacatcaaaaacaacagatgatgatgattttggagagttgtatgcctttaaatggaccacacttctaattcccccaacaactctattaatcatcaacattgttggagtggttgctgggattgcagatgccataaacaatggataccaatcatggggtcctctatttggaaagcttttctttgccttttgggtcattgtccatctatatcccttccttaaaggtttgatggggcgccaaaaccgaacacctaccattgttgtcatatggtcaattcttttggcttctatcttctccttactttgggttcgaattgatccatttgtaatgaaaaccaaggggcctgatgtcaagcaatgtggactcaattgctgaaaatattttgtacttgcatttgt

SEQ ID NO: 24079 - DNA, 2348 bp, Cannabis sativa
  modified_base (595)..(596): a, c, t, g, unknown or other
  modified_base (2313)..(2322): a, c, t, g, unknown or other
aacatatatacacacaatacatatacataaacacatattcaataaaacataaaatatatacatatatattatatatcaaattaataaatatttaccttataagcgcaatccggtgaccaattgcaataaaaatacgaccattatgcacacacaacaacataatattaataaaatgaaaaaatctaaaaaaaaatttacaaaaacaaaaataaagcaatgtacattaataaaatgaaaagaaatcatatttatacattaataatggacattgagattcaacgttttctccaccaaaatcggtggtcagagttataccaccacctttttttaaatgagttcggttacagtgatagacgggaaaaaaaaccaaacttttttactgtataactttaagtattgaaaatggaaaattttaaaagaaaaatggggtaaaatagtgtagaaataagatagatataggattttttagtggtggttggcgagaattttgtgtatttctcttggttctgctatggggtggttgcttatcacgctaaaggaagaagacgaagtggggaagatgagtttgagggttgtatatatatatatatatatnnatatatatatatatatcttatgccatcggttgttaggaaataactgatggcatagacgcacacgtatcaataaagtatgcacatatgttgtctatttttttctaataataaataaccgacgacataggtgtaataaataatgctgaatatttttcaacccccaaccgactctaaaaggtataattaatttttacacctatgatttttatcaaaaaaaatgcatcaaaatgtcaatttaaactaggcgggtattatcacaccctttagcttccctttttagaaaatgagttgaaaaacagcctctctaaaaacctatattatagtagtgaggtatgttaattttgttttaatgttagtattatttaattagcttgatcaatatatattgttttggaatttgaagcattacacagtatgagatttgagtttctatactcataattttttttcttgacaaaatactcataagtttttagtgaacaaatgacgtggaaaatttactatttttctaaaatagagaacctttaagtttttttaaggaactgtactaaaaatacactatagttataaatattttttttttattttaaaattttttataattattcatactttatatttatagaataatattcattgctctaaatatattttattaattattttaggattttaataattatttttgtatgggaatatgtgtatatgttattattatatatttaaaatgaataaaatgtaatgaaattttaaaaaaaagtgagatttcaatgtatgctgtaatgtaaaagtgcgctgtaaaatagagaagacatagttttaatagtatacattgtattcagtcgtattgtattatattgaattagattatatatcatatttatatttttatgtaatattatgtttaactttagtttatactaaaatattatatatttaggtatttataaaaattaatactatgtatggttttacataaaaaaatattgtataaaataaaatttaatataatattatataatacaatacagtataatacgatgtgtcaaacgaaaagaagttttgggtgcttaatctacattattaggagtgcttaatctacaacatactacccatcatatgctttagtgttacactaaatacttcatacactatctatcatatatactttacactataatacatatatgcttcatatatatcaacctttcaaaaatagaaccattatttctataccatccgtcgacataaattttgatagaagagcttcaattattacactcaactttggtgtaaggcagatatcatgagtaatagctaagttgttatctcatgtaattagacccattttcacttataggaataagttactcaacacaatgtgaaactacttacttttgaggattaaggcatataaatttaagcaatttataattttatacctttattcgttaactagaattaaaatattaactatattattttaatagataaggccaactaataaagtttgttattaatgatggtacgtataatagacaaaatattaatattcttataaagaaaatgctaaagattatatcaatggtacctaggcactactatgtatggtataattaagtatatgattttacatactttaatttaataattaaataaccgggaagacaccacattcatacaaaacataattagtatatatatatctttatatatnnnnnnnnnntatctaacggcatttcttggtttaac

SEQ ID NO: 24080 - DNA, 3003 bp, Cannabis sativa
  modified_base (53)..(63): a, c, t, g, unknown or other
aaataatttaaataaactaagattttttgaaaaaaaaaatcaaacttatttannnnnnnnnnntcatatcttaacaaataaaaaaaataattaaaaattcaataaaaatataaaattatgttgaaaagatgttataaattacactaagaaaatattatgtttacttaaacaaatctaatttttttgagaaaaataagatatactcaagtttattcccgtaaaatttaatttttataaaaattgaattttaatatttttcttaaactatctaaataattatttttataaaaaaataaataattttttaaatcgcataattagttttaaaatttaatttattttttaatttttttaattattcaaaataattttttcttaagatctacattaatttttttaaatttactaagaaaatgttgaatattcctcatttttattcaaaggaggtatgatttgatagttgtcaaagttcaagggacaaagttgctaatttacaagacacgtcagttttcaaacggaatgatgggacagaacctaacaaaaggactaaaattctgtatatgtaaaagttcaaggggattcctaacaagccgtattgtaagggtcaaaatcaatattgtcaaaaatttaaagggtaaaattattaattattcttattaatcatttttattttcattcaaaaggtagtctccaatcatatcattctttaaagatgtaaaatactttcacataacctaaaaatataatatttattttatcttttttccatccattaattttagaattttttttttgttctaaaatattctaataataaacatcctctaaaagttattaaattaatattatattatttaatatatattaaataattaaaatttcttacatcttgaaaataataataaaaagaaaaagaaatggaagaaataaatcatgtcatacaattgtcaaaaaaatttatcactcataaaaatatacaatatgaagattaattttataaacaaacatattacatattattataagtatagatctaaataaaacatttattgattcaaagagaataactcaaatagaataagcgtgccttaattcattaatagaagtgatctatgtagtgattttgggtaatgatcttccaagaaaacaagacttagggttttctaattttctctctaaatggaggaagaagaaattagattggctcttgtttcttagggaccactaccgatatataacctcatagctaggttattaattttaagtatttttaatttagtttctcaataaattagaaatatcttttaaggtatctacacatttaacctatgacattttaatacccctgacccacaattactaaaatgatcactttattttgggtctaactgcaaatagcaatacactaatatacatataggggtgacaaagcttgtcatcgtgtcgtgtttgtgtcatattttatgtgaccggcttttaaattttgtgtcaagcttgtcgacccgttgtttaactcgtgtctaattatctcagcactaactcgacccgtaaaaaatcgtgtcgtgttcgtgtcgacccactgtgacccgttttgttattattgaagctagaattgtagggaaaaataataaatttaagctctattagaaaacttatatacattatgtatatatagtttgttatatatataataaaaattaaaaaaattataatatatttaatttcatgttaaaaaaagttaaatttaatttttttttaatttaatattgaatcacgaaatatatattttttatataattatattattattattaattttcatttttttatatttaaataaatcgtgtcaaacgtgtcacatcgtgttaagcgggtcgtgtcgtgacgacccgtttttgacccacgtccaattttcccaaccctaacatgtaaaattcgtgtcgtgttcgtgttcgtgtgccgtgtcgaaagctgttttgccacccctacatacatatgagcccatattaagaattttaatccaacaatctctcatttgggctacatatattttctcattgtgctcattgtgtatacccttataactgttagttttatggtactaaatcagatacgcagcggaaaggttttgtattgctaattattactgtacacatcctaatggatatctagatgtgtgtacattaaatcaaaatatacaataataagtttagaatatacctcttgaagactatcagggtatccttgaaacttgtcgtatgttgcatcccttaatctagatgaagaggatgatgcaattagactcacactagtgttttccaaatcgttaaccacaaacaaggaatagtgtggtctattaggataaagggtaaagagttgtttttgttgagttctcaacacatgagcaagaatagttgagagaaaaattatttctttcttttctctattaattttgaaaattaatatgtcaaaaagagtgttttaatttctcaaaatcaagcttctgtttatagtagttcaaactcttaaagtaaatcacatttaattatttaaataaataaatatctataaccgaatttggttactaatatttatgaaggaatctctcaactacagagaatatctcaacaactttaaaatatatttaaccacttttcaaattcaagtatttatttaattgaattaattaattaattaataacacaaaaagataaactccatagggacaggtacatgctaggcgcctatccttgtgtatttaggacaaagatgatattttttgttctaacaactttatctcaacaaatcttgtcttgactaaccgcagtgggttaacatctccctgaccgcatgccctacctcttaggcctctgcctcgaccacgaacatttgggggaaactaaactccctaactgccactagatctaatcgagctaccttggcttctcgtgttcctcctagcatccattctgttagaacagcctacaaaaccatgagctagcc

SEQ ID NO: 24081 - DNA, 2638 bp, Cannabis sativa
tgggactaatctatggaccaaacactgagaatttaggggttaacttgtggaatttttagctcagactatgttggagacatagacgccagaaaatcacaaactggatatgtcattaaatttaacaaaaaccagttagttagaaggcagatcttcagtccatagttgctctttcaaaaacagaagctaaatatattgcttgtacagaggcagttgaggaggctctatggatgaaaggcatcacaagggaacttggaatttaacatgatatagtgtaagtatactatgacagtcagagtgcattgcatctcagcaagaatcaagtgttttatgaacgaaccaaacatatagatgtgaggtatcactttatcagagacactattgcatatggaaagatcaagctcctaaaagtctcaactaaagataatccatcagacatgctcaccaaagctttaccaaaagataagtttcaacattgtcttaatctgttgcagatctcagagtgaagactcaaggaaatgctatgctatcaaagtgttaatttttttgcaacctaggtacattcgaagtcaaggtggagatttgtaggttcctaggttgactccaaatgtattggaaaagttgtacacgtgtaattttagttatgtatagtggcggttaagtaactctatctaaattgtatccttaggcctatctctataaacaggtccaatccatatcagtgtaaaactaatatctttgtaaatactttcaaattaaataagagagctatatacattcatattttagatctgaaactatgttttattttgtgtgtgtgtaattggcattctgccaagtgttctcgagggctagcaagtgagtttagattgtagatattgggattgcaaatccaacagtgtgtgaaactactatattcctgctacattaactatagtaaaaaaccaacaaaaaaaatcattgcccttgtaagtgacatgaattgtaaagtgatttgtagttagaattatcaaatgtggaaccatctgcaaaagctaagaaaaaaaataattcaatttttgtgatactatgttcaagttcatatcgaattccaataaggcaaaaaaatacaaaaaaaaaaaaaacaattctgatatggacattgagttcttatcaaactctatcgagctctaattgagcaaacacaaatagaacataaaaataataattctataatagcaatcgagtccttatcaaactctatcgaattattatcgaacagtcaatcaaaataaatgaattgaatgacatcaaaaaacttcagagtttcatcaagttatgttaattcactaattaaaaatatcctatcgagttttatcgagtccctatcgagttcatcatcaaccttagacaaacctaaaatcctacaagcactattgactcagctttatcaagtccatatcaagataacatcgataaatcattgatttatcgagtttacttttaatttaagaaaaaaaaaatgtccaattcgtttggttctaacccaaatctaattttctccaaacacataccaaaatcaacagcacacacaatcttaataattcattatttaaagatttaagataaattttaaagaggatgggtaatggagagaaaagaagagaaattatgctagaggtattttgaaaataatggattaaatagcatattttttttggagaaattttatttacacctaaaaaaaaattatataaacatttaattttaataatttgtattttacataaatatacatatatttaattatactaattttcttttttttaaaaaaatcctctagtttatattcttaaaaaatatacctattaaataaaaataaattacttttcaaaaaaaaattcttttataaatattgtgacaaaaaacttaaaataaaaaattatatgaaatttttataaaaatataaaaaaattatatataattttaaaaaatatatatataaataaaataaaattaaaataagttgaaattaacatgagaattttcttaaaaaaaattatttaagtttattttatttttttgataataggattctttttgtaaactttaaatagtatatatatatatatatattttaaaataatgaatatatcattgaacaaaaacagaatgtttgattacaaaaacgaaaaaacctaagtatcccagagacaataagggaagttgtctaatcacacaagttgtttatccatccgaagggcatgcactgctaatccatgcgaagccacattggttgctcgacgaacatgaattagggatacaattagaaatctggacaacaaactttccaaatcatccaacaaagatccaagatccttaaaaaaaatattgtctcttattaaaagcagacacagttgtaaggcgattagtttcaactatatgaacagtatagcctagagaaaaaatccagtccaaagccatcacaatcgcaatacattctgcttgaaccactgaaaaattaccttcaaaaaaacacaaaaatatactgatattaggttctaataaatataattaaaaaaataactaatagaattatatattttttttttgaaagaaacttgtgcttcattaagatgaaagaaatgttggaaattatttt

SEQ ID NO: 24082 - DNA, 3718 bp, Cannabis sativa
aaagatgaaagtataaattcaagtgtctatcttaaagtagagagaaaataaaaactttatattactcgcaatatggtggttacaagaatgattttccaacctcctctcacatctaaggaaggagtatttataggctctaatggcctgaggtaatagtggtcccaaaggggacaagttgtcactttcaggctgcaaatcgaaggtgtaggaggtggtcttgcgcctcgtatccttgtctgttgacaggtggtctcgggttgcgagggtaatggctgtagtgtaccctttgtcagctcctcagaccttgcagatgtactactcgtaccttcttactttcaaagcttgcagaaggcagggccgtactctcctcgcgtgcaattaccttgtccttgtgatcgtatccttgtcacttcactcttctcttgcttgggaaaattccaccaagttttgacgcgttacgcccgagtgacattctcaacgtcacgaccgagtgacatcctcaacggcatggccgagtgacattttcaacatcatgcccaagtgacattctcaacatcatggccgagtgacattctcaacgatggctgagtgacattcccgatgtcatggccaagtgacatttgtcactcttgtggaagagtgacatcgagccactcttgggccaaggtgacttccgccatatcgtccctcatgccttgatcagctaaccttgaaaattacaagtgccaattccctcatttgacttttgcaaaatagctcagctgatccactctatcttaattggtacacactgcttttggatgagtatttttttgactccctcgatcagagggtatacttatatagtatatagcctatggataaactagaacctttgtattttcgaaaagataacaatgacttaattagcttgtgttgatagattgatctaagatacgaatggctagaacctctttagtgtgtaggaatcgttgttccaaaagagatacaatttttctttctttcttttatagatcaaatgcaatgacggtagggagcaggggaggcttgtaatttgtttggagctgtagcttttgttggttgattaatgaaattttttcaaggttttggtgagaattggtacttcacgctcgatataattttgagtctcacttacaacaataattccttctgtccaaactctcctcctgtggttgccatgctattctgatagtgactttgacggagaaggtgattttctttctttcactttcttgccatgaccttgccctccatccttcttcttttctatttttagataattcatccctcttttttctacgtctacgtgaacatgcaagttggatttttgtaacataacttgatgttgtatcactgaatatcacatcccctaatataaattttttatagatcagaggaagctccctcgtaatttcccaatcagttcatccatttgaggatttgtttatataaacatatttatatataaatatataatatttatgtataggtgtttttgtttatttcttgtatgtggcgtgtgggcggccatgaattaattaatattcaaccaaagataactttaagctctgtaatattatatgagtcgtacctaagatctattagtccttttcttgcttagaaaattccaacaaaccaacgaatactacttcccaccattcttatatatttccgttgagaaatagaaaaagtaaatcaagaagaagaaaacattcacgtatctttctaaataataataatagttcttatttgaccttatatgtttttctaaatcatcaaaacccaagccccttcttcatgagagcttagctagccacttgcacaccatgaagcttctcttgaaacctcttgtcgcagtcatcttcttggttatctggtccagtagtttggattcatatcaaggccaacaattagagaaagataacggtaataaattcagagcctgcaaacttccgtacgagtgcggccacataaaaaagcttcttttcccgttctggggaggcaacctacccagctactgtggctacccggacttcaaagtttcctgtgacccccaaaaccgctctattttcaatatccaggatgtcaagtacatcttatacagtatcaattcttctaatcaaaacattacagtcacagcggcgagattggatctgttggagggtccttgctctgggaatgttgacattgttagcggaaatttgacttatcgatacgatgttcccttttacttccctcaggaggtagaaaatgtcactttgctctatggctgcgacaattcagaaccagaacgactcttgaagaacaggtttttgtgccctacaccagttaaagggagtacaattgtttattatgcgaacgattctgtgatcgaatccctgagatccagttctggggaggagttggattcgtgtgaatctttaagagtttctgtatacaaagatgctttaaatgaaagcttaagaagcctgggtggcagtgaagagaagatacttgcaattggtgaagcttggaggaagggatttgaagtagtatactctgaattgacatattgtaaagattgcatggattctggcggcatatgtggctacaacgacaattctattgagatttttagctgcttttgcccaaggcattatacacaacgggcatcttattgtctacatcctggtaaaccatatcctttctcttcttttaataattcagttatttggacgattagagttactttaagtaagttaatatatatattaaacccaaaattagtgatagctaataattgttaggctacatttgataagacgatgattgatatagtcatttaggaaggaagtaaatggcaaatgagtgtccagacaatccttggagtgaatataaattatagttgtacggagacacaaccattcctgtggacaatattatcttgaagaaaaatactaaaagatattatttatgtactaaatattggtattagtgtaattaagtatgtggtctcatataacttaatgtaaacatcgctaactaatcctaaaacaccacctctatatgatcttaaatactattagtacttaatagcaatattctatcttgattttggaattattctttgaaaatgtagagcatggaatccatgatatatatcttccgaaattcaaaactacggccctctaatttatatgtccatcttatacagtctaagggaaggaaaattattgttgcagaactaattcagagtttagaatatactaatttaattagttcatgcctagtttcattgatagacactaattttttttgtgatttgtaattgtgttaattataagcaacttgttgtccgttgagtgtgttgttcttatgccatccttttaaagtagtatattaacgattaccgtgatagatagacacctcttatcctttcaaaaagaaaaagtaatagacacctcttaccagttttattggttgtcggaattgacaaagctttttaaacttattatctcatcatattctgtctttgcttgggtagaccaaactaaaatggaataagaacaacttaaattttggaatccacgttggaacaaaaattactctatctgattagatgtaggaatagagtaaaattacaatatttgtaaagaaaaataaaagtgtaaacataaaattcatttaaaactttaatttactccggggatggaaagag

SEQ ID NO: 24083 - DNA, 5524 bp, Cannabis sativa
agaagttcacttgccataagttttgcagcctctcaaaattcattatgctctcatctctctttgttccatatctttctctcactgaaaaaatggagcttcaccggctttaatggcggcagatttgtgaccccaccatctcgcaaagaaacctaggaacattggtctccaaaaccccattgttcctcccttctatccccgaatctactttctctgcacaacaaaagagtcgatcttctgtgcgctaaaggacttgtgccaccttctttgagatggaaacaactcaccaccaccgacggagacctaaaatgaaacccccaccagagaaagtaattaatctaatcccaagattaatgctaaaaaatagagaaaacaaaaatcgtaattagattagtatttggaaaaatcagacttaactttaagtaatatataatatttaagtaacaaattatttgaaatgattttttattagaaaaaattattgtacccttttatattttaaaactcctgaaaattattttttactaggaaatgtcctagtccaaatgaccacacatatgaaaccatatggttgtacaccctaaaagtgactcttgtgaggaagatttgttttgggggattctttaatcttgggacatacttggacgagtatacacgattattgttgatcttcccaacaataaggaattcaaggatcaattcttctagaccaccaaactttatccatgctattacataacttttcaaaaactcacataagttttatttttttgtacttattttttacattttttacttttctaactcgaaattatttgttgctctcattagcaattctgctgaagtctgactcaactggagttgtggcgagacatcattagcaattggttaatttgttagataggataagggttgctagttttcttcttcatgagccacacttgaggaattgtggccttcttagttctgaccaatcaccgatggaagtaaaggttaccaagtatttaatttggaattcatgttataattcatatttatcatagttatttttttagaaaattattctatatactattttttatatttttttttcaaatttagctgttctaatggttgcttcggtaatttttatatgagttgctattttaatttccataaaaatacaaaaaaaaaattattttaaaatataaaaatgaaaaaaaacttcttctttttagttgacaatgcatattataaatcatttatttatttttttttttctaaaaaaatggagagaacatgtaaatttttatattttataatataaaaatagagaatggacccaatttggtttttcttatttctttattttatcctagaatttccaaatatattataggaaatttgtatgtttaagcttgtttttgagaaggaagttgtttgaggaacgggaactaaggcggcggcgaaggagttgtgttgggttgagtttttaagattaaaaaacaaaaaggagagagagagagataagtaaaagtcaaatgatgctgaagaagaccatcccttctctttcgcttcctttgccttcctctttgtttactttcacaacacaaaaaacttctccatcttttctcacttccagaaaaatggattccctctcagtctcagccaaagccaaacccccaactacgaccattactccaaaaatacccaaattctttcctattcaacaaacttcttctccaactcactctcactctgtttccacattcactttggtctcttataacattctcgcccaggttaatattaatttatcattacatctatttatcaatttatatatataaactcatactctcatatatgtatataggcttatgtgaagagctcttattttccgcattctccatctccttgtctcaggtatatggaatttgactacatagaatgatttcatttttgtggaatactgaatttgaattgacccccttttggtcgcttagtgtaaaaatgagaaagttattttgctaattatactttttgaagctgttgtttttggtgaattcttcatctttaatggctttggttataggtggaaagctcggtcacaagcagtgttaactgttctcaagaatcttggggctgactttctttgccttcaggtatgttgtatctggaatcacattttgcctattttactcttattgaaatttggtatttaatacaatctcattgcttatgattgtgaaacttcacaggaagttgatgagtatgagagtttttacaaagcaaatatggagaaaaatggttattctagtatttacattcagagaagtggtcagaagcgcgatggctgtgggatttttttcaagaatgatcggtatgtcgattttgttgttgtgaaagccaaacacatgtattgttagatttgaattagacagctttggtatttatgttaggcctcaaattagtttatatatattttattgcactagaaaagttagctaggattatggttgctcagttgttaagtctttaatgtctgagaggtactgttggcagggtgtccaatatttagagttccattggttgaatggttaggagtatttgttagtaaatattcagattaaatcatatgaaaggtattgattattgttttgtgattgtttagagtaaaagatcacccaggagtttcggcaagtttctcaaataacttgggattttgtattattctttggctcttatcaataaatagcctttcgtagttctttcaagaactgaactgtgttcaagtgtctatcaatttatagtggcaaattcacattaactggctgaaagggaacctcaatcattgatgggatatttatctttagtaggttccattctgtaatctttcgagtatatagaacctacttattatgtgctgaatgtttccataaagtctacatgggagttgaatgagtatgctcattaaagctgctggtactataggattgtgttgttcagtatgctcaacgaaaaataaaaagtttgagttgcacatttgtactactgctgattacgattatatgacaccaatgtttgccttcttaatgatctgtcttgcgtttgattcagtgcagagttaattttacaggagaatatagactacaatgatctagtaaactcaattcaaaatggaaacttattgatcaatgaagaacagagtgacaagaaagcttccgacaatagagattctgaagtgacaagtggtaagtctattgtataatttttgctgtttttatttctcacaaaggaatttaagtttttcgatgaattaacttagattttccataaaagtaaagtgtaacacaacatgtgctatttttattgttgatagagggtcgatttgcttttttctttatatttatttagttgtcagttcctctggatcagattacaaattgcttaaaatatactttctctatttgagtagttttgatttttggctgaacccttatacatgctaagctgtatgcgaaacaaagaaatgaagggaagacatgttaacaagagtggccatccacatgaatattactctctatttgggagctttaaattgacttatcaaacatccgatttgctactcagtttatttctataaatccataaacagtggatattgggatgcaataaactgcatatttcttccacactggatttttgtcatttatttctcggttgtttatacttttcatgtatgcctttccttttatgatacttttgttgcccattgaggatttggttacaaatggaacagtttgctggaagcttacttttattcttgtctgtttgcaatacactaataggtaattcacaagatcggggggatccaaatgatcctcgagtgaggctaaaacgtgattgtgttggcattatggctgcattcagactcaagtgtcctcatagtcctattgttatagtggcaagcacacatctttattggtaaaatttcaatattattccataatttacaatacaactgctgctaatgtttatttagcttggactatattcgaactaatcaatgtctttgccacagggatccagcctgggccgatgtgaagcttgcgcaggctaaatatcttgtatctcgtttagctcaatttaaagcattggtatccaacaaatttaactgttcatcttcactatttttagctggtgatttcaattcaatcccaggggataaggtttgtaagcactaaactaagcattttattcatagctctctttttcttgcttattgtctacttccgttctctcattgattggtatacattccttaatgttttcttcaatttgatttcatacttagttaatcacttttgggaaacctgatacattttacttagcaatgcacacacaccccacttgatgaaatgaatctacgtacacacatgcatattgattctcataggctctgcatcagcacaattgaagcaactctgaaattttaccatgctataaagattaaagaacttaaaattgtagttctgtaagctaaagaaacacaattgatttcccttttggaagtaaagaatcatagtaaaacagagtagtagaacattctacagtctctggcttcgagttccttaagctttatgtgaatgtgtcgtttcttttccattctatttcaggtttaccaataccttaattcatgcaacaagtcctcttcctcagagacagtgcaagaagatctagaaaacattcctattcgtttatgcagcgtctacaacataacgaagggggaaccgaagttcaccaactgcacaccagactttacagatacattggattacattttcttttctccttctgatagcataaaaccagtgagtttgcttgagcttcctgaatcagattcttctgatgttgttggtggactaccgaactcaagtcatccgagtgatcatttaccaataggtgctgagtttgagatttccagtgaggtatagttttgtttgatagatcaacaattatttgcattgagattattttctttttaattttttttaccgtaggtgattcaataataagaaatattgttgtagtgccttttattttttgtttggaaacttagcttgtttttttgacaataagcattgtggttgctaaattaataatcattcattatctttcttgttggatgatttatttttttattaaacataacctatacaacttattcatatattagttttagtgaacagattatcattaatttgcagatgataaacatgtgattagcctgcaattaggaatatgggatgaagttgcctcgcttataacggaagtttaatatctttttttctcgtaatcaaacgcggtccttatttctttgtcgcggtgaatccaaaactggagttaaaagtgatgtaaaggctttttaacttcggttagtgttattcaaaagagaaaaatatgtaaaatctgaagttagaagcctcatttttcagtagtgcaacctcctcctatgaagcatcgtgatgagaacctgcaactcaat

SEQ ID NO: 24084 - DNA, 1488 bp, Cannabis sativa
aaactaaaacgacacaatctgtcgggtaaaaaaaattattaaagaggtaaaattttataggaaattaaatgtaaatatgttaatgttggacatttggagtagtttggggtcacaataacataagagatattaaaatggtcaacatctataactataaacatagacaacataaatgtataattgttttgttgattttaattttatttttgaaggcagaaaatggtgagtagtttcaataatatatgcacaatacgatacgaccatatgttattatatatgttattaatcgaataagcaaatcggcaagacaaatgtatggtgattggtcagtttcaatttatgcaaatgaaaataataagtctcttctttccaacaaagcccaaaattatggagacaaaagttttagaactattattattattattactgttcttcccacttcctatcacttattattattattacacataaaaacacagggattgaaaataagattatcttgcttaacaaaataaataagtaaatataaaaaaatactaatatagtatataattttgttttgaactattaaaatcaaaatccgttgtagtctagttggtcaggatactcggctctcacccgagagacccgggttcaagtcccggcaacggaataaatttttttaatcattattatttattaattatcatttgcatgtttaataataataaaatcagtttcccccaatataaataaaataaaaaatcataaaaaacgtataacctccatctttcttttaacctcttttaataaccaatttcttttctctctcattcttcttcttttaccaaacaaacatatagttaatattccctttagaaaaagataaaaagacatggttattgagtatcacccaacaatacacaagtaactccaaaatgtatgttcatattggctaggactaaatatttttatttagttaaaaaaaatatgtaaacgtatattttcttggggaaccatgacgattatagcctcaagtgtgcatccgctcctccttgagggggagtattaaacttgctcggatagtgttagagttagttattattgttagttgttgttcttaagcagtaataaggtagttagagagtttgttatggtattctcgtttgtactcaattactataagtagctttgcttcccctgtaataaataacacatgaacacttccattaaaaaaaaaactacacaagaacacggggattgaaaataagattatctctgttaacaaaataaataaggatatatataaagttcttttgaacataagatatcaaaatccgttgtagtctagttggtcaggatactcggctctcacccgagagacccgggttcaagtcccggcaacggaatatttttacacaaaatttcatttatatcgtttgcatgtttagtaaataactttaattatttttttgagccaaacaaaaaatataacctcaattttttttt

SEQ ID NO: 24085 - DNA, 2876 bp, Cannabis sativa
atgagagggaaaacgatttttgctgatatagctacatatcttctattgtaacaaactaaatagaatagtgaaatggtgcatgattttgatgaaatcgtacatatgtaaatgtaaacatatatatcttcaattcacaatattaattaatattatagcttaacgaaaagaaaaaaaaaatgcttcgtttttgactttagtagccaactaaactagtaacgcgtgcaaaatatagtgcaatttccactaaccactcgaccctgctatctaggaataagataacaaatacagattcagtgtttttttttttttttttttacctttaagctctcataacaagactaaaatatatatttattattttacacttgtgttttcacttttcagtcccttactgcagatggtatttttggggcagcataaaaattataaaaataaactttctattgtattgtttaatcacattcacacttaataactctcaattcatttatttatctgtctttttgagtatcgtttaaggctgtttttcagggaaattcttgaactttgttcataaacgacatattgtcgtgaaaacgatatgtcgttttagttcaaaatggtaatcgagacttttgtcagggacaaaggcagtccagtcacagaagatgatgttgttagttacaacaccaaatacccgccattatgagtccggtaatttgttcttctcatatagttcctcctcatgcttctcttctaaacccatgtcatcctccattatcagcgtccaaaaacctccataattcatcaatttcatccattaatcgccgaaaccttctcactttactcactctctccactacccaattcatagattttcctctcaaccccatatctcctccggccgcaactgcccgcggcctctttcagatgcccccagttcgactcataaacaggtaagtcacaaaacccatatagcttttgttgtttggtggccgagaaaatagtggaaagtgacaaaggaaactggttttttctttttgcttgtcatgatgattgaattaatgctaaaagtgaaacaatggtaattttaatactgacttacgtgttggggttggtattgaaggtattttctggttagagcaggggaatctgaattcgagagctttggggtaataaacacaaatccagttgcgaaaacatctgttgataatggattatcagagagagggaagaagcagacggtgagagctgcttttcagctgaaggaaatgggggcttgtgataatggttgttggatttggccttctattactcaaagagcttaccaggctgctgagatcattgcttctgttaatggggttagtcgaaggtctgcaatttcatattaatttggtattgtttttaaacatgtgttcttctagagaaatgttaggaaattttcagacttaatggaagagaaagtatgaatcatccaatcactttataaacctttttttttttctttataaaagtcttttatagactgagtcaaaagtaaattagtaaagtatgaactgtagtatgacatgtaactcttgcatgtactgatatcatttttcaatgagagaaagctaactacttctcagtaccttaataaatacttactatttgtccacaagtactagctagctgggatcaagccccagaatcacacacaaaattgtttgtttcccgggaaacaagatcatggaaatcaggattagagagctgtgcttctcttccttagtactcctacgtaagcaaccaaagggagtctgattttctagcttgggaattaaatggcttgctttttctcagttaaaatagaagaggtttttgtttaaatactttgcttatctttgctgttgcagttatattgttcctgagtacagctttttggatgctcgaggattgggggcttatgaaggaagaaagttagaggcagtttcagaagtaataatatacttgttgttttcatattatgatattcataatatgtttacaatcattagaattgtaataagtattatgggatttgaatgtgtggtgttgatatgtaatgtattatatgtctcaggtttatgaatcagatggtatctcaccaactataaagcctcctcctatcaatgatggaaccccaaatgagagtgttaaagatgtgtttgttagagtgacacaactcatgtccattcttgagactcaatactctggtgaaactgtgataattgtctcaccagattctgacaatttgacaatccttcaagctggtctgattggcctcgatctgagaaggtaaattattttctatcttgttcttggtatatccatttttcaaactatatttaatagtgattactttctctatataactctaagcacattttctttgtttgatcttttatattttaggcacaatgaactttcttttgcaccaggcgaagttaggtttgttgatacaactagcatacctacttacaagcaacctgcatctgctgtatataaatgtataaagttaccaaattgtaactaaaattctctctattttgtactatttgttaaccacaaaactttcttgccttgctttgaaataatgtcttagttgataatttagtcaatatattcattttcttggactttctcttaatccttcacttttaactccatgttgataatttgctttgaaaatttggttgatgaacactcttgatccttcactttgatcaactctctcgtactatgagaatgcgtaagaattgtggactgctttaaagagacgattttgtatggtgaattggacacgaatctgtcaacttaagacgtctcttgcagagttcaagcaagggaaagcagagtatatcacagcgtactttggtgga

SEQ ID NO: 24086 - DNA, 2437 bp, Cannabis sativa
actcaaagcacatcaagcagcaaacggcaagcaaatccattcaacatctacattgggtatcatcaaggatataaatatatataaataagttaccttgggtctgaggttctcatggatcttgtatattgcaactggtgaggaatccatatgcatgtcccatagctagatttcaacataaaacattttatttgatgttcacaatgacagtgtaaacacagccaatatagactatagataaataaaaacatttttctcccagaattttattgaatgagcacatcactgatgtatcacttgattccaccataagaaatatcattaaaaaacataaaaaggccaattaagtcaaagaaagaaaaatgtcatctgataaactttcatttaacttttaataagagtaaaaaggctaacagaaaaaagagggaaatttcaaggttctcaagttcttcataatcatgtattttcctatccaatcaataaatttaggcaccatggatatgatattgtcttggtattttttatttatttattgcttatttttttagccagatgacaaattcatacaaaaagatggttttgaaattcacaaggaagcaaattcaatggttcaaaaagtgttcaaaaatctctcatatcatcatcacgtatgaatttggaatagtatgattttttgcgaaatttttaaaatatgagacatttgctagcaaaatttgacaatacgagatatttccaaacaaaatttgaaacctccaagtgttttatgcaatttctagaacataaaggctattcactgcaaattttgaaaaccccaaggtattttttgtgaattacaaaacctgacacattttcttgcaacaattaaaatccaccataattttattgcatttaccattttaatagaagactaaatatgttgttcaaggctaaaaagatagaaattactgtagtaaatcactacaattacgatgatacgaggactatactgctacggaataaggtctgcctgagaaattactgtagtaaatcaacacacttggctatgttgacttaagaaaagaaaattataaacatctaaccaatcattaatttttatttctattttctttttaaaaaaaggtaataaaaataaaaagtataggattgactttaaagtgtcacaatgaagagaacctttagattcatgtaatcgcgacttaagatgtaccgcccatccttagagaatttcatatcagaaatggatgcaacaatctctgtgaaaaatgatttcgacccgcgtgaacctccatcttccaatctgtaaaaatcaacccacatgataagtttataacagcactaagtgtaacagtaagcatactggaaaggcctgcacagaaaaagttgcaacacaaacaacaatataatcatgaatcaaacaacactaacattatcgcactgtgatcacataaagctgattgacgcatgtcaactaggcgaataaatcctcttgagctgccgtatgcaagaaaattgcaatgaattggatggaactcagctattgttataacttctgtataaaacatagggaagaattagaaatgtaatacaaaagaagaccatactttcatatatgagatgaaaaaatgccacaaaatttctcaaattaaataaaggatgacacaagtaccagtaaggtcctccatatttgatggcttcatgtcaataatgttgaagcactgaccacttatctcaagattccacaagtttatcctaaggtcatctgcagaaataaatgtctcacagtcgctgtacataaaatatgaaaccggattatcatctttggcacaccataactacaaaatttaatgatttaataataagacatattgattgaaaaattcaaagggatggttttattggaagaatgacataattactatttcatatcctccaagcaaccaaaacatgcatatacagtcctatacacaaagacaaagagctagaaaaatgccatgctttacctattagttgagatggagtttatattaaactcatgagcatgagcataagccttccgacatcttgtttgtgcagtatcttccatgtctacaatctagttaggcaaaacattagcatgacacccttttataatgagcagaacgcaataatgaaaaagaagaaaataaaagtagcaccctagcaactaacctcatcatgttggtattgtgttggtgacatgttctttcccatcttatctgtccaatctgaatgatgaccattagaatcctgtccagtcatgaagctcttttcagccaaaagtgcattctctgaactcacatagggagaagaatccatttcttttactttcttcaccttacgttccttcacctgtcatcagaaccaaaattgaagaggagttcaatgttggggtgctaaggaaataattagctcttaaattctt

SEQ ID NO: 24087 - DNA, 2524 bp, Cannabis sativa
aaaaaaaaaaaaaaacagaaccaaatgtatatttcacacttaaaaatatcagctatagttatgatatttctttcaaaatttcgtcaataggtgtaaatttctcttttatttttttacaaaaattgggcatgacacaaacattgagatatgaatagagtacatcaataacattgtgaaatctataaatgtgttcgctattataaatgaaaaggtaagttatacatataattcctttaattaagttaatatcgtaactaaaatactaatttataattgattaatatataactaatttacattttaattttgcaatttggaaagaagtccaaatacgatgaggacacgtatttattacaattacaatatcaatagttatcaagattgacacttattttaaatgtgttcgctagtgtattaactttgttataatatatataattaaactgtattttataaacattaattttattataatataattaaaataatttttatttcaaattaactctttattattttaattaattcataattatttaaaaaaaaattaatatattaaaaataatatttaaatttaaataaataaataaaatattggacccctactacttcaattatatattacataacaaccgaagtcgtagggctacctccacgtgatttagagaaccaattccacctatgtcttcgattattttgtaataaccgaagacataagtccctttatgacttcagtattttcagaaacctacaccttcgcctccaacgacttcggtagcgaagataaactagaataaaaatcaaagttaaatgtctttgttttcttgtagtgctactattatacataacaaatgaaaaataaatatcatctaagaataataatatatcatacaacaaaaaaaatatattgtacaacaaaatatgtgtaccaacaatccataaaaaaaaatcacataactttaaaattaaaaagaaagatataaaactaaaatagatataccatataatatttaagtaatatgcttttaatttaaaaaaaaaattaaaaaaaaaaatctaaaatatacatttttttatgtggcaaaatataattagtgtaaaaaaatctgctaagttttaaaataagattatttacttataaagtgcttggagtcatttgttgtaatttctctctaagaaaatatacttattctgggcaagccaattttgcaagcctgaatgaggggttttagtatttaagggagtagaggacattagccattggtagcaagcatggcattccctctaattttcttcattgttttctctttggctctctctgaagccacttcttcttctacaaagcctgttccttattcccaacctctaaataagactagttttccagaagggttcatttttggagctggaactgctgcttatcaggtatatatcaatatatctagatatataaatatatatatatatatattcactacttttacgcatacatataaatatgtatatcaagaacttaagtctttatttttattttaatttaaaataatttgtgatgttcagtctgaaggggcagcattcttagatggaaagggaccaaatatatgggatgcgtttactcgccaacatccaggtctctctccctgcttctaaccaaagcatgcatatataaatacaatatatatactaactatatatcttaataatctcagtatatatagcgtgcaagtaataataagcacgaaacttttaggtaaatctcatcataaaattcagttaacgaacaaaactatatattttaaaggagtttttataaaaatattgcatttttgacaaaaatttacaattttattattacacgaattttttttactaaaatactctgttttataaaacaatgataaaataacaaaataaaacaattaaaaataacagtgaaacaactaaaaacacaattgtgaaacaatagtaaaaatttaacacaatacttaaaaagaataaagataacttgctacaggtttgaacaacaacaacaaaatagcatggggtctttgctttcattatttaaaaattatttacatttcttaataacaaaaaattactttcaggaaaagaaaactacgggtgtggccaaaatttttaataatataattttgaaaattgaattaaataaaataacaaaaaaattaaaaaaatatctaaatgctgtttttatttctaaaataatttttattttcttgtctaacatatttttttaacatattctctcacatgaccgagtatagggctgggatcgagttcgggatctgagattaggtctaaggtctaagtttgggttgggttcgagattgactatgggtccagagtcgagtttggttccagatcacgatttggatctgaagcttagggtttggagttgactctagattccaaggtcggggtcgggtctagggactaggacaaagttcgggccaagttagaggctgcgggtgggggcggatttgggtctgctgctaggggcggggac

SEQ ID NO: 24088 - DNA, 4541 bp, Cannabis sativa
  modified_base (3700)..(3707): a, c, t, g, unknown or other
aaccatagtctaccgaaatatgctatactttttcaattatttaacaaatgtttcaaaaaaaaatacttacccattaatccacaatgaaaaggaggtcaaggaggggcggcgcggtggttgtaatgaggcgtgaaggatggccggcgttcttcacggtggttgggctggtgcgagttggctggccggacgtcctcaagggtttaggcggcgaagctagagagaagggatcaggagggctttatttttatttttttcgaaaaaaaaatggagagaagccattaataaagatgagaaaaggggaggagttggtttatggggcggatgatggggatgtggtattttatttatttttttaaagttttgaaaaaaaaaataataagggtattttgggtaaagtgggaagttaatagaattgtattgtatacaataattaagaaggttttttttttttgaaataggaattttttttaagtatattaaatgaaatttccctaacaatacttgtatatattaacacaaccaaaatattgtacctaatgaaataactataaataattttaaatgtaatttttttacaaaatcatctctatatttattataaaagaaagaacaaaacatgtttaagtggcatcttaaatttttttcattcaatttttaaaattttgtgaaatttttctactttatttgaaaaagaactacacaaacaaaacgatacataaaatttcttactcaaatacattagaactaaatgtcctacattatttataaattatttagatattattcatataggccatatatattatgttatattgagttgtcttataaaatattttcttttattatgggtggttgattaatttcttaccttatacatttttttttattttattcttaatgtcttagtctattttttttcatctaatatataataatatacaattattatgaattaatttattttaagaatattctttatcatagttttttattttattatttttgctcttaagaatttttattagctcaaaaaaatattcaaactaagttattttaaataaaactaaataaattattttttctctatatatataaaaaaatacaaatcaaatgagatgtcatcttataattatttttgtactatttatctattttataatatgtctctgaagtaatacaaattttttttttttttgtataagtcaaacattgtttataaactatgtgaatattattataaacattaaataatgtaaattattaacacttaaattaatatttttatataaataaaataaaaagtataaaaatatttaatttaaatttatatacaaatatttattttaaatataagtgtataaaaaattaagttttactataaatgaataaaaaaaatttcaattacgtaaaaaattgtaccattaaaatataattcatttaaaaataatttatttttaatatcttttaattattataaataacttcattccagatatgtctttatttttattgaattatgattaatatttatactaattatatataaaagagagattttacataaatatattatgtattcataaaaaaaaataaaaaataaaaactattactcttgaaatttcatttataattaaaaattaattttttttatataaaaatttaaaaaattaataaaactgtgcaaagcacaaatccattccctagttcataataagagaaatagtaaaaagcaattagagttctcatatgtattactgttgtataattaaatattaaatcacccacatttaaatttatacataagaaaacttgctactaattacaacaacaataatagatcgtgttttaatgtgtagaatattctagagtgactcagagcaaagctcactaatatacatatcccaaaatcccatttttgttgagggtcaggctttgttgcagggtatatcgttgtgtattgactctcagttgcagccagaattcatcttctccgattgtttaaatttagtcactaaagttaacggtgattggcaagacctctctgccctttctggtcttgtttctcagataaggttgctcttctccaacttccctgaagcctccttgaagtacttgcctcgacagttcaacgcaaacgcccattgtctggccaaggacgccattaagtcgagagaagaagcccataaggaattattctaattcctttgttgttgctgcctgtgcttagtgttgttgtcttgcagctttttttaatttaaaaaaaaaaaaattgttttataagaaaaacaacaataatgtattccagggccggtcctaggcataggcagactaggcccgcgcctagggcctactcatttttggggcctactcatttttggggcctaaataaaaaaaaaataactcaggggcggtcctacccaaatttttttttttttttttgcctatggtccattttaactcaggggcggtcctgatgtattcatatttgagtgatttgtcagagatttgtattatatctatatctatcaaattttaattttatgataggtttttgataattaattaatgctatgtgtaactgaaatttaaaaacaaaaactataagggacaatattacacttatggctaaggttgaacattaggcaggtttgccaagtttcgggttcgataattttgggctgaaaaaatagaacacgggtgaaatgagcaagttgggcgggttcatgggtggtcgggtcacgagtttccagttccaccggtagtgtcagagggagaaaaaaaaaattggagagggggacaaagtgtatgagatttattttagggggggcgggaaattaaaataatgatataatttttttacataattaatatatactaaaatacacgtaaaaataaaattttgggagggctacatgttggctttatggtactaaggtatgtagcaggtgagttattttttattatcattgtaccatatgtccaagatcatcatgtgtatagatattaaactgaaagtaaatagatgaaatgaatatttatctcttgatatctacccgggtatctttgattctttcacaagttgtatccttgaaatggtaatgacaaaacccacaccttgatcttccagactttccaccatacacaaagactaatgtgggctagtaggataatagtgtatataaagatcttgtataaatctcaacacatgaccaagaactgtttcttttgtgatagcgagaaaaagatttactgataaaaatctttttagtcttaagaaaaagttatgtgaaaaaaattctatatcaaaaaatgtatagaactttgttatacaatatatttaaataaattcaataaaaagtattatttaattaattatttaaatttaaatttatttattaaatcatatttaataatttgaataaataatataactgaatttgattatagatatttacatcttataaccaaatgagagaatctctcaaccacttaagagaatatctcagctactttttaaattcaaatatttatttatttaattaacttagaaatataaaatcaatagggacaccctacataggtggggcacatgcactatgtctggacctcagtgcatgtggtgcctccctctgtctaaaaacagacaatggagatgtcttttatcctgacaactcttatctttttcctatttaattaattnnnnnnnnaaattatttattacaaaaaataaattattactattttgataattcaaaatatatttttctgaacttccatatacaacttttatcccaccccttgataatgtttcaaggtgacgatccaaggaccatgtacctataatttcaatctccaataaactagatttatttattgaatctcatcaatcaaataatcttgtttattaattctataattactctactataaatatggaattgaactcttagtaattataaaataatatttactgagtttattaagtgtccattattgattataatcaattccagtgattagttcttcctgtgtcagttcgtaattagttttggtcaaattactattttacatttaattatttatttattcattaacacataaagagaaccaacatttgatccgttaggaaagttaggattttataattgtagatgatgttcccagtcatccacattattagattcccaaaacaaaagttgtaagaatcatcttctttgaaaaactttaacgattgaatcaaaaaatctaataacatgaacatgaattaatgattactcaggccttagcccgatcagttattgatcatctttatgatatgaattaggtctttatggtaaacggtaagtttgataaagataactttattcatattggtccttatcatatataatctctattatatacaacacctttacatagatgtcatgctatatcattaatccgaatcgagattacttgtaccaaataacagacattagtgaactgcactagcaactattaattaaagattcctaaagtttaatatgttactgactgtttaa

SEQ ID NO: 24089 - DNA, 3432 bp, Cannabis sativa
tctctctctctctcttaatctgtcccgatcttctctctctctctctctctcttgtctcacacggccatactattcattgtgggtgtgagattaaaactctaatctcattacagtgtctcatgagttagtacacactgtaatacctaaatttgttcatcctttaagatctaatagcccactctattcttgagtgttaggactggcttggaagaccaaggtgtggattcttcaaagataccctaataagcatcaagaaataattgaatttctttcaatattttagatttaatctatatacattatgttgagattcttgggcttatggttcatattagataaaaaattattttatcaaaattctgcttccgcttttataactaatatggactataaaaactagcaattagtaccagagcaatcttcatgatgatatagattaaatattctgttgggtgattatgtatttataaatattgatatattttgaattgatagaattaaattttgtgcatgaatgtgaattgctaattatatggtaaatttgggttaggaatttttacagttttactagaaaaattgtataccatatttgttgttatacttatatttcgagcagtaatataaagctaacacgtgtatcgaatctagaaaatgaaccaaccccaaatttatgcattattaaatacacttaaataactcaccttggaaaatacagttaatagaaatactcgaactagctgtcatatagacaatagagagatgtgagtaataactattgaccgatgagactagtgagacaaacaggtccatctcgagataaacaaaatatagaacaaaactatttggaacagttagataatgagtgtgtaactcattgatccacatactcgtatgttcaagtataatttcaatatttattcacctcactcttgacgtgtcaaaataattatctcgcttatacttcacttaacaattaaagaaagctgcgagatgcatcatgagtcaacacttaaacattttttctacaaagatgtttaagaaagatatcactccaagggagaggataattaagcatagtcagcatatttgcttatagataaagagagcgattaagtagttatttataattatcccatgtgcacaaaaatgaaatgtggagaacgttcacgtttcgtgagcaattatgaatgatcatatacttacctaagtaggggtcatgtgtcaaatctcttctgaaggggaaggccaatgcgagaagagccaaaagagactggatcgagtacagatccaagtggatcaagatcaaggacccacgggcaaagtagatccacttgaactcatgggcgtgatagacaaacgtaagatgaaggaggatcacgatgtttattatcgagatgaccaggagagttttagcaactatcaaagctaccaatccgaaagctattcgagaataaggttagtaagtaattatgaccaaaggcgtcgcgaccctgaccttcttgagcagttaaatcacagacaacctgacctgcgtgagcatttgaattgtaatgctctaaatctttacaataattaaatcaaaatacaagcaggcaacaaccaataaagcaacaacccatggatccaatctagttgcgagtaatacaattggaggataaattcaggcgatactaggatggagagtatggaaaatttttaggatacgactcagacgaggaaatagaaccattccatccagatatcttgacttctcaatttcctcaaggatttaaaaacccacatgtcacacaatatgatatgacaactgatcatgtggctcgcctaaacaatttcaataccataatgcaagcaactaatgattcaaatactcgcggtgcattttattctcaacttctctaatgggagcaacgagtagttgattcgacaaattcaccaaccattccataacttcctgggaacaactatctaagtactttaataaagaaatgaaagaaaataaaagtaaaacaaccttaaaataataataaaataataacaaaataaatcagtaatagaaaagtgtaagttggagtaagatggtggagaaagtacgattagaagatgggagccaacgctttgagaccaaagagaccaaagaacattaacttagtgggagtttctgaaatatttctacaagaagtttatcacagagcaagctctccatctcacacacacacacacacataaacacactcttatctttcccaattcttcttcttcttcctcctcattcacatactgttctttttttggttacttactacaaaaggagagggttaacttttatttgcgtaatgctgtagacttgagaaaaaataaaaaaaaagacacggaaaaagaagatgaacaggggagagaaagctcaaatacaataaaaaataaataataaaagttgttataccttacaaataaaaaaaaaaacgtgtaggaagaggtatattaagctttttttttttaaaaaaatatctgttacaaaagtgataataccctcacatgaaaactttttcactattaaatacaataaaaatcttcatgatcactttttttttaaaaaaaaaaaaatctatcactgatgtgacaactaattttaccatcagcttttattaattttttttttttaaaaaaaacacacattttgaggtgacaaatagcatataaggggaaaaaattacactgattctagtatatagtatgaaaattacacagtaaaaaaatatgcgcctaacagtaaaacttttttataaaagaaacagtaccccatataaatagaaaaaattacattgtatacctactttacttcacttattttaattctttacctttgtttctatattattttagatatacccactttatagatgatgcccccatcatactccttaaactaatataaattatgtgctagatttaagtagagggtaaaggtatattgagcaacccattcacaaaagtagatatatcttgataaaatataatatgagtatatttttaattaatgaatataaaaaagaagtattcctccacttatctcatataaataccgtaaaggaatgtggttaagatcatgttcatcggagactcgggcaatggaaaatccaacattctttcgaggtataccagaaacgagttttgttggaatataaatctatcatcagctttgagtttgctactagaactctccaagtagaaggaaacacgtttaaggcacaaatatgggatacaataggtcttcttgcctgtacgacttagttggacagggatagcgtggggtggactagtcggaggaggaggttgtgcaggattggctatcggatggacacttattgagggtgacatttatatactactttttaattattatttaattttattttatttgttgaagaggtggtt

SEQ ID NO: 24090 - DNA, 3461 bp, Cannabis sativa
ttcttttataaatgaacatatttttttacaaggtaatcttctatgtatattttttactttgacaagttaataattaaaacatagttcgtgtttagttttgctaatcacagtagaattataataattgaccatgatttaaatattatgttaaatttgaaacaaaaaataaacaaatactatatttgttattgtgctccaatatacaatagcattttatgttgcaaattatgacaaaaaaatatccataatcaataaattaaatatttaaataataattaatgataacattataattaaaaatatatattaaagtttatggttagtgatcaatgacaaagctgcaattaaaaaaattacatttgttgtgtgcttaatttgacacaatttttagcatgagtcaagtttagcacaagatttagtatacaattagatgcgtttttaaatatttgggagcctttctatttttttttttttttaaaaaaatgtgatcttgatcacattaagacattccggagaagatttcagcaatcagtgtcggaacttcttcaaaccagcataactcattgtctagcctaagggcatgtttagctaaaccatgggccacaatgttatctttgcgggacacatgagacaaaactgccataaaaaatttagacaataaagctatgacatcctctaacagcacacccatctcatttgtgagcaccttcctgttattgatagccattactatggagagagaatcagatttaaccgcttctaggggaatcccacacgaatgagctcaatttaatccagtcagcagggcaaaagttccagcttgaaaaacagtaatgctaccagaaaataaccaaaacaaaacccctacaacaccaaactaaaattacaataaaacaataaaagaaacacaataaatcaaaacaatccatactaaccaaagtctaacactttggttattaactgacaaaattattataattcgtatacaaactcagcaaggagacaaaacttaacccaatctcctctactcatattcctttagttagtactagtcattagtgtggagtaattaaattttcaaaatccttaaacttttagaaaatactattgttcactctatggaaacaataacattaaaaattaatctacaatactaacctcgtaatggtttgcttaacgcaactattgttgtatggtttgctgacataataatgtcccccgcatcaaatttcttagaatcctttaagacagttgcatccatcaacaaagtggatccaataattgtgaaaggagccttttcaaatttcaatgagggagaaaataacttttaagacaaaagtctaaactttggtcaagcctattgtttgttcatgaatgttcttcttcttctataattattttgtaatcttgatgtaataatttatttgtattttatgtatatgattgtaattctccatattcttttttctaatgagaaaattttcaaaaaaataaaataaaatacaccaaacatcataatgcaatttaggaagtgactaaaagttacgtcaataaaaagaaaagttttaagttttctctctttagacctattacattgttgttaaggtttgaagcttgctctaaccagagctcactagccctgttatgtgtatgtgtgtggctttaggcggggtggttcctttttctcctttttttttcggcctcttggatcttgtctttttttttagtctgttgtcttgctagtgatttcgtgttctgctgattcttcagtaagcagtgacgatctacgtagtcattatctattttttgttaaaaattttatatatcaatggaagataaagtaaaaaattacaactctattataaaaataatacacggtttaaaagattaattaaacagatattataacaacacatactacattatatatataagaaaggtaaaagaaaaggcttgagggtaggcgagacagacgtgtgcctcatgcccccaaacgctcaaggcctcaaaattgtaaaaaaaaatctttagtatatagaagaaatattaaataattaaatattatgataaatattgtttggtgtagtggtaaaattttttatttaagtagagctcaagagatcaattaccaacatctacacttttatttttctaaaaagtatttaatgtgtagttatgaacgattgaaccttagagaaagtcttaccattacactagaattacaaatttgttaataatctaaactatatgtaggagtccaaaaatttaattttgtcttaagtcctatatactttaagatcgggtactagaggttcatagagattaaatggattacaaaattaaaggatacttgagtgataagggtttagtgttcaatatgggttctttgtggtgttgttgggggcttctcgatcaccattatggattaatgtatgtctcatcgatgatatctagtcattttggcaagaacatcttggtttttctatttgatcgtcaaataagggagatttttaaatctttattagctctatgttatgtattttaaccttttgtgattgagaattataagatgattagttttattataagctgatagtcataagtaaacatttagtttagattgtaaaactaatatacttcacactagtttagtgtctaatcttggtgacttagttgagttgatattctaattttcttttattttattataaataacttggtaaatacatttaatagacctatttgtgttgattttaagttatatcttcctataatgtataacaatgatatgataacattaactaaaattatattagatggttaattattacaatttttttaaagtaaattaatcatcagatatcaatttaagtttaattttctgtatttattcttgaaaaattgatggaaaaaggaaaaaaaaaaaagaagaagaaaaattgttaaaacaaatttgagggatgagtctggtggggacatgactggaataacatttgtatgtttatatatagagctccagccatcgtgaatatttcctttccctgagacgcttctctcctattttgcctcacgcgcctctcccttctcttcatttctcccgagggactttttttgtttttgtttcttcgttcaaaccctaacctcaaacttttactggaaaatctctaaattttatcgggaaatcgccgggaaaatgcagcagcagaggctgaagcagcaacagcaacaagctctgatgcaacaggctcttctccagcaacattctatttaccacccgggacttttagctgcccctcaggttcgagctatttcgtttcctttttataattttttttttttgttttcgacttttggtttgattgcgattccttttttgaatgctctgtcttaggttccgttttctagagttgatcttcgattctgattgtagttttaggggttggattgtgaattctagggtt

SEQ ID NO: 24091 - DNA, 3686 bp, Cannabis sativa
  modified_base (3533)..(3538): a, c, t, g, unknown or other
tgtggactgtataaatgtttaatgagtcggcccatagtatttttgtaatttttttttttccttttttgtatttttctgtttttttccccaataaaattatatcatgggtataatgtgtccacgtagatttatacatagatagttcaacatggcagttaacacataaaatgtagagatatttgcttcaggaaccgttcttttcattttaattaagaatttgacattgttttaattaatacagttttataccgttccacgtataccgtataaattgttttgctatatattcataacaccacctctctctcttctcaatcgccaatccttcaagtccccaacgtcggacaccctctttcgcctcctctgtccgacatccaagaccagagcactaatcggacccacacccatccctcctcctccgacgaacgagttatactcatcaccttcgaatccacttcgcccaggtcaaaattcaatcacttgaataataataattaataacaagcagagtaatagctatggccaaccatggagaaaaagcttgttgtaagcagcttattgttggagaaggtggttatggcggaggagaaagagaatgaggagaatgataggtttaatgtttttttttttttaatttttttttatttttatgttttgttgataaataaataaataatatttaaatttaaataaaagttaatgtatcaaaaagtattaaaaaatatgttttttttattattattgttagacagtataagattaaataaaaataaatttatttttataaattaataaaaaaattgtaaataaattgaatagtaaacttcatatgagttacattaaaacaaaaagtattaaggtttttttttttttgttttttaaaggaaattcaaagtatcttaaataataaaataacataatataggctaaaagtaaaaacaaaaaagttacatttaatattagtcattcttttttagagacagaaaaatatatgtttctcacatattaaaatgattattttattatatatatataaaattttgaaataaaatttttaatggaaaagtaactaattaatatcttattcacaacaaaagtaactaaatggttattttttttaaagtctcaaaaagggaaaatttctagaaacgagattttttttagtttttttatttttccattttcagtaattattttgaatttcgatatgtatactgacgtggcacaacagtatttgtgcaaataatttttttaaagatatttttgtaaataaaattaattttaaatatattattgaaaaactcccctaaaatgtatggaaactctatattgctaacgatttcttgatgttttattgttaaaatttaagttttagagttaagtacaaataacgtgaaaacatttagaatgatgctgcaattaacttatttttggctttcaatttattatgtctttattatacaattctttaagtaataatgagtgatgattttggtagggaggggacgctcatacaggctcatcgtcttcagtgctagtgaagttaatcatacacagaaaaggtactagtctgcggcgcaaacaatcattcaccagatattttgttaataaaactaattcagatcacacattaaaactacatgggggttttatattctgccaccgaccaattatctgtcattaaatcctcacccatccccaatttctttttcaaatatcaaaattcaaaatttggtctcaaaatttcaaccaactgtttcccgcgcgaacactctccactcgacctagccaccgccatgattgaaaaaagacggggctatgtttaccacgtggaaaccacgtgggtctattttaaccgtcctaaacgttacacgtcagccacgaccgctcatacttagctgtaacccatcatacttactgacccgacccgatccggctgtaacggctacgctccccgccctctcgagttcgagtctttgaaccgtattcttacatttaaattctttattatatatatatttatatatttacactcggtgagcgttgttcttcaaacttcggtagctcaagcttttcatatatatatatatatatatattccttgaacggatcggaccgttgaaaatggaggagtacgagagatctgatacgatagagggagaagattgtacgacgccgaagcggagggagtgccgtattccggagactttcgtatgtccaccgccgccgaagaagaaatcgatgagtggaaccaaacgacaaccgcctaagaacgggtattttcatccaccggatctcgattctcttttcgtaattccttctagaggtcaagcctgtgcttagttaatagtagttagcctcctttattgaatagaatttgtttcaatttcagtttttagatttttgttttttgttggtgaatgtaaatatatgaacttctagtgtcgtttagagtgttcaataattaattcacccaataactgttaaaattatataattctttgtataattttatcgtttggtgtatctgcattttgaagctaaataataagtgtaaaacttgaattttcttcgcgtcatttcatcgaacacttgtgttggtttcttagcaagcaaagaaaatgctatgtaaccactcagaattgtggcttagttttcacattttttaaaaaaaatatatatgaattaatataaaatttgtttcttcttgaagtaagatccaatgggttgtgttgtggaatgtgaattatatagtacatatatataaaggtgtggtggttgtatgagactataggaaaaggtgacaaagtgcataaagaaagaaaatgactaaatgcagaaaaggggtttagttttggtatgcattcccaagcaacatttgagcttgttttgactcccaactataactggtttcggaatttagctcaaaagaatgacgtttgagcttaactccaacactcacatttctttttcacctttagtatcatacaaagcaaaatatggatttgctctgtcatatcttataggctaggcttataggggctttaatatttgtcttcttttcacatgcctcttttgtttatttgatgccatgtgcctttcttctaaccaaagccaaagaccacactttgttctaactacttatctataccattcctacctttcgtgattaagaaaaccattataataataaataattcatgtcattaagatgaattgacttattataataaacaatttttaatcgagctttacctttcatgtttttttgttttgaaagatacacaattctaattattttgtgttttgaacactaatctttcggtggttctattggggagtaaatttatatatatattaaaaataaaatagtttattattaaaaatataaagtgtgcgtatgtaacataattcttgatttatgaaaaatttatgggtgattttttatttatattaaaagtaaaataatttattattaaaaataaaatggtttatgagaaattcatgggtttatttatatataataaaataannnnnnaataaatcccattaaatccaaaatatatatagggttttagatttttttttaattaccgtatttctaaccctatttaattatttatgctttttttataaaccctatttgattaaagttaacattataagattaattcaaattgttgttc

SEQ ID NO: 24092 - DNA, 4262 bp, Cannabis sativa
atgactttcaaatcgttagattaggaacctatccctatcaactaagtattcattgcttaaataaatgacttcttttatagcaaattatggactttagtcacaaaaattggagtgttatcttcacccatgatgctactaaattttaggaataggaaggtataatgaagtcatctctaatagcacaataaaagtaacacatgtacatgtagcatcactatgaaggtacaacgataaacaatagttctgagtcacttttctcaattgcaaaagtagtttttgagtcactctctacaattgtaaggtacgtaacaataatttatttaatattatacattaaatacaattttctactgttatgcaaagtatctgtcttacactaactttcagcgaatcttgtcatttgttgttcttttattacagagtggattaaaattaatcataatatgagtgaaggtcggatagtgaaatttatgtgcacagttgtggctacggaccttttggaagcgttgtcttatataggtggctatcaagcggttctaattttctaatcgccttagaggtgaagttgcaacttgtctttttgctcttgaaatggcagcccaagagaaaaacactttcgtgattgtagagagtagctcaaattctactttcaagcctttaacggtcgtactcaatgtaaagaaactttctcatgtgattttaagctgaaatttctatcccatgagtagaactagtaattttattaccgagttgataaaagttaatttgggtatacaatacccaacacataattgagtccatttcccaacaaccttttacttcaaataagcaaacctggaacatccacatgcttgaaaagagatcaagaatgcaaatgactataagtaagcctaagatagatctcattaggggccactcataatataacatgtcttgggtcattttcacattggcttttagaggtgaggtctcttgttcaagatatttagaatatgaaaaaaacaaacacattattgaacaaagaaacatcaagttgggacaataaaaccacaaagtcatgtgattaataaaagatgtgtttagttcagggcttcaggcccagggtaataaaatagaatggaaaataatcaaaatttcattccattcctttgtagaatgactttcctctatatcagtaaattcaaaatttcatttcatttttactttttagatgtacattaaattttattccattttattcttattatcgtgttttagtccattccaacacctagttagagccacaaacaactccttagtaccacaaaaattcaccagaacagagttcacataccacaatctaatagaatcctatatgtatatataaatagtatcaccatcaactcccttctccaccaataaattttccccatatgattctcagagtcttatatctgaatctaattcctcaaaattgcaaacttactcctaagctcaagcatattatttatagtccttgggaaaggctagagtaaaacttttaagtaaataaattctcttattatagaaaaacctacaacaaggtgataaagtcaaatacaaaaatgaaaatcaaaggccagtcaaaagctttataattaagaaaaaccatcttgagtaaaatgacagctaaatttccaaaatgagacaaaagcacttgaggaattgcatatataaattttacccaaacaatattataaacatacatctttaaatgcacccaaacaatcactagacatgtgctgaagatgttttacttatccatccatgtgttaaatttcaatggtggtcaagcctagtatacacagcaaaataacacagatttcacaccacaaactctgaagaaaccattttcaaataaatagaaaaccaagtgacacaaactttagttgctaaaacaaaatcacttcataaacagctcaataatattgattgtatgttaattattgattagctcagttattagccaacagttttgacttcttttgtcttgggttacaagtaagtagccaacaatagactgctgttcaaacaacagtagggaaaactagaagcaggacaaaattattccaaaacagcaagaaagtattgaattgctaattgtgatcgaattaaattaaaaagaaaaagaatcgatattatccagaatcgatccagtaaaagacaactcatcagcataaagtcttagtggccaaaaaaatcagccccttatcatatgccgaatggaaaatttaacaaaagaacaattcaaatacaacaagtatcatcagtaaacatcgaaaattcaacaactacaaaagaagagcataagatctctgcaagaggccatagatatatatacaggtgaagcataccagatgcaattgagttctcactaaagataccaacaaagtaaatctacctgatggtgacaaacttgttggtaccatgccttgcccaataagacctcaaatcaattgggttagcaaaattataaccttcagctgcaagtttctccaaaaccttcttgaaagcaccttgactcattttcctaccagctatcctagcaccgcgccgtttggtactcattggcaaaggataaacagacacatttgttgtacaacaagcagattgccagccgccgcagccccatcgataacattgctgtggagttccagtgcatgagcacactggaattgggattccagaaatgtccatatcaatcccattgatgacaacatccatactcttcttcgcaggcttaacacgaacaagagcagcattgttattctccttcggtttccttggcttcttcactttcggggttttaggagtacccccactctgtcttttctttgaggggccactctccttattaacaacaggctcttcaattctacctaccaccgccctctcatccctcggtgcagcctcaggtggctgcaacatctgcatcgaatgagcaccagatgtttccggaagaacaccatagttggtatttggaggcaacatgttcaaaaatttgtctctatgattaacccaactatccctcccatagttcattgggacaggagcatcagatacaacacaatccctgggatgattggtatgaaaggtaccattggagttaaccataactgtagttggatcacgcccaggtagaaatggtttggtatcacgctggtctgacatgctagacatgagctgaaggccaagatgacctttaaaagacgcttcatagtaaccccagttacgcaacgaatcatcatccattagagagctaaaaataaaaaccagcagacaaaatggtgaaaaaagctgtacttgtcaggttttgaattgactatttaataaaataatttgaacaacacaaatgaaaatggcgcattgtacaacgtaacctcccttcgaatccatgaaaatgagacccaaaaacatcaataataagaaacaaaacaaatcacagaccaaactacggatctagcttgaccccagagaaaatgaaagcaaaaattgaaactttttcaaacaacatactccttaaattcgaaattactttaaaaattctacaaaatccctaataaaaatcaaacttgatgagaccagatatggaaactcctccatccccaaacgacgaagtggaaatcacagcaaacaatttcccacatttttctcggcaaaatcaattaaacctaaacccagatctacatttcctaaacctagtaatttggcgaattagggcttcaaaatcccagattagatctgaagatctcaaatcccagatctgagacgaaaacaagagaaaaaagaagagaaatttataacaaagttaaactaaaatctcaaacttattatatatagaaataggaaaatgcaaatgacagttttagcagtagtacaaaggacccatatattcaaaactatatagaaagagaaagaagaagagagatagagaaagatgagatatagagagagagaaagagaaggatgagagagaaaacttacttgggtgggtgtaaacggctctttagggttttgcccttctggagagagaggagagagaaacctgagagagaaagagagaatagatagagagagagagaagagagaggagagaggagagagaaaagccctacaattgtgagagagaaagaaaaagaaagagagagctacaaatgggtatctatcaaaaatgttattgtcactttaaaataagaaaataataaaaaggaaaattggggagagagaaacaaagataaatgctt

SEQ ID NO: 24093 - DNA, 3017 bp, Cannabis sativa
  modified_base (62)..(93): a, c, t, g, unknown or other
  modified_base (204)..(217): a, c, t, g, unknown or other
  modified_base (389)..(393): a, c, t, g, unknown or other
aggtttcttaaactttatatgtatttatttcattgttttagaaatttatattaggatgttannnnnnnnnnnnnnnnnnnnnnnnnnnnnnnnggtaaaataattccaacagtaaagacattataatcttacagttgtatctttctaagccaatatcactgattgatcttagatcaaaagttcttaatcctgatatggttaggnnnnnnnnnnnnnntgttatttatgttcttagagttgttaattaaagttgttaacacagattttcgttaattaaatttgagcctcacgattataattccacacaaaaaaataaaagctataaaacaataatatatgaacacagggtttttttacgtgattttgtagttaaaattctgcatagtccnnnnntcaatcttattcaaatttctgattgtgttttttcttagagcctctcttgtatatgattttgttgtcccctctcttgatcttatctgccactatttataattacatagtgaacagtaaattataaaagttgattttcatcgttacatcaattatcccctcaaatcatgggacttgattacagatcacgccaagtaaatgaggtttttaaatataatttacacaactgtaagtatcccgcttttattgggccgagatgaatgcacatttaaggatatatggtaagccttatctcgtggggacgcctcgctagaaacagagccgagttaactttgatggcgagcagttgcttgtcatctgacttttctgagattaatattattttaactctaacaactatattttttggtcttgcatgcatgccatcttatagcgagatagatgcctcgctatctgtcatcttgattcaccatactgtttatacttagtttgtataccaggcaatatacgctaagtgtttttaccgttatcgtttctctttcacgcagcgaggttgaaacctcgtcatgcacacttgtcctctcatggtttctcgtcgatacataagttagcagttcgtacatttttgtctcgcagaagaccattaagccaaccgagttataaacattctctgcaaattatgttactaacgagttgttccatgccaagtgtacttatgattgcgtgtttgagccctttgttctttccagctcgacatgtgtcttcctctgatgtgctcaccgagttttgagtataccaattgccccttgaaaagttattttttaataaaaagagctttttaataattacaaagggtatttccgtcatgttcctcttttttgaaaagacgcataccctctgatattggcggttgtgcagtttcgaggtacatcagaattaaatgaccattttttccaattccgctttgaatcatgtctgttggatcaaatctttctctgatttgacgaagccactatcatgggtataaagaaagaaaaaatgaaccacctttgcaagtacagcacagtggagctagtcctaccttgatgatctaattttgtcttagcaaattcacaaactaaaagggtggattcgtcatcccctagaaagctatccgagggaagaaaccagcttgaagttgtatacgaggagtgatccaggggaattggcatgggaggaccagagcccatctgggaccgacccaaaaagtgacttaagttcaaaaaataaaagtttttggcattatcacccagcgggaatggggcattcgaaaactatacaatctgttatcaaattccactggccttagcacagtataatcctggacagaagggacgaagtgaatgttcaaaggagacttacaggctctagaagtactagcaccgggggccccaaagttaggaaccggaaatggaaacttgagccaaattgagggtttctcttttcctgccttctcccggaagatcctccccgaagcggcttgcacctgagcaaatgctagctcctgttcccttttgaatctatacttattgtatttttcctctgcagacgaaataatgtcctcccagagcgccttctcactcctaggatttcgagcgttagggcaaagaaccttggacaaattaaattcatccatagactggctctctaggatcaacttggccctttggcagttggccgtagtgaccaggtcccccacgttcaactctttctttttgtaacaagcaaacacttgagcgtggtttagaaagagttgagtaggagcagtgcggtgcatgagaggaaccttaacccagtctgtcagcaagtttgggccctcgaaggctttgaagtcggaagaaaagaaaaatcgtggcagtactccttcacgttcttctgaaaattgaaggatactggaccttcattggccggatgggcttggagtttataaaaaccatctttaaacttgtccccctttttggggactgacagaagttcataaaagtacaaaatctcagtcggactgggcagagcccagttcctggcaacataaaaaatatacaagcctaataacaggcggtaagcttgcggaataagctggtagggtgaaaggctgacaaagaccaaaaaatcgataaagtaatcttgaagcggaagcatggccctagacatcaaatgggtctggctccacgtcccgaagccgttgtaattataatttggcatctcgtcatccctagggagacggtgatagacccccgagctggagggtttgttcctagagatagtgatgatcttttccaactggtgggctcaagttattgtcgaatggagctcatcggcttcctagccattggagcaacaggcaaactttttgtagaccaccgggcccttcatgacttcatctaaggtggccaacttttttggccccttcttcgaagattttgctccagtagtatcagggtttaacatggtatggatatggtgaaggttgataatttcttggtcaaatccaaagaaaccgtacgtgtgaaggtcacagagaacttcactcatctgaaacagaaaatctagcagttatgtaacgccctaatgctaaggcacgctacagt

SEQ ID NO: 24094 - DNA, 1385 bp, Cannabis sativa
gtgcaagtgttcataacaacagaccttgaactaccagttaccaaaatgtcctcccgtggatgtagcttgttcacagggctaatagttgtaatatttggatcaataacctcagcaactagttggcctgtgctaatgtcaatgaaatcaatgggatgcagggcagcaccattatagttttcgcttatgtaacgacctataacaacaagggactcagatgggtcctgcaacgtaaaccattttagattctccaaataataaaagaaaagcataagttaatgaaagataaatactacaagaaaatatggatcacctttggatcccactctgctcgaaaaggagtcaagtgacgattaaaatcatgactgtgtacaatctctcggcttggggaatctagattgccaaatatagagtcccatacacgaagacgattatcctgcgaagtggtaacaattttgcttcctgatagtggagagaaatatgcagaattaacaacacgtttgtgtgctagctcatataatgaagaacgagcttcaatacgacgcatgtcccatattcgggcctgaggtgaaaacaaatgtcaatttcaagagttgtatgaccatagtggtacagacaaaatgtgtaaataaacatcacgtatttcaaattgtacaaaggaagtacttcactaagcattccattatcgacaataatgttgcataaacataaatttgtacattttaatttatacatacaaaaatcacggataaaggtgttggccacacttagatagaaggaaggatagagagctcaataatcattacagattcacatacaaataagcattacaaagcttacatagtgatcatttccacaactcaagagaagatctggctgaacaggattacaatggagtccaacaactttgctccctctcttatggatcaagattgcctcaccagttttagtgttggagcgaatatccaccctaagtatttaataaagtacatatatataaattgtagcggattagaactgcaaataaatatctcacatgaaaacgtaaacactatattcaaagggaattcaagattgacacacttaagctcattatctcttccaatgaaaagagttaaaagacctaaatcaagaactcgatggatataaatgatcgcatgccaagccacactgaggtgtgcaattaaaacgagctggcccgaaaatgattagacattatctgatcaatttatgtaagtgaataatgtagagtgacgaaattgagcaaagaaagacagcaacaattgcttaaacaagttgttgacaatttgctcgagtgtcctcccgatcagttaataaaacttcgtaccaaaaagaaaagaaaaatgaatacttacgagtagagataa

SEQ ID NO: 24095 - DNA, 1480 bp, Cannabis sativa
tcagcttgtgttattcttccttgaaaccttcaggcttggtggttagggagctgtctagaattaggttgtccagccttgtgtaggttgcaagaagtccgaccttgttcatggaggctgcaggctactcgaagcttggtgcactatttggccagccaactttatttgtaggttatttggcacatgctgcaatcattgactggccagttagggtctggccatgttttgaattattttttgtgatcttgacatcttgatggatgaggaaccatacagcactaccttgtccggttagtgatgagttgttctccacgtgtcttttgtatcttgccacgtgaaagtgctatgttaggtggacaaaaattgggataacaaactacaatataactaataaaatgatgcggccacaacaatatggaacacaatgtttcattaaagggaatgcataggaaatggagcaaagctcaggaagcttagagaacaaaacagagcttggaaaattaaagaatagtttgcagagtttgaagagccaaagtagagagaaaagcgcgcacgaggacatgaagagaacaagtcaatgtagactaatccgaacaagaaaaagggaaaagatttaatgatcattcccttctataaatagaagaccccattattaaaaaaaattataccaattttcgacaacattaaactagctgaaattttgctagaataaatttttaaattattcttagctcgaatagaggaaagaggaggaaaataataataagcaagagaaattgtgtaaactagagaatattgtattcagttaaatcaattttagtataaataattcaaagtcatattataaaattattgttgaactaattttccaaacataagtattaagcatcttaacttaaaggtctaaaataacaatacaacatttatatttgtgtatgtatatcttattaagtgttgaagaggttgaaccatattggttagatatataatgacaatgacattaaataataataataataatatagtagtagtagttcctaactaaacaagccactagtgctcagatgttccatctccatacatacttctcaaacttctcatctaatatcgtgtaagcatatgagtaaaacaaggataaagttttatccttttttctttcaattatataaataaatattatgtaaataaatatatagagaggagatttcaatgattacattaaatatataatcataataattacatttatatttaatcattagattattatttgacggttatgattaatgtaaaaatttacaaaaaataattaataaattacatgtaacttgatactaacctgatttgatttatttttttaaaataaaaaattatattaatttttaaaaaagttttattaaatattttaattgaaaaaaactaatttatttaagtctaaaaatagaacatttacctgttagtgacctattatagtaggttataa

SEQ ID NO: 24096 - DNA, 2833 bp, Cannabis sativa
  modified_base (1985)..(1996): a, c, t, g, unknown or other
ttggcagatcaaaaaggaaacaacaagagtaaggttcatgcaaaaagcccccgatgagagacttgaaagagatggcaaactggtagcctcactcataccaacatatttcacggatgtccatgctaaaacctacatccactaatgatacagatatagagctcaaattaacaaagaaaaaccatttttccccaataagtatagagtgccacttgagtatgaacgggtcgtattctagccaaaagaaaggaaaagaacgaataagccagaaattcatataaagtctccattccaatgaagcaccattcacatcacagaccaaaacagcgtaaaaaaggtcccatgaacacgagtccactaaaaatagttaaaaccaaaaacccctcatttttacacgataacttgaatcccgacaaacgaatacagattcagttcagcaaaagaatcttgaaataaaaaaaacaagcagaaccctagaaaaatatattcaataataagggagttcgcagaagaaaactaaaggaagagagaacttacaatacaagagattatataatcaaagagagtccgcaatggtcaaatacagagaacaggaaccctagagtgggagcgaataaagaagagtagcagcaatgagagaattccgggagttggagataaccataggtgtgagtgagagtcggagagagaggggtctgccgtagatttgtgggaatgtgatgtaattggagattttagtttgggggttttgcctcaattcattcactcaattcttctctagttctctctctctgtcttaggctctttagtttagtttagtaacttaataacctcaaatattcaaaattcggtcacttgtactacacaagtttccctttttcttttggggagggggaatttgcatttttatgcttgacgggcgatcacacaacaaaacaatgctttaaatttaccatattacagattaagaaactaattgaccgtttacaaaattgtaattagaatctatataatcaatgagagaaattaatcaatttaaaataaaaaataatcgggaacaatactaaattgtaattggaatcagaataatcaatgagagaaattaatcaatttaaaataaaaaataatcggaaacaatattttattatgctgtttactagacttacaggaaagaaaaccaaattcatgttattttatttacataactaagaaaggtattcggaatggtttaatttgataaaattacaattattataatatgtaattattttctgtgaatagatttttaaagggtatatttgtctttttattattaattaataaattaaaattaaaataaattaagttaaaaaaggaaaaagtattgtatataaaaatggtagaagaacattttcttttgttttctctttaatttgtgtggtcccactacttttttcttttccaaaatttagtaaataattgtatgagaatcaataccataccattcattctcatttcctttaattaaacatgtcattagcctcttattcaacttttgtaattttttatttatatttattacgtgatataatttaaaatatataactaattataatttagaggttattcttattataactggcctaaattgggacttaatttttttataataaattagaggttattcttgaatggagtatttttaaatagaggttctactgtataatattttgatgtgtgttttacaaacaaaataatagtattaaaatattagacatataattttttatttttaaaatatatagaaagataacgggactaatattaaaaattatgaaacttaaaaagaaattacatgtgattttctaataaaataaatgagaaaaataaaagataagttgaggaatacctctttttttgtatctattaatcaaaaatacattcatataatattggaaaattttatttacacctcaaaaatttttaaagacaccctattttaataattnnnnnnnnnnnnaaaatttatatctttaattatactaaatttttttcaacttttttctttcaattcatattcttaaaaaaatatacatatcaaacaaaaataaattatgttttaaatgttatgacaaaaaaattttaaaaaaaaattatatgaaattttctaagaaaaaaataaaaaaatatatatatgagttagaaaaaattatgaaaatggtttttctctcgtggttcttgctcttgcagctgagaagctggtgccatggctaaaacaaggtcaaaatctcagggaaaagctcaatcgattactaaagcaaacaggatgaaaggattgaagaatggatctcaagctgttcgaattgctagggaagaagcggttgctgaaattgaggcgttggagatgacggatgacgaggaagcgatgatggatgatcctgcgattcacgatctctctcaacagcatttatctcctaaatcgtctctggaaaggattcagaagcaggaggaggttcggaatgactttgtgcacttcttgcgagccaatgatcaatgtaacagtgatgtggcacaaggtaaatctccaattcccccaactctgcgatctaattctgttatgaggaaccttgaaaattcttttaggaattctggtgataacaacagtaaagtaagaatcacctttgaggatattgaagaagaagtctctttctggacaccatctattgtatgttatgtgttgggggctaatcctccattacatgtgcttgaaggttttgtcaatagaatatggaaagataaaattgataaggtgaaactattagcatatggagtctttatcatccgatttagctctata

SEQ ID NO: 24097 - DNA, 2104 bp, Cannabis sativa
actctttgggaaataatcccccgtaagcacatagatcccgtttgagtaaaccttttttatgttgtttttagcttttagatttgaaagcatattttagagtttgtgtaagaaaaaagcatggtcactcaattttttattttattgtgaagctataagtataagcaaaataaagaaaatgaatataataaaattaaatttcataacaacttttttagaaaaataaagaaataaaaactctggcatgctcttgtaaccatgagtccatcaagagaataggcttcaattcttttagatttgggttttgaggccatggactctcaaactaagtccaattcattatcgaattagggttagtccaaacttttttcgtaccaccatcttatcaataaatcaaacgcaaagtgaaacatcaatatttgaaactaattttttctgccaaaacaaaaccactcaaatcaaaattatacaccaaggaccatagtagttcaataattgtgatgacttgaatttctactacttagtaaattagtagctgattaataaccaaatccaagagccttttgaaattttgtaacaagcaagggttaggtacatcatatttgattgattcctaacactagagatggggtccaagagttacaaatattacaaaacaattaaattagaaaaccttgtggacaatttcccttcacttcttgagattttgacataagatgctagaaagtttcaataatttagtaggcacatgcaatttttccttcttgttcaatgatccctttgaaaacattgtctacctcatcaacctaatctattatgcttttcaacccttggcccctcaattgctaaatgacttggtaactaattactttttcattttatttttttgtgggttccatttttttgagttttgacttatttggctaggactcatatagtgatataaacatggacatgctaatttatgtttagattcattcacttgagatttatttatttatttttgcttcccttaaatcttattgttttgtttattggaaacccatttgacttgtgaactatactaacaaaagtagtcttttcctctcatttaaatcttcttcgattgaagtgaatagtgaaaagcaagactaaaattcatttcacgtccatttcattaggtaacttggaatataacttcaaaatcaagtcacttaatggcattggttttttcatatatcaatttgcagaaagaaaaaaaaaaagaaaagaaatgaattctctcattatacaatatcacttcacgtatggttagatatactacatcacaaagatttatttaagatttactatcactaagttctgtgcagttcatattaaatcttaaataaatcttacctcttccaacattttttcttatagtagatgatattaacaaatacatatatttgttaaaaaaaatttatattctttcttaacttttatcttatgtaaaattatagtcgtaaaaaaataaaatcaaaatacttgatttttttttttaaaaaaagaataaattgtattacaaaataaactctatttttatagattaataatagagacacacttaaatttaaattacaaattatccaggcataatggcatataatttatatataaaaagtgtcaatttaattgattattaattttataattttttttacacttttttaactttaaagaattttatatatattactcttttttttagtgtaaggaagttattgttgctcaaagaaatagtacaagtcttatcaccaatcttgtaacgccggtatttaaataattctaaactcaaaagataactttaatatattataactttatagttatatgggttgggatcccgagtttcaaaacatagtttaaaactatatttgtattttacaaaactacgttgagatttttttttatatatataaacatgtacaggcaactcaaaatgcatcttaaaatatttgaaagatcggaaccctccaggttgtacatgccgcgatatgtacaatcactgccgagctctatttcactgttcctccagcttcgctttgcctttacctacacaaggtagcaaactgatgagtcaacagac

SEQ ID NO: 24098 - DNA, 2760 bp, Cannabis sativa
  modified_base (2693)..(2702): a, c, t, g, unknown or other
ttagccccgattctctctctcagccccgatcgatctcagccacgatcgatctcctctctctcccaatatcgatcacctttctcactctctcgatctagagtttttcattttttttttttgcaatccttgctgttaatatttctgtgtatacatatccttatttggatatttttgtgttctttggatttagatatgagaaaaggtaatagttgtggggaaataaatttaggtttttatgagttttggagttgagatttatgtatatgtgtgtgtgtttgtttatttgttagatttggatttgtttaaattagtttgagttattgttttgttgttttttttatgatttggatttgaaaaatagattgtggtggtggtttcggtagtggtggtggtttgttttgttttgttttttttttttgtgtgatttggagtcgaaaataggcagtggtggtggttacggtaccagtaggtggtggtgattttagaagtggtaggtggtagtttcggtggctatggatggtggtggtggtgatagttgtgactgaaagaagaagaagaatgaaaatttaaaaaaaaaaaatgtatgaaaaatatgatattttagggaaaaaaaactatttgtttaatgattttttttaatttttttaagaaaatatatttttatgtggaccaataaaattgtgccacatgtacactgtgtttacatagataatccaacatgacacttacaactaaagttggatggaaactgaaagtattttagaaaatagtgtattcttggaagatcaaaaccttctttgcaatctctaacaatggcttctgattagtgtttccgctcatcttttatcatcttcttctttaatttagcaaatactatatagatttgtgatttagggttttctatattaaagcacttttagaatatatttagatttataatatttatatttcttgaatgttttatatattctaacataaattgctaacaatattgtgattttgaaggttttactgtcaaaaaataaattttaagaattaagtgcaagtaaaataaaaatataggggattttaccacaaaaagcctataacgcctataatgtgagtgctatcttgtataattgtatgaatattttaatttgagttggagtgaaacaagtaatctataaaatgttgttatcttatacgactaactaatatacattattactaattattatattaataatgttaaatatattaattagaaggacattatatacgatgaagtgacaagagccacttgaattgttagtgattggatggaatggtgagtctgtgaccctaattcagagttggtatctcgatctttttcaattatatggcaataagttaatttcataatgtatacaacttgtttgactattatattatatacatttgaagttcattcaaatagtcgatgtgttcatttatataatataacacgtctcagggtgtcactcactcactctagtggtcctttagcaaatatcacgtatttattactttacaataatagggaaaaagtagttactgggtaagtacaacatcctcctatgctatgctattttggtataactagtaaaggtaacctggtctctagtggtcattttaataattgacaaatgttttttctttgtttagtttataatttatacaataatttttacactaatttatcagttttagtacaataattttaataattcacactgatatcaaataaatatattttggttaaattattttatattttatattatttacaataataactaatttataatatgattacatttattatcaataaataatttatgattattttttaattcaaattagaaaaaaaaaagtgttagaattatatgccaatttaatatagattgaaaatccaatacaattacctttctatttggtatgaggagttcaaaatttttccctttacaaggaaagttgaaggggtaatatgattggttatgctttgtatttctagcaatattagttttatgtgtttggttgggtatggaaatttgttaatttataatgtgtatttgctaaattaataagtatttttgtcaaaagaatacatatttaatgtcttgttaaaatcatataaaatataaaaattgtctaaaatcaatatttattttgtaaaatattatttatttttatataattaattttattcgataaaaaaattaaaattattagtaatttttccccttaaatttttgacactatttaattttattctctaaaatatacggcttgttgaaaattgctcatgaattttcatatttataaaaatttagtcatgcaattaggtttcgtctcattattctgtttgaatgttgacctatctttataaattagtaattttgtcccctaaattctgacaactatcaaattgtatcccctcaaaataaaaatgagaaaaattgaatattttttttggtaaatcttttgaaattaatttaaatcttaaaaaaaaatattttgaatgtctaagaaaattaaaaaagaaattcaacattttaaaattaattaagctatttaaaaaggaaaatttgattttctatacttacatatacttaacattttttctctaaacacataacatttaatgtttgagggatatgacacattttagaatatccctaaaatacccccatttnnnnnnnnnnctcccctctctcttcttctctctttgttataaacagaaaataatttcaaaaaaaaaaa

SEQ ID NO: 24099 - DNA, 4225 bp, Cannabis sativa
  modified_base (3712)..(3712): a, c, t, g, unknown or other
attatatctgacttagttatgggatggcatgctatgtgggaatgggaatggtgttgtaacttgtaactgaatttgctgatggtcatcatggtggtcataattttcggatagcagaatgttataagaaaatagagatctttaagatttatgtgctatgtatcttgttgaggcatgcttgagctagatatgctttctagtttaatgatgaaggatgtaattggaggtttggagcataagttactgctagttttgttgcttcttctcggtaaacatttaaacgaagggaattaagttatttgcatgtaccttacatttggtatgttgacatttttctttgatcattaacttaccttttttctgtacccttataatttgtttgagattcttatagtaaggtatgctactatcattccaatgtaattattggcaaccttttcttaaagacctgtttattgtttatcacaagttgggagtataaggatgggcatatagtcttttggcaaattggtactactctacgtttacctaaaacaaatccgaaatattagaaagagcattgtaagaggctaagagcgggatataatttcatgctcttcattagaaattaaaaaaattcagtttcttctccatcatatgggaagttagcaggtgatgggtgtccttttgttgctcgattgtgtgcttcttcatgtgataaaaggtggagcactcaaaggttattcttaacaatgtatgaggtaactgcacgtgtattgtattactggtgccaatgtggtgggttgtattgatagtttttaatgctacattcttatgtatccatttgtttatgttttctcaaactttaatataacttcacagaaggaaaagtcggtctgtttcccctagacgccgtcgaagtcgttcattaactgctagacgtcgtcggagtcgttctcgcagtccaaggcatcataagcgaccaagaagtcagagttcatcaatatctccagttcataaatcctctagtccaagtcttgggtcaatagagcgcaagaatgcaagtgaaaaaatgaaaaaacaagaagaagagaagaaaaggtatttagtttactgattttttatttaatttatggggtagtttatgacctttttaatgattagacatgagtaacctatgcaataacattgctgtaaccttttggtaatgttttaaatcaattattgtttttttgcaaattattttgtgaagagtttttctcttggaatgttcctgttgaacacttgtgataactactttatcaagttgtgctggaggaatatgtatgggtaaattataatttcatgacatgaatcaagttgaaatttccctcactaattaaaaaagttaagccaggtactgtttcgatttaacaccatatacgtattggatctttgtccaaatagtaacagatcaatattattcacctttcctaaatttattgaagtgatcaaattttggttcattatcatagattatctttttgaagtatgctataatacaatattcaggctatgatgtttaatgcactaagttattagttaggagacaaaactgtgctgcaacactgatcagtcttttaaatatgagttaaaatttgcaagtttctcccgttctcctcttattttgttttcattaaatactgtatgtctgtatgtaccttggaatgtgtttttttttttttttcttttcaaataaattctataactggtagtagtgaattatgaattctaatatgctttctcaagtttctacttattgcttgatagagggcatatactgtactgttaccacttatatgttagtgattataatgcattacactgaccaaacaaaaaatagaactaatagaaacacatttttatgtattgctttgctttgtctttgtgatgttatcattttatagataattcataagaaatatctggaaagaaattgctgttatgcttcttctcggtatgatattaattgcaatcaggttgttctgacatttgtttttgcgtattggcatttgtttgctgatgtgtttgggtgaatattcaatgaaattaactttagggctgacattttggccatacatagtggaaatgagctcttttccgattctatgcataatctgcatatagttcaaaatacaagtatttcggtgattagccataaaactgcaacaggttgacatattttttccacaggcttttctgaaggaagatactgctatagttcaacttgttgtatttgatgatcaatatcatgcctcgtttatctacttgttcaccagttttgatattcatttgtttggatcaggattcagttagaggtatgccttaaaagcataagcatgtatttagtgactttgactccatgaaggtcagtttataatttgatagtcatggcgacatagaagaaaagaatgtagaaggaaaggaaagatcatatgctttgattgtgttagttctttctgttatctggactaagggcattaaaaaccaggagagtgcggaaattgttcactatcttagttaactttttgtacccctcctttactcaggcgacaacaagaagcagaactaaaattgctggaggaagaaactgcaaagagagttgaagaagcaattcgtagaaaagttgaagagaaattaaattctgaggagattagattagaaatacaaaggcgcttggaagaaggacgcaagaaacttctagatgacgttgcagttctattagagaaagaaaaggaagctgctcttctcgaagctagacagaaggaggtaaatatttgtgaactagtctgcttttcctcttcctggaatctgaactacactgtagtttaatgtttcactttaaaaatattcaaactccttcatatgtacattttgtggaatctgattgtcaatatgaaacttgctcatctgatttaatacggatagtgtttttgaaatttaatacggataagagaacagttctgtcttgcactactaaaagaattatgggtaagacggttttcatgcaagcatggattaaggtggtgtttgatttagtaatggaattgaaatgtaataacaatagtaatgggaattgtattataatgtttggtttatttctgaaatgaacattacaatcagaattttttttttgtttggtttggtgtgtgtggtaattaattgaagtgaaataaatgttcatatttctacaatggatttggttgagctcaggaacaagcacggaaagagaaggaagagctagaaaggatgcttgaagagaatcgaaggagggtagaagaagcgcaggagagggaagctttggaacagcagcggagggaggaggaacgatatcgggagctagaagagattcaaagacaaaaagaagaggcgatgcggaggaagaagcaagaggaggagcaagaacggttgaaccagataaaattgttgggtaaaaacaaatccaggccaaagttgtcatttgcatttggctccaaatgaaattctttagaataattcagtgcaaggttgattccctttttaagtatatccatgtttggacatgtttagatggtctgtatctattctaatattatttacccaacagttcaattctcaggttacgtttattatgttagctttatgtactatctagtatctacttgcaaagttactactaacatgctaacatgcaaagaagaatatatatatatatatntatatatatatttatataaagaaaaggtgttttgaaaagttaaacagaaaatggtttttggatttttttttttttttttttttcatatattataggtttaaaacaaaaaaatggtaattcttgtgaaaaaatgaaaagtaatatatggttaactataaatcattcaatgaagggtagaacagtaatttgaactcttcaattgtaaattatttatagaaggattgacgataagccagaaagtttttttttagtaagttcattgaatagatttatttttgaaattttatttcttgttcttgtgataaaaattttttggttactctatatgaatagttttcactatagactatagttctctggactttgttttttagtttcttattcttactatccattattttttcaaacttacaatggattttaatcactagtgtctttcaagtcatacatggtgagttccttgaaaccctcccacaatgtcaaggtaccatgactttttgactaagaacataa

SEQ ID NO: 24100 - DNA, 4752 bp, Cannabis sativa
  modified_base (3526)..(3530): a, c, t, g, unknown or other
taattataaaaaatttaaaaacttatttttttttaaaaaaaaaaatgttcggtttggtcggtttaaaccgaccaaaccgtggattaaaagggttggttttttagatttttataatggtcgttcggttttcggattagaaccataaaaaccaaaaactgaattttggattttttttgtgtaaaaaaccgaccgttgctcacccctactttgttctatgaaaagtacaataacgaatttattcaagctgctaaatcggaaagaatttatacgactaatccggtgtaacgtggcagtgatagagtatgccaccaaatctaattggttagcaaagattactttagatggaatggccactgaggcggctagagaggccatgtttatttgagggttgaaagaacacattgcttgaaatgtagttgttgctgcaaaacaactaggagttttctacacttatgctcagatagttgagctaacccttgctgttgagggtgcagaagatcaaattcaaaagagaaacaatgtgaggagagattcatggaaacaaacatctaatgttggttctggtaagggagctggccctaaagattgtaagaaaggcctaatgatctgtcaactacgggaccaaacaagagattccaaggtcaccaaggtttccgacaaggtgaaatgaaaattggcaaacctatccaaagtgcctgaggcgcaagagatgttatcagggcaaatattaagctaaagcctgcttccagtgtggcgatagtgggccatttgaaaagaaattatccacagttacaatgaccgaaatagaagaaagatgacactttgattcctgttcgggagtttgcgttgatataggtagaggcagatgtcggtccttccaccgtgacgagtcagctttttattggtggtaccttgttgactgttttaaattgatttcggagcaatacattcttatgtgttgagtatagcgattggaaatttgtataaacttagagctgttgtaccaagaggttctggtaccttactgcctactcgagaattggttatctccaacaagtgggttaggtcccttccgctgtttgttagggaaggggattatcagttgatttgattgaatctagagaattttgatgttatactagaaatggactggcttgcaaagtatgatgtaactatcgatggtaaaagggatgatggtaacttttgaaccagatggagaggacccattcgtgttagtgggtaaggtttaaggatcctgaattctattaatctcagcgtttaaggaaatagatttgttgtgagatggatgtgtcgatttcttagctagtgaggtagatgttatgaagaatgcctatgggaccgaaacatgttccagtggtctgaggatttctgaatgtttttccaggggagttactggagttactaccaaagtgggagattgactttaaaattaatatggtacctggggcaaagtctatatcttaaatttcgtatcagatggtacttgttaagttaaaaaaaagttgttgaaagttcaattacaaggaaagagcgtcttctctaagatcgatctttgatctggttattaccagttgaggattcgagatgaggcatatgagagacatctatggatggtgttgcaatacctctgggagcataagctttatgctaaatgtaagaaacacgagttgtggcttccccaagcaagtttcctagagcatgaggtggtagattcagtgaagaaaaccgaggttagaagtttcctgggatcagcggggtactgcagaagatatgttgaagggtttgctaagatttctacacccttaacataatgaacttgaaagaattgaaagtttgtttggattgacaagtgcgactgtaacttttaagaattgaagcaggagttaattactgcaccagtattaaccttatcaatcagtaataagaaatttgtgaattattgtgacatttttaaacaagggtagattgcattttgatgtagtttaaggaagttgttgcctatgtatctaggtaactgaaggattataaacagcggtgccctacggataatgtaaaattgacagcgacgatggttggaatcggtaaaaggttatggttaagagattctttatcatcttggaaaagaaaatgtggtagtagatgttctaagttataatggtccaaggcaagactatgaattaaaaaagatctcaccaaagttggctgaggatttgaccagagcggggattgaaatattacaatgtagtcgaaagaattaagacagcccaacagagtgatctagaattacaagagtataaaagaaagcttgaagttgggtcagcatagagattctcaatttcattagctgaattagtatgatttagaaacaaggtttgtgtaccagctaatgatgatattagatagaaggttatggatgagctttataccacgccatatttactaaatccaaggacaactaagatgtatcaccatgtaaaagcttgtactggtggtcaggtataagaggtgaaattgtggagtatgtgtcaattgtttaatttactagcaggtcaaggtagagcattaaaaaccagcaggaatacttcaacctctaaagaaccctgagtggaaatgggaagaaattgccatgtacttcatggttgaattatcaaaaacagtagagttctacgatcctatctaggtaattatggacggatatacaaagatagagcactttttaccagtacggactacgtatacagtggaccagtatgttgatctttttgtcaaggagatagttcgacttcatggtgcccaaagtcgatcatttcggatcaagatttgaagtttacattcaagtacggggagagtctacatcgagcaatggataccaaactagagttcagtttgagagaattattcagggtactgttggcatggtaccgtacgagatgctttatggtagaaagtgtcagtcacccattcattaggatgaagttggtgaacggagataccttggacttgaggcagtccaaagaatgagtgaggccattgagaagatttgagctcgtatgcttgcctaacaaagtagataaaagagctatgttgatctaaagcgtagagatattaaatttcaaattgaggattttgtcctcctttgggtgttcccaataaagagaattcggaggtttggaatgaagggaaaattgagtcccagattcattggcccattttaaattttggaaaaggtaggtgaggtagcttatcagctagccatactccatgttttatatggagtttataacatgtatttcaatgtttagtatgaggtacatacgatccatatacggagttatgagaatattgaatttcaaacagacttgtcgtatgaggaacactcactacagaaaatttgaacagaaaagagaaggagcacaacgagattgaaatgtgagttgggagttagagtcgcaattgcgggagttgtatcccgaattgtttagataaatttcgaggacgaaatttnnnnnaggaggggatagttgtaatattccaaaaaatataatgatatttaattaaacatatttttattaaataaagcgtaatttattaaatatcagagtatgattattatcttacttaagctaattacgagttaattagtgaaatatgagtaaaggaataaataaagcgtaatttattaattacagagattttattggattatgggggtattgtagatactattttcaaaataaaagatttttggattcgacgaccgtagaaactcgacagattggttttaaatgtcacgacaactgaagttgtgttatattagagttatatcggactaggttagaatattgagaagtaaatttgatcgagaaaattagaaatgatcaaaatacccctaggctgtgtttagtttaagtttagtggaaggggtaaaatagtcattttaccaagtactatcctagttttgtcttatatgaattttagttttattaatggctgaattagaattatatttaagtttattaatttttaatttaaggttaggaaattaagataaaaccaaggaaagaaaaaaataaataactgagtggtaagggcgctttatgaagtactgcaattatgtgattatgtattgaatgaatgtctgttcagtaaaatgatgaagttgttaattataagttactatgattttcttataatgtgtaatatgtgtgttagtgtagatgttaaattatttatgcatgctgaataagtaatgaattatgagtacgcatattatatcatgttgtgattacttgtgtttatcattgccttgatttaatagcttttcttgatgagtcattgtgactcatgggtgcttcgtggaacaggtaaggaggatgaaattatggtcagctatgagtcagaggtctcccgacgatgtacatatcaaccgaggtgttttgactaccagtggataggatccatccttttgactattttgtggaaatgtaaccctatcctgtaaatttggttttgagctaaagtgtaaatatttttttaaataggggatccccatacttagcaatcttttgaataaaagttacgtttaagtttaaattgaaagtttttaactaaaccacacttttcccaaactaatagattaactaagaattagtttgtaaaagcacacatgtgagacatggcgttacataggaactgttggattttgttccctaaataaaacccattttaata

SEQ ID NO: 24101 - DNA, 2946 bp, Cannabis sativa
ttgctccttgctccttgctccttgctccttgctctctcagctgaagagaaggattttctctctgtgcgcaggccaccattttttagcttagctttacggtatgcaattttgctcaaatgtcttgctctcttttttttctgtcttcaaactcatgaattttggagtcttaccatctagtgatggttcttcttctattatgttcctcaaaagtttgattttttttctctttaaaatattataaatagccagaatgcgactctataatttatatgtgtattagaatatacgaattgatggaggaagatgggaggagatatgcgggctttacttttactatgaatattaggggcaacagtttgtttaatgcgatattctattatctaatattgttgataatggcatttttggtttacacaattacttaatgactaatcgtattgcattatgttgggattagtattttcagagttatcaagtatttattttcatggagattcttcacatagtatagctttacctttatattaaggagtttgattctcttgaactcctggttctatactattatgcgagatctatattactttcatggtggtgctcgtttctattaattattctaatttggatattttccctttgtaggttagccaatatgtattcaacaaagaagaaaatcctcaaggataacaatgccgaccctactgagtttgaggagacagttgcacaggttattttcgtttgcctctatattctccaatgtatatatatataaaaaaaaaaatttatatagcttttatatgtatatgtatcatgtttttagtgtttatcatactgaagttatccatcttgatatgttgcagaacctgtttgatttggagaataccaaccaggaactgaaaagcgatttgaaagatctttacattaactcagctatgtatgtatattatgcatgaggaatcttcttggtgttttattgtttcatatttttgctgggaatttttactaatatggaggtagatatgttttacagccaagtagatatctctggaaaccgcaaggctgtagttatctatgttccctacagattgaggaagggtttccgcaaaattcatttgcgccttgttagggagttggagaaaaagttcagtggaaaggtaacaaattgtgctgtgccttgttccaaattgtaaattgttcaagttttttaatatgatgatttcgatagtcatgggacaaatctgcctttgttatcgcttgacaggacgttgtcattgttgcaacccgaaggattgtgaggccaccaaagaaaggctctgctgcccagcgtcctcgcacccgtacccttactgctgtccacgatgccattctggaggatgtcgttcatcctgctgagattgttggcaagcgaattagatatcgagttgatggctccaagataatcaaggtatattagaaagtaaattgatcactatcaatttcacataattggaagatcacagcctgattagagcatgttataatgtgtgataggtttacctggatccaaaggagcgcaacaacaccgagtacaagctggagacattatcaggtgtttacagaaagcttactggtaaggatgttgtgtttgaatatccaatcacagaggcttaagttactagcatgccattactggaaagatgtgttatgttgccgttacttcattttagaagctttcatttgaatttttcggataggtactcttgaaaattttgacttgcgagatttcatattttgattcagacaattaagcgaaatatttttctcttattttcttcttattcatcctacttatcatataagaggctaagtccttgcttggaaattcgtataaacactcaagttaattccacttgtgtcctcttttcttatatagtttcttatgtctttttgttgagcgcacataccttgctgcgttagttcggtactctcgagtctcaagcttatatgttatatcttttttttttggctgaaaacttatatgttatttgttgctttgaacataaatactaattaacaaagaaagtattttatggttaatacctaaatttaacataagaatttagacaaattttaattaataaataaatctattgtattattttttaaacaataaatactattagaaataaactagattaaagttatgtatatgtatacttagttacatgcttaatttttatatagaagaatttttacacctaaacaaaaattgcaaactataaactataaactcaacaatagtactacacgaagcaaagataattgagattaacaccgtaaaaataacttgttaaagatgattttacaacatcatttaaaaagttttttttttttttctaaataatatatgtttttgtgtattcttagttacaaacaacataaatttataaaattaaaaagcaacaaaaagcaaagtcttgattatttcgataaaattaacataaaataaaactcataggttgaattagattaatagcagaacaaagaaatattaaacagtaaaaaattcatgtgttaaaatagaacagataaattttaagtcactaaccaataaaattatgaaaaaaaaaaaagaaaaaaaactactaaagatggaagaaataaaaaatttattagtttcccaccacaagttgaagactttgtgattatcaagcactcattcatgataatggtttaatgtttcactataaagcacattttatcatccatcaaatcatgattacaatgattccttcagccacttttttagcttctaggttgaacaaatgacataaataccttagatgtttcctcaccacagaaaactaggccacctccgatgggctgcaaaacctcaaatacagtgtgatatcacaccaaaacctcttccaaccggcaattgtatactcatttttgggtttgtctaca

SEQ ID NO: 24102 - DNA, 3088 bp, Cannabis sativa
ttcaacttgaatgggagtagcaacttcaaatcctattgtgtcaaagtcttgctcaacaacaatatctaccagatcatgaacaatagtacatgtgggattagaattttgttcaacatcaacatttacaagctcattagtattattggtttcaccaaaaaagtgaaattgatgtggagtgtcaacagaaagatgttgatcaaaaggagataatggggagttaaagtgagaagactcagatgactcagactgatggggtaaactaccaaagttggaagttggggtatgaggagtgtgtttggcacatgtgggaatcacaacagaaacaagaaaatctgaatggtaatttattggagaagagttgttggagagcgttgtagcataaggaaaggagttttcattcaaaattacatcatgagttatgtacaatctccctttagactccaaacacttatacccattatgattcaaattataccccctaaaaagtgcaaggagatgacgtgaatttcagtttgtgttagttataaggtcttatattgggaaaacaagcacaaccaaaggttctaagagcttgataatcaggtctttgataaaagagaacccttagaggtgatttgttgtttaaaacaggtgtaggcaacctattatgaagatatagagttgtcttaaaagcttcataccattatattagaggtatggttgctttagctaatagtgttaacccattctcaacaatatgtctatgctttatctcagctagaccattttgttcatgggttgtgggacaaaggtgtctatgaatcactccaagtttgttaaggaaagttgcaaaggatctatattctctctcccccaccccaatctatctaaagagcttttactttagtttccaactgtaattcactcttagctttgaagttttgaaaaactttaaagccatttgacttgttcataagtagatagagccaagtgaatctataatacacatatatacaaaatgaatataatatatatttgtatccatttgcggaaaaggtgtgagaaggttcccataagtcagagacaactaattgtatgggtgttgtatatactcagtgagagaagctttagaaaaggaaaacttatgaatcttgccaaggcaacaattagttgagcaaattttattattattacgatctaaaataggaatattataatgagtaagaacagaatggaccaacctagcagaggggtgtcctagcctattatgccatggaaaaatcaaaaaaattatttgtggtacagtttgagcaagtatgtactttagcttgagcaacatgagtactaacagtgtttgaacaaggcttgaaactgagagatggtgatcttgggaacaagaaatgaagttgagaagcatcaaatgaatacaaccaattctgatgtgtccccatcaaaagattagaacgagtctctttgtccttgacaaaacaaatatcatcatgaattttttaaaaaaatattgttatctttggcaaatttagaaacacttagcaaattcttggaaattttaggaacatgtaagagactatcaagtaagaaagagttagaagagttgggtggaaaagaagaactgaccaacatgctttgttgaaaaacttatttcgtttcccacaaagatcttccctgtaccatcatattcagcacctgttgacaaatgataggcattaggagtacaatgatttatagctccggagtctagatactaatttggatcttgattagtttgagtggaggcgatattagcttgtgttgcactggcctgagttgagttagaagagcttgctaaatgaggaaaaacccctgtgaagctcttattaaatctgtaaaagcatttcggtgtaatatgaccaatcttgaagcacaatcgacagtgtggtctgctagttggagtaggaatccttcctcctccacaaccatagtgagtaggtattgccttgtcacaaaatctaggtggtgaaaactaagagataacctccacgagtatagtctcctctagtactagtttagaaaaattgaaaagttaaaaaatcttgaaaaatttgatggcctaaagttgctaaaattgcaaatgaagttggcaagattgagttcacgtgagtcaaattccgaggcaatatgagcattaagatcaatctccttgtctatcttcttgatcctagattgagatgcaagaagtaatgactcgatcttagtaacactataactctttagtattgtgttagtggatatgaaaaaatgtgtcatattcacttgagaggcctttgaagattgctacaacatgatcacgagtagtgtagacttctccaaatgaggcaagaacacaaggtgttttactttcaataggtactcagagacagtcaacgaccctttttcaggttgtagtttggttcaaaattcaagaatcttagttgagacttaaagagtgaagtattgctttagtttagaccaaatttattttgaggtttgacagccaaccatgtgcatgagtaggcttttagacttggatgagaggagtcatgacatgagtagttaatcttagactttcaaatcgagataacctggattaaatgtgcctacagtgcaatttagtttagagagaaattgaggtggaggatcactgttcaagtatggctgaagtcaattgccacgaacgacagttgacttgttttttccataacaataagttatgatcacttagtcgaatagagagattatacaaaatatagacaggagaaaactcatctagattttgtactctctaaggagttggtggtggcggtcttggttattgattgttgtgaacgtcgaaagtatcttcggtgccgatgttgtctcttgatctaggaaaatcaacttctcctgaagcaacattagtcatgagatgtgaaaaaagctctgataccatgttaagcttcttagccattgatgaacacaagcaaagaaaagacagagaaagagatttagaaagagagaagaagaaaaaaaggaattctccattcattgatacaagaacaatatcatacatttgtacacaacttagaacaataaa

SEQ ID NO: 24103 - DNA, 2321 bp, Cannabis sativa
aagttttaacggccaaaaaagttcaaaggcatgatttagtacatgtcaaaattaaaaaaaaaattgctaattagacataaatcaaagaatggtatattaaaaaaaataaaataaaaataaaactattcgtagttattttcaactcatgtctttgttcttacttggttacttatgattgtaaatttttgtttatattttatgaacaaatctagtagttgactatgtagctatatatttttggtaggatacttaatatttttaaagttttctaccggttaaaatgatgatatgaatacttagttatttaccacgttaatatcatgtcgactcaatttaataatttttcaaaaatatataatttttattttcttaatgttaaattaagtaatcatatcattattttgtatgtttatgataaaatttgacagaaagataatttacattatgaatatatagttcagaaattatttacaagagattgaaaaaatttaagagtaaaataatatatgttataattttaatttttttatcatgagcatatataatgttggctgattttcaaaaacttttatattttgaattaagtttatatatataggtggtgattatttttgttgataagatagagaagaggatagatatgagtatgagtttaatcaatatattgtttgataatttttttttgaaagaagttagaaaaagccaaagctctttctttctctctcttcaacgttatacattacatgccacgcataacgcagccattttctctccatctctaactataaaaaaacaaaactttctttctctctctctctaacccattgtataatattaataataataataataataattatttattatcatttctatactaattaataattattatagaagaaaacaaaaatttcaagcttaaatcatcattcttattctattatatatttatgttttttttttaaaaaaaatgtcaaattatgaggttatatatgtattttgtttggtataaattttaatcaaatttataacatttatctaactatatattttaaatgataatgtttgtatatatacatatattatatatatttttttatatataaaaaataaaaattatgctgtaaaaattattaattttatataatacaatgcaatttgaaccgtaattattaaatttaaaatcacaaactgcactaatatataatttagcaaaaatataaattataaccgtaaaaaatttaaaatcacattttttatacggtaaaatagttcaatgaatatccctcatattatagcatattattgataacaaccataacaatataaaaataacctaagtttttttacgtttttgctaagcaaaaattataatttataacctaagttaatacgttcacgatatttatttttatctatattttggtatgaaaaattaaatatgatgaaaataggtgtgtggtatatcacgtgaaaatatataatatgatgaaaattagtaaagataaatatgatgaataataatggacattggccacctaaaactaattaatattattactgtgaattccacaaaatatgttgaccaccaacaatatttcaccaaacatttagactcttcctctctattcaatttcatatacattaacaaaataagttgttaatttccacaatttttttattattagggaaagagtagtaattaaaatatattttctaaattttcataatatatttcacatttaaaaatttctctaacacccaataattgttaaggtctgccttgaagataccagtgatactaatatttacatccaccacgaattataatattattatacattgatataattaagtatttgattctatatatattattaacaattattccaaaaatactatatctttgtagagtcgtagtggtaacgatggtcttacatttttattcttcggttcacattgaaattattggaacattttatgaattattgaaaaattaaaaaggtaaaatgttttaacaaaggatgtaattattttttgatgaaacattaatagatagccatacaagatttaatgtgattaaaaccactaaaacacaatctacaaacaatcatgattgaaaaagtattaagcctaaagtcaccattttgattaatacccttcatcataatttgacattaaaaaaaaaaaagaaacaaattatttcatagggaaagaataagttagataggttggttaaaagagaaaagtgaatttattaatttttcttgctaatatgataagaaaagtaaaccaaagtattaatatttaggataattagg

SEQ ID NO: 24104 - DNA, 2851 bp, Cannabis sativa
ttctaagatctacatgtaaaagaaaaggagagaatagtacttaataaaataaaagattgtattttttgttacccaagctaaaatctctctttagtatgtaatattttttgtcctaatgtttctatgtatgctcatataattgttttgtagagaccattggtttttttgagcaatgcacctatttctttttctcattttatatcaaaatgtattacttttttaaaagtgactttttatcagttttggaaaataaattaatatatattaatgctagtcttcaactaccattatcaatcactaaacacaagtaattgttttttaccaggagtattattattgggcattagttatacatagcgtcatataattggttagcgatattctctaaaatttattttttaaattatataaaactccatatttaattaaactaataataatataacatcgagaaagatgttaaatataagtagtgccttttagcgattttcttttgttgaactctaaaaaaatcccatataagatatcatatttctatttgtagaggttcaatgaagacattgatatattgacagtatttaatgtaatttgttagagggaagaaataaagtttcatatgtcatgacattattatggatcactataacatgacaagtttacttcattggagtagtgggtctacttctagtagtctcttcactcttctctaatgtcataagtgttttgggttcacctattgtcccaattatggcaaattatggcagtgtttttcttccatgaaaagatggatgggatcaaagatatggctatggttttaactatttggggtttgtttcatatgcttatcaaaactatcttgacaattgtagttccaagagtgataatctaataaggaatggttaaaccaatgttacatgctaaaatctattttagtgtgcatgttcaagtttatatagttatctacatgtatagagaaatgttagaaggtaccagtggtatctagcaccttcatatgtgttaatatcgctattgatttaaataagtatcgggtcctgtatagtttaatataataacttttaaaaagtatcgctagtcaatcgcatgacaacatatctagaaggtaccaataatacctaacaccttcatatgtgtctaaatttttgtatctttaaatagataattaacttgttgtagttatttagtttttgcttttttatgtgttgatatatatttttttattaacaaattttgggttatgtttcaaatgttataatgtgttattggtatagtgtaagacctatatgacacaacataaacaaaagttggcacaaaacaaggcaaatgaaaattcgcacaaaataaaccatcaaaaatttgctattaagaataattaatattttttttgttttattaagcggtcagctaatagagtcgcttatgagttcgcaagagcgtctttattttaccctgattgtactttcagtatggaaaatattccaactgaattattgtctattttggtgactgaatttcaagattaataagttcgattatcctttcaaaaaaaaaactttaaagttgaacaaactatggaaagaaaatttgtagaaaacaatatatagtgatcaaattattgttttattgaatgttcttaaataaattaaaatcaagaatatgtgaagttgacaaagaaatgaatttatataaatattttatgtaataaaaaatattatttcaatgcaaaagaataaaaatcacaaatgagtacaatcatttcaaacttaaatatttataacttataataaatttttttgacctataactcatagtaatttagttgaaagcaaatttaaataatttgaaggaatatttgcagtgaaactcttttaatatttgtaattgttacacatataactctaataaaaaagtgacagtaaaaatatcttatctttcgattttgttacagctgtactcttaagtgctaactaaacatattaaggaccaactcaaaaatacataataatatatattgaaccacgtattaaataaaaaaaaaataaaaaaaaaaaacctttatattttttctataaaaacttttatttatttaatttaaaaaaaaaaattgtatatttttaattataagataaaataaataataattatttaatacgtaatttttgaataaaatgtatatagataaaaattaaatattgttccaaataaatgaaacactaatacgtagtctaataatatatcagttaatataatatttttgctaccatttttttttttattaggatggtataccactgctaacatttattattttagagtgcctattcaaatttatataactatctaagtagtttgttttatttacacatgtcaattgggtgatcacaaattattttatttaaactttaagaaaactcattatgattttgtatatctaatcaatcaatgagcttgttggtagtagtcattttgcttttttcactttatgtcatttcacttgtaaagaaaagaaaattataaaaatatttatatacaaaatctcatttgtgttaaatattaactaaagttatttcagattttttattgagaacattgctattaatacctcaaatattatattcatagagtgttttatgattaattagtaattttttatattatttattaaattaaattatataaaatctggtattaatttatactaataataatatatcacctctcacgaaaaactattttttataatactaaaaaaatattataaaaagcttactataatattttataatgcattaaagaaagttgtgttatcatagatcatgccactttttgtaat

SEQ ID NO: 24105 - DNA, 2255 bp, Cannabis sativa
aatctcaatagttcgggaaaatttttaacggctaaaaaagttcaagggcacgatttagtacatgtcaaggttaaggagaaaaattactaattaacctttaatttaatatataaatattgatatagaaaattgtctacgaattataaatttattatatcaatatgttgttagacatcttaatataaacatatatatatattggtatgcatggcgcgtaaattaaatattattcatttataaggacttgtattcttatgattatgagaattgtgaaaatgtattattagtgtttattattttttttttttttgtgttatactgttattagtctagcagatctcataatacttaagaaaataatttttagagattaattatcgctaatcgatcaatcataaagttttatttataaaaggtaaaactttataaaaggtggtagacactaattaataatcaataacaatgtcatattattataaatcgattataaatattacatgcatgctaattcatgatgatcactttcccatgatattggtgcatttttgtagatatatataaataatatatacatgaccactttatttaacacacaactatataatatattgaatatcacgtatactttaaaattaatcataattattcaaaaaaaaaaaatcataattattcatggctaggctacatgcaatataattatgatacgtacttatatatgcgactgattaatcgacctatgatgagttaaattgagctttattattaattactatttatatatatagtacttaattttggttgtactacttgtaggaaccactgaaaaaagaagctggctctaccatgtgccctacctatatagcactccaaattatgaagaaaataaaaaaaaaaaaaaacactttaattaatgaaatatttttgcttaattatggcaataattaagtggctgtatagttataatttatatatatacctcttaaattgatgattcacatattcttcctcaaatttgttttttttttggggccatctctagttttaatgggtcgacctagaataaaatttcaaaaataagtttttatttgagaaataaaataataaaattcaaataagtttttaaattattcttataataaaaattatttgagcgagcattttttatctaaatgagaaataaaatgaagacgggttaattaatttttaattggtagggatattattgatatttcccataaattaattcggtgagattttaaatttgaatttcgtagttaaatagtttgtctttaaatatttttcatttttttttatttatgatactatttagtattttgaattataaatattttgtatacactaaaatttataattatattatttaaataaataagaccctttgttattattaatttatttcccaacaaaataaaaaaaaccaatttccgacaaatattattcatccttagctaccccatatggtaaatcttaattattatttgtgtcattcatgatgtcatctccttacaataactatgtaaatactatacacatcttattatgggttattaataataggtatatatatatatctattacattatctaataagtatattatataataaaaataaaaattcatcttatatataatgttactttttgtgttgtatgttggaatatatctatataatcaatttcccttataataaatatatttaaataaaataaaacaaaacaaaagatggcttcccactagaacttatcatttgataaaatcaataacaataatataacatgaccctctttctctctctctctctctacctttcttaataattattaattaattaattaattaaaaatttaatcaaataataatcccaaatcacatgctactctcatcatcttcttccttatttaaaccccttcattcccaaaacacaaacacaaaaaaaactcaccaaatattcatcaaaaaacacaaaaatctcccatattcaaaatctcactacattacacacttatatatatacataaatattttgttcatataattatattattattattaatatatatcatcatgatgttgcaacacaccacttcatgtactctcaacatgataccaccaatactagacgatgaaaattaccaaaatacccctgacaacgaagacttcttctcccgccgttgtatttgggtaaacggaccggtcatcgtcggggccggaccatccggcctcgcggtggccgc

SEQ ID NO: 24106 - DNA, 6606 bp, Cannabis sativa
aatatgagtttgtgaatcaatgtattgtatgatttgtatatgttgtatattgtatgttgtatgttgtatgctaacgtctcaagtacaaatgaggggccatggtggagtatcatatagggtaaggtcgttgaatgtagagatatcctaccgtgaatttgtctgattcatgtatgacattgttatggtaaggtatgatacgatgatagtgttgttgaatgtaaagataccttattctatagcaatggtagggctaaatgtacccaggttattgtagggctagtatagacctaggttatgtatgtaatggccatgatatgataaatagtatgaaataattgtgatatggttatttcatagtattatagttattctatgagtatgatagaagagttatgatctctacgtataatgttatagttttagattagcatggatgcatgtaatataattttccatatatacaattaattacttattgttatcaattaaagtatgacattgaaatacgtaatacattaagaatatgatggtattgtatatagttgtattgttgtgaatttaagacatgtatgatgtattgaatgttaatgtgtgttaaaatattttcttattggatttttagctcactccccttaatttctcctacaggcaatagacatggaatattggttataagcgtgatgagttaggtcagttctagtatgcatattgcgaggggctatggatgaacaaatagtctagaatgccggtggacccttagttttgttttcagataataaagtaatccgagctcagtgaaatattgtaaatttattttaaaactacactcaactttttattttatttttaaatatgaataatcattaactttttgcatacttattgtaaaacctgctgtgtatttctaaatagttttgagtgttttcagttaatgcttcaaaaatagtattttgtaaaataaaataaaatattagggcgttacaatttttttcttatatcagaatttgaaggacaatgcatttgatcttagttatcatgtcaaccttgtgtttgtcttgcactactcttatgaataagtaatatttatgtactttatgattataactataggttgagaagtttatgtaagagtaaaagccaacaatgagggtttaaaattctcatattttagttatgtggctactttataccgctaacactattttgtgcatttctattttcttttaatagtattttatttaggtaataatggtttcaaaactttgttcttatttgacttccattctcaagcaaatttcttggtgaaattggctgaatatgaatatgaatttgaatatgctaagatgggctgttttaagagaaacatacttgaagacaaaattgagctattttaagttgggttgcttctcaatcacacgagtaatgattttcaaactaataaactacaatttattattatcattgattcttttactcttagtaaatgacaccttaataggtcccatcttttaactttttcattgtaatttgagtaaagttctttttctttttggtggaatttgtaatatttaaatatatattatttatgtacatgtacagttttcacaaggcaatggatagagcttattaacaagactaagactattttctcttcatttttctcctttgatcagttagattagttgactattattacagataatattgttggttattagactgttattacagttggtttattcctgattttgtggtggttagttactatctttgtactctgctacttgcctatatagattttcattcaatcaataaaatacttttcttgtttttcatttcttccacaatatggtatcagagtaaggaagatatgtttcctttcgatcttgattctctctgttcttccacgccgtgttctacttcttcttctccggcgacgatcagtgtcagcatttgaagaattcatctcttcatcgacactcttctttcttctaccttcttctctctaaggattcttagacgcaggactcttatcttccaattcccataatgtcaaataatcaagaaacagagcacgtcaacgatgttccagctcaaatcaacaatggaaacaataaaaatcaagcgcctgaaatcggagcaaatacacacatagtaagatcaagaaattcgatcgaggatcactcagacccctactatctgcaccacaatgataatcctggaaatgttctagtatcttaattgcccactggacaggataattacattgcttggtgtcgagcaacggagttggccatttgagtcaagaagaaattgggcttcttgaacggttccatacctaaacctcccattactgatcatgttatctataattcttggattcgtaataacaacatagtgatttcttggattattaattctgtttccaaagagatttcgtctagcattttgtacgatgaatcaactgctccaatttggaatgatctcatggtcagatttcagtaaaggaatggtgcacatatctacaatctcagaaagattttgatgaatcttaaacaagaaacccagacggtaagcatgtattttaccaagctcaaaactgtgtgggaacaattgtccaacttcagaccaaattgcacatgtaatggcttcacatgtggaggagtcaagaagttgcaaaaaaatcacaacatggagtacatcatgtctttcctcatgggattgtccgatctttatgcacaagtgagaggtaacattcttgtcatggaccatttacctgagattaatagagtttttcatttagtcacacaggaagaaaatcagtgaggaggacaaagtgtgtcgacagaccccaactccaacataacattttcctttcaaggagaaagaagctcggggaaaccagaacctcccaagaattaaacccagaaacgaggcagacccttttgcatacactgcaacatgcacgaacacacaattgagaagtgatacaaaatacatgggtatccaccaggatacaacaaggctaggatatctaaagaggctgcagcaaatccgtttcagacttctaatgaaacttgtccaaatcctaatgaaaacaacactttcatgcctctattgacaccaaaccagtaccagtagcttctcaatctccttaaaacacaaaccacaaacctgcctcctactgatctaggaccctcgataggtaatccaggtattatcttgacccattgctattttttgcctaaaaaaaggccttggatagttgattcaagtgccactaggcatatttgttcaaaccttaatcttttccaaagtatccatcccattggttcaactaaattaattctaccaaataacaatcacataatggttcacaaaagtggtaatgttcacattaatagtaagcttattttacatgatctttatgttcctacattccaatataatttagtttctgtcagttgtttgacaaaagagaataaccacatcttgaaatactttgctcatgagtttcagatacaggaaacacataccaagaagacgattggaagaggtgacccggctaatggtctctacattttggacaccacaaccgtttccatcaatgccttcatatctcctgaaattcggcatagaagattaggtcatttgtcaaataaatgcttagatttacttcaagattctttacattgtaaaactaaaaatttgcacaatattgaaccatgctacatatgtcctttagctaagcaaagaaagtttcctttcccaaataataaaagctttaatactcattgctttaatcttatacattgtgatatatgggggccttatcatgttacttcctattctaatcacaaatactttcttaccttagttgatgatcagtcacgatttacttagatttatcttcttaaacaaaaatctgacgttcacttgattataccagaatttatttcttatatacaaactcaatacaacaatgttttcaaatgatttaggtccgacaatgcacctgaacttactttcaaagaattgttttctaaacatggtattgtgcatgacttttcttccatcaaaacacttgagcaaaatgttgttgctgaaagaaagcatcagcaccttctaaacgttgctagggccttgctttttcaatccaaaattcctatacaatactggacaaaatgccttctcacttctgtgtttttaatcaatcgcacacctacaccaaatctcaagaacaaaacaccttatgaaatcctatttgaaaaacaacctgataatgacaatttaagatgttttgggtgcgatggaaaggatagtgtttgcatggaatcctaatagcttcacggttaatattcttaaatgtggaactcaatttattcatagcttggtgacaacggtagatgggaagaacatgttctttgttacttatatatatgctgtgaatgataaagatggaaggaattaatggagctggcaatacaaggcccctggttagttttgggggatttcaatgagattctctctagagaagaaagagtgggagatagagtaaagtttcataaggctgctgaatttattgaatgtattgagaaatgtcagttggaaggtgtaaaagcaagtggtaatttcttcatgtggaacaacaaataacctggagggggtaggatctattcaaaaattgatagaatccttgctaatccaagttggatcaccaaattttcgactgctcaaacacattttctaaacgaaggaatttttgaccattctctggggttgcttacaatacatcctgcaatacccaatgcgaggaaacctttcaagtattttagaatgtggagtaattaaccagattatgataaaaagattagagaggtttgggctcatcaaattaaaggaaccaagatgtacaagattactttgaagcttaaagcattgaaaggagttttgaaggagattaacaagagtggtttttctgatctacatgctgcagaagccagggctaaggattttctagctgactgccagacccgagaaatcaggtgctgcaatctgtagaaatggaggctagacaacagtttttaaagtcccacagtgatttaatatcgatgttgcagcaaaaggcgaaagtctcctgggtgcaaaaaggggatgataacacttctattttccatgcaagccttagagatagaaggaggcaaaatagaatttggtccataaagcaataagatggcactcgaactgagcaaccagagcaggtaatagatgcttttcttagttattataagactctgttgggtgctaaaatggatcatggaacgaaagtgatgaaacaggtagttaacaagggaccaaaagtacccaatcagcaagcacaaatgttgttggagaagttcacaaaagaagatgttaaagttgccttatttgcaatacctggaattaaagcgccaagctctgatggtttctctagttattttttccaaaaaaattgggagctaatagggaatgatatatatgaagcagtggatttttttttattacagggaacattttgaaggagataaattccactgtgcttactcttatctctaaagtcaagtgcccaaacactgtaaaggacttcagacccattgtctgttgcaatgtcatatacaaaattgttaccaagatgttatgctctcagctaaataacatccttcctggccttattgctcgcttccaaagtgaatttgtaaaagggagattcattgctcacaatgtcatgatatgtcaggacataataaggcactatgggaggaggaatgctaaggcaaactgtatgattaagatggacctgcagaaggcatatgacacaattgagtgggacttcatagaagaaattttgaaggcctttcagtttcctatccatctcatcagcttaatcatgaattgtgttaggactccaaggttctccctcatgtttaatggtactctacatggattttttgaatccagaagaggtctgagacagggagatcccatatcaccattgctatttgttatgggaattgagtatttgtctagaataatgcaaaagattagagctagggaagatttccaattccatgaaagatgtggtggaatcaaactcaattacttgagctttgcagatgatgtgctacttttcagcaaaggagattttaaaagtgcctatctcatgttacaaggattgaagttattatcttgcacttcgggtttccatcctaaccctacaaaacctgctgcctatttcagtggtatgcaagatggagaaattaaaagaatattggacatgtatgggattaataggcaggatgtacctttcaaatacttgggggtttcgatatgtgctaaaagaatatcagggcaggattgcatattgctggttgagaagatgacttcccgaatcaagacctggagctccaggaacctctcttttgcaggtagggcagtccttgtgaattcggtgttgatggagatccactcatattggagccaaataatgattttacccaagaaggtagttaacgagattgaagctatttgccgagctttcttgtcgaagggacagaacaccctgaatgg

SEQ ID NO: 24107 - DNA, 1580 bp, Cannabis sativa
tggaaggtagccctgtatacagttcaattggcttgatcatggcttggcttttttcttgtgtaggattcaacttttatttatattttgtggatgaatcttgtgatgagattatgagaagcttatgacgatatgcatgtattgaatgctgggaattaggtagaaaactcataaaattactagttgagatattagattattttgattgaatttgttgtttgggatttttaagaaagcatagtactatagtagtcaaagtatttgtcttatgacagttttaaattggagcttagtcgtagataaggttcgtagtagtgtaggttcttttggttaggttcttagtctccaagttcaaagaagtcatcagagtgaaaaacaatgttcatatcaggtgccttctatgcctgaacgaaagtattggtcaaagctctatgataggaatttactcctgccaaatgaatagaacagtagagaagtagaagagctatagaagaagaacagtttatattgattacccagggagtttgagagccctgttctctcccactgggcttaccacccttcgcaattgaactctctccctctgtttattatattccttatggtgtacccttaaacccagccacactctaacatgacacccttaaccaatttctgctcctaagggaaagtctaataggtgctattgaactgataagatttcttgttgtattatggggtgcttctgattaggttcttagcataagttttaaagaaaaacaattgatactcaagagggtgagttcaaatggtcagacatgtgttttgctcccacaagctcccgttttgagtccctcttaggtacctacataacaaatgtaagttaggccgcgggatcctatttttttaaaaaaatatttacattccatgtatttacattacaggtttaaattagaactcaatgaatgactcatcgatagctgatttgtctatcaactttcgatagtttccatcttttctaactcctttcatttcatatgtatttttctaaagcctgcttatatcaaatgttgttccattttgtgttggaatatttcaggggtctatgagattaaagttggagatttgtactttgatttgaagcagaggcagagactataaagtttgtttctctagatgatagtacctcagaatttacagcatattattcatgaatattgaaaacttcaaggtttttttagtagttaatttcattggcactcccagcttccaaatttttgtttattgggaaagcatgcacttgtagaatttttgttttttcttatgcatttaataataaaagactttgaatgaacaatactttaagttgctggttttgtttaacaatatacagttcctttattatagaactctttggtatcaatgtgttttttttagggttaatatcattttgggacactgtattttacaaaaattacaaattaaactttctattttgttaagtgataaaaatgaccctatattttctaaaagggtaaataccattttggaccatgtgttttgcaaaagttacagattagaccctgtgttttgttaaatgacaa

SEQ ID NO: 24108 - DNA, 1378 bp, Cannabis sativa
tttagatagggatcaccaacaagggctagagaatcgacccacattcttttcatctttaagtggtcagtcatttgattgggctccttttcttgtagtttgaagtttggtgcacaaatcatccatgttggcctttgaatgagctccataaagctcctctagagttgtccaaagagcagatgcagatctgcaacccattacttctgatgtaatgctttcagacatggatcagtaaagcagtccattagaagctggtcatgaacaatccatgcctcaaactctgggtttggttgaagctcactgacaacaacctcattctcagctattctctcggctgagatgactttctttggacatggttttttccattgatgtatccctctaacctgtgacctctgattatagtataaaccatagttttccacaaggaaaagttgtttctgtcaagcttgacagtaaatggctggctcagggtattgctgatgggagttgatagtgttaatggagcagcatccattggggagttggtttgagtcatggagcttccttaagagtttctaccaccgatgtttcctggtgtagtttggctctgatttgtcaacattggcggaggccaaaaagtcgctcttataccaagagaagatttaagggagtaatatcttgaatagaaaactcggctcaagaaatgagtgagtgtgtagcattttattatatagcagagaaaatagaaaataaggcccaacagaagtttgttagaaaggtaatgattgcacaatgattgcatagccttaagattctctcattcagtacaaccactactcctatgccagctcatgattggattcaattttgttaacacctattccatccaccttgtattgcaaaacgccccccttcccccccaccccccacacgtgtgggtgctagtttgtgtagcatttgtttagtttgattaataaaatcttcttttaatagataaagaaaaagtataataatacagatgttaccagttccacaaagaatgaatgagaatttcttttgtaaccattcaagttaatattacaagattttcgacaaggaaagcagaaataaaacaagttacaacatttctcacattttgtacagcaacataaacatatgttactatgatcaagcgatactatacttttctcctcaagtgttttcgtctcatgtttatctctcttttctaagtgtaaagaaaaattataaaaaaataatatgactattatttcttacaaaaaaagaagttccaaattcgaacttctccccctttaattgtgaaaatgacaaaatgataacaatactctttcgaaccacgtttttatacacctttctgagaaaagctacctaataaacttga

SEQ ID NO: 24109 - DNA, 3338 bp, Cannabis sativa
caaacacaagtcacccacccttcatcaaacacaagtcacctacccttcaaaaccttcaacttttgagctcaggtcctagctatttgttattttctataatgcaagtacatttgaatatgatacattcaatttttatatttgatcataatttattttccaatgtcattttggatatcttgcagttctaattctagcaccaagaactataattggacttttatttcttattggtcttattatctataaatggaaaagacgacatttgtcaatatacaaaggcattgaggaatatctccaacgacaaaacaatctcctgcctataagatattcatatttagatattctaaatatgacaaaatgcttcaagattaaattaggtgaaggaggatttagctctgtgtataaaggtaaacttcgcagtggtcattatgtagctgtcaaaatgttaagtaaatccaaaactagtggggaggactttattaatgaagttgctacaattggaaggattcatcatgttaatgtggttcgactagttggtttttgtgttgaaggttcaaagcgtgctctagtatatgaatttatgcctaatggatctttaaatagccatatttttattggatgcaaagagagaaataattccataagtgatgagaaaatatttgatatctcacttggaattgctcgcggtatcgagtatcttcaccaaggatgtgatatgcaaattttacatttcgatattaaacctcacaatattcttttggatgaaaattttactcccaaggtttcagactttggtctagcaagattatgtcctttagagaataatatagtcctaactgtagtgagaggaacggttggttatatagctccagaattattctacaaaaatataggaggagtctctcacaaagctgatgtgtatagttttggaatgttgttgatggaaatggctagtcgaaggagaaatttgaacacacaaatagatcattctagtcaaatatactttccattatgggtgtatgaccatgtagacaatgtagggagcattgaattggaacacaccatgaatggggacaaagaagacaaaaaaacaaaaaagatgcttatagtagcattatggtgtatacaaatgaagccttgtgatcgtccttcaataagcaaagtcatagagatgttagagagccatgttgagtctctagaaatgcctccaaagcccttcttgtatccacaagattcttataatatcgtagctgatactactaagaagacactaaatacaacatgctcatcatcgctttcatacaacactaattaaattttaatagtgattcaaatagttactttttaattgatgttgtattactttatttatcaatctatatagttgttattgtactcaaattttataaaatatcatttttcttataactaaaaggatttgtatcatagattatgcaaaacaatttgttttcttttgattataagtcatcaataatttatcttgaatcattaagaactaaaagtgaagtattagaaaaagagacaaataaataaataaattgaaggattactgtaaaaatgctaaaataccaacaaacaaaagactatatgtgtttgtatgagaagtgaatccgcctacccaatggatttcatgtcacccactcatctagaatatagtgataagtctctatttcacttataaatattgtcaatttatgtgttaatatacttaaattgaatatttatattattaattagtgtaatttttatttttaaggctattttgaagaataatcattcatttggagtcctttgaaaaggttttaacacatttatgtggaaaatagaagaagttcgggagctcggtttgactaaatagaatgtaattttaaattttgatagctttaaatgcagaactgcacttggagctccacataaaagtttagatctcgttcttaggttttcagaacattttaaatcgtctaattctgagttatattgaaggagttatggaaaaaatattgatctgagtatatgacacgaatttcctaggaacctatgcccaacacttaagcaccactgggacagccagaggacgtatgacatcggtacaagttgtggaaaacaatttttttaaatagatttaaatggatttttagggttatatgaatatggcttttagactttattttaagggagtttttattgaatttttgagagaaaacttataaaaatggatgaagaggaagattacatcatcaattccttatcaatgtagttattttattctcctatatctttactttttaattatgattacgattgtgattatgatgattagtatgcagtagtttctttgagtaatttgcggcataaccttcttaagtgcccaggtttttgtaactaacccccaattcttaaaatttttgtggtaaaacctcctaaacccaagttctgttagcacttagccctttccatctatttttgggtgttaagtgccaagttggaatgtctacgtgtacacagtgtacacgtggcacagtttaattagtttttaataaatatttaaaattaacataaaaaattaattattttaaaaataaaaattaaaaaatttcttttttctttaaaaattaaaaaaaaaataaaaatttattttaatattttttttctttttcttttctttctctttgcattcaaaaaaccctgatccaccataaccctagaatccccgaatcccccaaatcgtgatcaccatcagacccaccaagacctaggaaatcgccaaaaccctcttgatctcgattaaaacgacgacgaagtcgacgacccagaagaccttccggctccatctcctcgaacgagcgagagcaatctcatgccctccctggcggccactgccttagctacacccaacattacctctgtctatcgtcgcggtacgaagcggaagaagattggtaataagagaaatcctagaaaccctagctgactcgactccccacccagctccacgcattgccaacaccgatctcctcaggggtaagattatacgagcaatcaacgttagcaaagtccttgagcagatcaagcccagccgcactgagcttctcagcgacgaggatcgtaggcttggcatcaagaccaacggagacaatcaataccaggcgacgagactgctgacgccaccgggggttgagcgagacagagaaagcagaggagagagggagcttggatgagaaagggaagcgtttcttagagggttgagtcaaagggtttgagaagttgagacagccattggaggaagtggtggcggctagggtttcaaggatgaagat

SEQ ID NO: 24110 - DNA, 2338 bp, Cannabis sativa
aagtgttcttttgcaccgggcaccggccattaatgttttatgttccaatgtgctaatttttattcaaaaggtcttttgtttctctttgtatttccagactatttaactttgtaagatcctactttgaatcaggatgaaatgaagatatttaattttccttttcagtctggttcttgaatccaattagcgggatggtagtagacccatacttttctagttagtttccttcatttttctttgttttcctatagcaactgtccaaacctacaaaatccacaagattattgctggtgacaaatgacaattaaccatggtcatcatgggattattatgacactatctattatgacgatatcatgaggctttattcctcccataaagtagcccgtatgatcctacaagtcttcccttttctagaaaagacatcaactaaaaaaacaaaggttaaattgtcaagaactataaccccatcccatgcactcatcatacacaaagagatattctatatgcaagataaaaaagattaagattacaatgttatcaaagccatactgcccgtcccaatttattatgaagtgagctgaatatgaacaagttgggagtaaaagtaatgattaatccttctccatcaattgggctttaaaacaattcaattccaaactgcccaatttcaattttctgctgttaaatatgtatcattgatgaaaatgtgattcaccacacacacaaccacagaatcaatcagaagaaacaaaaaataactgatccaaattaaactaacataacattgaagttatatgaatctattggttgagcattaggtatgatgcatatgtatttcaataaagtgatccccaagtctctaatgaagttattcaaagttatattatcatatcatttacaaggaaataaacaaaaaacccatctttgtttcacaatcaacaacttcattcaccaccacaaggaacataattctttaacactaaaaacagttgaagagaattcctaccttctctttaacgacttcttccctctttgaaacatgttgttgttgctgctgttgctgagagatagtaggagtggcatcaaggtcaataacaagtggctgtttccactcaaactgagaggtgattattagaacaatcaacagaaaaacaagtaacacaggccttgacattttactcacaaaacctgctcaaaattatttcagaacaaacaaacaaataaacataatatgcatcagaagttccacttgatatagagtttaaataacccacaaatttataattacattaggttttccaaaacccaataattatttcttctacatcaaccttcaaacaaagagttatgaattttgaacaattgagattaaagagagtgactttcagtgaaattgagggttaggattccaataattaaaaagaaagaagaaaaataaacttacgagttggtggggttgagaagaaaaccctaaggacatgaccagttttgagaaaaagagagaaagaataagtaatggtgtttggtaaagggtacgaaagtgaactgaattgagaagagaagagagcagtgggtggagatggagatggagatggagatggcgatgggacccttgagcagagaggaaatggagcttaaaggagtgttaagcgttgatatgggtaccaaaccaactcttcttcgtctcttaccgtttgtaaagggcgcctttactttattatgacttttttttttttttttggtgtactcataactctttctttctttcttttcattttcttaggctataattttagtataaattttgggttaaatttgtttcaaaaaataaattaatattatatttagtttaaattttacaatatttccttttttttttgaaaacaaaattttacaatatttctccaatgcaatatctaatgcaataggagtaaattaactattttttataaaataatgtattaaaaaagtcaatacatgcattaattttttattaaaagtgcataaaaacttaaaatgttaaaagacgtactaataaatatcaaaagagtaatatttattgaggtacaaaatttagaagcattcttattgggcactagtggtgcctagcacccttaagacgtgttgctttttgattggccaacgatactccctaaaagctattatatacgagactcgatactaaattagaccaatagctatattgacacgtagaggatgcttgacaccactagtaccttttagcatttctcaaaatttagcttatgatatattttatattaaatttacacaactttaaatcatattatataccactattggaatttaattttat

SEQ ID NO: 24111 - DNA, 2630 bp, Cannabis sativa
caatgaagggacaaaattagacgaatacagtgataaatgggatgaagataggtatttatttatgcttctatctattattggttttttgttatgagggagagttgagacttatctgaactaataaagtcttcgaattcagcaaaagaaaaactaaaagtcttctatagagatgtaaacgcgtttagagatgtgttttgaggaaagaaaaactttcaatcaaggaccacagggtacaacctatacaagtgtttaagactagactatatatatcatcacgacttgtggtgagggactttctctcatttccgtggcttccaagaaattggaaaattcaagtgatttgaaaaagttcatttcaataaagaaaaatgaaaagttgaaaaactttaatggctctctctaatttgtttgtccacaagtgttttgctctttctttctgcgaagttgcaaacttgtgttgtgtgggcttatgggtcccactcagatgactatcttgaccaaatgactactgtgctcattgacctaaccgttgactcacttactcattcctatataaatcttccaattcacaaaaccattatcaatatccctaaacaacttcccatctctctctctctactactgttgagtgtttgaaaagcttcaagctcagatctcacaaaagcttacatactctaaaaatgaaggtaattagttaatatatattcagttacacttttctactactaaagtttttacttttttatcaatcaaactaatatggaattattttgttacagcaagtggtgttgaaattggactttcatgatgacagaaccaagaagaagattatgaagacagtttctggccattcaggtatgctattatatcccaatttttttgataaaataaaagaaacccatgtcataaaaaatgatgatctaatagaattcaatgatttgttttgcaggggttgattctatctccatggattctaaagacatgaaattgacagtaacaggggacatagatccagtgagtttggtaagcaaattgagaaagcattgtaatgctgatattctatcagtgggaccacctaaagcaccagagaaaaagaaagaagaacccaaaaaagaagagcctaaaaaacaagaaccaattactttggctgagcttcagaagacatggattgctcatcagaatgctcaaatggttccacttcagcattattatctgtcagaagtgttgaggaagatcccaatgcttgtgttatctgctaagcttaatttttacatttttttttttcttttttcaagaaaagaatttgtattttagaagagtgatgataagtataatgtacagtattgaagtggttgctagttgttcttcattgaatggtcattacattcatgatgttattgattaattatttatagttttttataatgacaaattacaatttaatagttttaatcagatctatgctagctttttcacaagtttattttgtctttattctcaagtggatgtggatggtgtcaaatttaaaattatttgttgaaataatttaagcctcgaaaagatgtcatttttgttgatgtacaaagttttgtaagaaagtttttttaacggtaaaagtcaaatcaaataatcttggcttatgaaagaggttttcaaaataaaactattaacataaaataatcttataataaatgtaatttatttttaaattacaaactcatcaattttagtaatatttcagctcattgttcaaatactgaggagaataaatatatttagacaatttttattgaaaatcccgaggtgctaagtaatatttgcataaaaatatatataatctttagaaaagtaagaaaaatataaatgaatgcaagacaattcactttcaaatgcatatttattgttgggtgcagatggggtatacggtgattactgcttactctgattgtcagcgggtagttctgattagaattctttcagtatagcatatccctgtcacattgtaatcggttaaagaaccatgatgctcattttttagcaaaacgagcgttaaatttagatgaggttcgggtatagtgaccggacttgcccactgatttagttgtttaaatttgtcaatcttttgtatgctgatcttttggctttgatgcattttaatggagttcttctgtttactttaaaaaaaatgcacatttatttttgacaaaagtatttggcatgatatgtttcttctgaatttagttgacccaaattttaatttatattcttttgttgaatgagtacatcaaattatttttcttttttcaatgcgttttgtttttgaaatttaattgtcgtttaatcttaggttttgtgtaataatttttgttttggccaaagtaattataaagtgcatgtatttatgtgtaaatttaatttttgagtaatgatatatgctgaactgcaaataatttagaaattattttaaaaatacacaaaaataacaacaaaaaactgtaaatacatagttgtgcagaatttaaaatatttttatagttattaaaattttatttataaaaaataagattttttgatgtttttgttgtaatcttattataattttatttattttttgttatttatatattatt

SEQ ID NO: 24112 - DNA, 4974 bp, Cannabis sativa
  modified_base (1511)..(1511): a, c, t, g, unknown or other
attggtcaggaagttcttttggtaagaagagaagagaatcttgcagagtagaaaagcatgagaattacagtacaataattgtttggaatttagtatatatatatagtaatgcatgcgcacatatatattgtatatatatatggtttgtgtgtgaatacgtatatatatatatatatatgtaacgtttagtgttcatctcaactttgactaactagctatattgcatatatgtatgcaaaatgaataaataaagaatataattagtagaaaatgtagttaatttaaattcaaatttaattttgaatatttaattaactgaagtacgtagacggtaaagcacccaaaattaagttcttggttacacaataataatattgtataaaaaagggccgaaactttgactatatactgatcttataataaaatctaacttttgtccaaaatagaattgtgaataaataatcaagcttaattaatatatatttaatatgtttagagtaattaattaaattattattattaccttccaaatcaataagctaatatcaaattgtccaccattgtaagatgaagttggagaaattgcagctccaatagcaattttactatttgtctgaacgaagcctgaacatagcaaattatagcacccagttgcttgatatgcatccgactgtatgtgccaaaatcaataatatatatttaattattttactaactaaaattaattaatatataaaattactatttaattaataattatatacttacagtccagtaggtaaaaaatcttggatagttgtccccatacagctccggactaacctaaaaaaaacaaattaaaagatgatcagcatatataatatattagtattatgtatgcatgactacagtattacacaagtctaatgtagaacattaatatatatcatttatctacatataccaagatgcaatttattaattatctggtcaattttattttactttaataataattataaaaaaataatactaaattgtcataaattagcatctttagtgataaggcaacatatttattaaaacataactcaaaaaagtgaaacataaattagtaagataaaaaaaaattatgacatgccatctagattttcatgataatttttgatgatgtatatcatttttcgtataaaaaaaatattactatttataggagagatggtaatggtggtaaacagtatatgatattagatttgtacctgccaaccagcttcgatggtattgagatcatcaccaaatgaaccagaaatgacccacaattgtgataagctgaattcgtattgacttaaaactcgaggtgcccacacatttatgctggcttttgccccgtaatattcttctccactcacatacccaactgcatgctgcccaaaacatatcatacataattacatcattccaatttctaacacatataattatatatatacacactagttgaatgcatttattggtatgccgtacctatactnaaaaaaaggaaaaagaaaaagaattttattgaaataagtgcagagatataatcgttgcagtacagccaacatggcaacatacatcaaagtttgcatttagtattattactaacaacagaagtctcattaatgtattttgaggagtaaaataaggaacagtgcatgcctactctaggtaaatattatctatatatatacatcttttatttttggtgaaattcgagaactcatttgaaacataattaattagtttctaacttcaatttttgactttcattaatcgcaaatctatgtttaaaatataccctaactaccatttttatcttctaaattttgacattattaaattatatctccgaacttttctgattgttcaaaacttttcctaaactattaaaattgttagatttaaggatttttgtctaattctattcaattttactattttagtgattgtttatgcactaaattattatttctaaattttaatatctaccaaatcatatctctcgaactttgacatgcaacaaatcatgcccctaaactatcgtccatgttaaattttttttttactaaaagtagacaaaaataacaatctcaatagaaatttttaatagccttaaacattcaaaagtataatttagtatatatcaaaattcgagaaacaaaactaaatatttagaagaacaagacaaaaccaaataaaattacttgttcatattagaagaaaataaaaaagtagcacttactaaatttttgttaaagactgttttcatgggattgaattacaacttaattatttttaaaaaatataatttaagaagtaattaattaattacctcgtggccattgctgcctgaatctcttctaatatgttttctaagtttctttccaaatcttctaacagagctagctcttagcatatcatgctcagttgttcttcttattggaattgttccttctgggcatgattctcctgataaactccataactgataattttcattttctgactccatatcattaaaatgatgatctttttgagtttttggtctatctggtggatcctgaaatttatacattcaaacaatttatatacatatattgaaatttaattaaacactgaatatttattattactatttaattaccaatggcttttgtcctttcaactgaggatggtcaaaagctggttgttgatgagacaaaacacaatctataatatcaccatctggactctgaaaatcatcaaattcagtatttattattattatgaagaaaaaaaaaacagagcataaaaaaacaggggaattaattaagtgagagtgagaaaaagaaaaatgcctgaattgtcttgagtggagacttgttgatatttttgagacgagcctttatgaatttcattttgagtaactcttgttctggccgtaatctagtctgattggcttgttgtaaagaagaagaagaagaagaagaatggactgaaccaagaagaagaagaagaggaagaaagaataatagaagagttggaattggtgagatttgatgatgatgatgatgatgacaccaacttgaagccatgtttgaagattttggtggtgttgtttgtttgcttggagctttttgtgtttgttgtgtacattggtgttgtcttcttctgtaatcaaaagtacaaaacttgcatgtattcctagattttgtcatcaatgaagataattcatcaacacctcttccaaccatatccatattccaatacattattattttgagaaaaaaaccaaaacccaattttacaatatctcactctctcaccatttccaaagcctttttcttcttcttcttcttctatttcttgtttgaagtaccccagaataaacactaccttgattccttcgatcccttttgctttctttctctctgttcactctctccaacctttctttctttcttctcttctcttctattctaatactttggtgttttatgttctgacaacttaaacttctgagctttgagctgattaaaataatcaccaaatggggttgggttttgttaaagttttatacatgtgggtgtggagctataaatgctttcctttgggtagtgatggaaatcatgctcgaatttttaaatgtgaaaacaaaaaatattagagagaggagagagaaagaaagagagagagttttatgtttccagtctccaatacaaagactgaaactttagcttttttgttaattttatagggcaaaatggtactcataatgatatttagttatattctttactttggttctgaggacagattggaattacacttgattctgggtttccaaagttctttgctttaagctctctctttctcacttccctagatgttctttgtgtcagcaactcagttttcattttcttcaaatttttttaccttctaaacccaacctactttcatttcatatatatgagttttctccatacaattctcaattaataacctctcatttattttgtcttaagaaaaaagacattaattaaagattgacttaatatagtagttatataagagtaagtgttgattttggctgggccatagccattgacagtccaattcaaagacatatatttggtcaaaattggactcacttttttttttcaaaaaacaaataataattgtgaattattatttatccaagtaagtaaactagaacttttgaaaggtgtcgttttgtggaagtgagccaattaaatttgtgtaattgggggatttttggcacgcgcaacctggttatgtgcactaattaagtgcatgcttatacacaaatccatgcatgtctctcatgcgcatacattatggggcttaatcttgattttccttattcacaaactacgtcttcttaattaactatcactgtataataaacaattacactaagtaaactgattaattttttcaacaattaattaccttattcaatgacatgaaaaagttctacccatatatcttatcctattacccctattattgtttacaggtaacgagtatagggtactcaccagtaaatcttaccctgataaattttttaaaaaataatttaaaaaatcgataaaatttattatttgtaaaattattaatgaaaaagtatagttattaacaattaaaataaagcattatataattattttagaattttatatttcatgtattttttaaatatgaataaaatgcacactactgaaatatatatataaaaatataaatatataattgggtaggctacacctatatactattcttactctatacttgtatgggataatacatgttttcatactcttatcctaccctaaatcctaatttagcaaaaaaagaaaagtaatattctacccatatgagtagagtacccacctgtaaatagattttcgagtaaaattaccatccctatattaattatagggatatgattttgtc

SEQ ID NO: 24113 - DNA, 1797 bp, Cannabis sativa
tgatatatgttctttcggttttccttttctcttttgattctaattcagctggcaataatattttgattgttcctcttttaaataaagttcataatctttgatgttgttggtaaaacgttgttaagtattagcatctacgaagttttccttgtgacaatatcgagttagtaggatgataatagtggatggggcaatgagcttaatgtttttttatttcttctttcaaatttagggttttacatacccagttagaactcattttctggaggacattcttgaaggcacgggttacaaattaaccccttacaatcaaattgacgattatggtcaagaaaagatgtggaagatgagcaaacaagcaccgagaaaaaggaaaagtcaaattgcttctgttgttgaggtctgtagtagtacattgtaaattttattgataagataagattttcttgctcttttaattgttctcttctcatccctttgtaaaatttatgctcaggatgcactcaaagctgctgacttgaaagattacagtaaccagactcgagaatctttagcatgttggaatcctgattgtattggtttcaattttattgagtatcttttgtgttatatctgtgagaacgaaaggcctggagctgttctagtttttatgactgggtgggatgacataaattcattgaaggataagctcctggcgcatcctctgttgggtgatcaaactcgagttttgttgctcgcatgccatggctctatggctagttctgaacaggtaattatgtttctctcaaattaatcacgtaattgttatgatgatatggatttttttttgcaattgtaactgggacaagtatgataagatcttaacggtctttgtatacactttattccgcatgtgatctagcggattataaaatggctcacagcttgacttaaattttgctatatatgtgaaaacgggaggattgctttttatataatgatctttcttgatagttgaattactattccttttctgttttcgttcttttctttctagtatcttacttgatttattgacatgggatgtgaatacagaggttaatatttgatgagcctgaagatggagtgaggaaaatagtactagcaacaaatattgcagagacaagtatcacaattaacgatgttgtttttgtactcgattgcggaaaggcaaaagagacatcatatgatgcactgaataacacaccttgtttacttccatcttggatatccaaagtttctgctcaacaagtaaggttattttctagcttaaaatttgatctctatacgagagatctttttatcgtttttggtgactgaattttgagttttgtactttccttggctggagttttcttggccagagcagtttttgtcattcttatagttacgatttcaatgttgtttgttttgtgtgtttttgtgtctttgttttcaaaatgactagtttcaattgtattactacttattgaaattccttggattaaatatgtgggcatttttctcgtgtgtgttttgtagagaagaggcagagctggtcgtgttcaacctggagaatgctaccaactctatcccagatgtgtatataatgcttttgtggagtatcaattacccgaaattttgaggacacctttacagtctctttgtctccaaataaaaagtttaaaccttggaagcatttctgagttcttatccagggctttgcagtcaccagagttattagcggtaattaccaagctatctacacacaaacacaagtaaatttcggaagtgctatat

SEQ ID NO: 24114 - DNA, 2844 bp, Cannabis sativa
  modified_base (27)..(41): a, c, t, g, unknown or other
aggatgttaatgaaacatacatggtannnnnnnnnnnnnnnggtaaaatatttccaacattaatttcattgacacttatgctcccatagttaagttcaataccttaaaactattatttgctcttgctgccattaaaatttggcattcacatcacatggacataaagaattcttttctccatggtaatcttaataaggatgtttacatgaaactacctcaaggttacactccaaaaggagtaataccaacaaatgatgtatgcaaattaaataaaatcctatatagtttaaaataagcttcccgacagtggtatgctaaacttagttccactctcctataacaagacttttgtcaatctcaaaatgatcattcataatctattaaacaaacatcaagtgtattcttagccattctcatttatgttgatgacaatattatagcaaataataacactactagactaacaacattcatttaaactcctgatgctcagtataaacttaaagatcaattttaaataaagaaaacaacaactataagtaaaatatataacaatcaaagacagcaagaaaaataacatcataacaattataatacaactataaataaattataaaatagccaaaaaagcaatatatttatttttactgaaaaatatttttgtatataaaaaagttcaaaatgtaagaatgaaaaatattccatgttgacatatttttatattttttttttcaattttgttatcttttatgtaaaattttctttatttattatatttcggtagaattttcaacccatatgacatttcataaattttttctattaaagtatgaatatttttcatcttgaagtgatctaagtcattatattcatgtggtaacataaaattttatagtcttctcgaccaatcccgtgctaccacatgaccaactcagaagatgagtcgatctcaagatatatatcattactattacaaagactaataaaaaagagtttatattcaattacatcactacatctaattatgttttcaaagagattgggatgcttatcataagagaattatgttgggttttatgtccttataaaattacatattttatataattcatttattacaaagaagtaaaaatcatttttgttttatcaattttgttatttacatattttattatatgattaattgtttttaaaacaaacatttataaagtctcaaacatacagtaaattacaattatagtgacacagtcacagtgggttataattgtaattatatgttcaaaatacttttgtcttaagattaaatcaacacaccgaatattttttgattcgacaatctacgagatgatatgcttacacattgtgatgtcttatttaggacattgactaagatatcattgaatatattttgttatattggacttgacctattgattatttataagataattaagtatcattacactactacaaaatctgaaattctcgaagactttacaccgtggggtaaagaattctcaacggtctataaaattttcacttatacgagcgtcgtaaatattgagtagaataggcgatggtagaaaaatgtcgaggaaaataattcttgatggttgaaaattatcagttatagtcgatacaataggccacagtttaaaattatcgctatagtgaattctcccaaaaaatatcatcgtcttcatccttctcaaaaccaagatgggagtttcagttggccttaagagccccaaagagtcgagatttgggccacggttctgccgaaaccacaaccctgagatctttgaagatttgtgaaatacaaaaatcttaaaactacataaatcttaaaaaaaaaatagtaataataaagaagttatgagaaagagtggacaagagagagagagagagagagagagagagagactagtgacagcggtgctcgtggtggagcttatggccgtgttgtggccgactgtggtagagcttgaatgggctttcatctatctatgatggagctcgtgaaagagagagcgagagatgagagacaagtggtggagcttgtcgacctccgtctatgagaaagagagaggacaacggggagcagaggtcagagagagagagagagacggtttgaaaatgaatagatttgaaaaaatttagatctgaaaacgtgttacattagagcgacagaaaacacattatctaaaaaattttagatttgaactaaaaatcgtggcctataacactgtagtataggccacaatttaaaactatttgttatagtataggtcatggtttaaaatcctcagtaattctcctttaagaaaattcataatttttaaggtacgcttaaaagctattgagaataccttacgagtgtttaaaactgccagaaatatccaatttttctcgacgattttaaacactcacttaattttttagcgatgattcctcaaaataagtatttttaagactgtcgagaatagtgatagttgtagtagttttattattttatctaatcatatcacatcgttgaccataagtaaattcgatcttaattttaagtgatgaatattctgctaattgtaagtcttttgatttgtttgttatcgacttactacaaactaacccatacttacatattgaagatttagtgatataattgatgagagtaattatcatagacgtgaaatctataagttcggtttaagaaatgaaatgagaatttttttatagctagattcaagtgttaaatgatagactgctcatttttgtaataatttacgagaataacacttctaaggaggtatgcgggagtttaggacactacaaaaaatcttactt

SEQ ID NO: 24115 - DNA, 3867 bp, Cannabis sativa
atccacataattattaatatttataacagattcactatagtatgacttttgtattgaggcaggcgggtccaaaaaatactcattggtgttgtcatttaatgagtcagaaattgcttgattgttggtagattgtggtccttgagatccattattctgatgatgggttggcaccgacgataatcatgggttgatgagcgataaatacaataatatcttgagtttcttgagatttgctcctcgtttggtccttcccttgtatttccagtacccttggttctcacaacttttgggtctttaataatgttgggattgttacgaaatcttccaggttgtggcgtctctccttccagattagagctcaactcaaattcttccttaaacattagtgttagtcgttcaatctcttcctttgcatggttgtacgaattctctaattttgctgcatagaaagtcaagttataagctaatgaagtgcgggatccaaacctagccatctcataaatgtgttgttgttgtggtgctgtctggttaaaatataggtggagatttgtctttgcagttttgctctatcgttttatgagaagagtattaggaattcttctaatgtttaatcttttcattgtagcccataaatgtctacaagggcacccctgactttcatatagcatgcaactacactgtagtgctcattggccttcaaagtaatgaacttggtactgtactttcagatgctgaaactttccaatattgaatatttgccactctccttcgtcctcttgacctaagatataataattattctccaaatcaagctgatcaacaactttatggtacatatttcttgtgtagaattcaacacattggttatagtatgtggtcaagcatgtaagattaggtgggtgaggtcgagtgcatttgcttttaaagtcatttgcagtctcattgtgcctgagattgagactgtcatatctatggttgtgaaaaattcacgcaagaaataattcttctctaaaaacctttttagagcggagttgatcaattcacaacgttttgtcgttctcattcatgcgacgaatgaaccccttaaataagtttctgtccactgtttttttgtatcaaatgttatttggcaccatttattatctgttagttaaagcctatcaatgacatctaaccattttgcttcaaattcttcctccgtgtagtagttgtgcatcatatctttaaatttttttaagaagatcagatctttaacttttttggaagcatttgtattgagatgccaagatcatagatactagtattagtaaaagtgttatagaggaacactaaggtcaaagaggtgacttgggagttagaatttgatatgaggcagaaatactctgagttgttcaggtaaatttcaggacgaaatttttataaggaggggataattgtaatatcatgagattagtttatggattaacaatcctaattaaagtgattaaatataaataagcgataaggaattatactattatataatgagagaaaatgagggagagagaaaagcttgaatatatttccactgaattgaattgaattatgagtacagtggctaagatggtttatattggctgaggaggtgatcaagttagttagaacaattaacttgtgtcagctcagccttaaccgacttcataacaaaaataataataaaaaataaaacagaaaataaacaacactaattctaatttctaatagcccccctcaagttggagtgcaaatatatatgacacccaacttggatacaatgttggaaaaaggagaaggcattagtgctttggtaaaaatgtctgctaaattctgttgtgaagatacgtgtagaagtttgagggagccttgctttctcgaataaagtggcaatctatctcgacatgtttcgttcgttcatgatagacagtgtttttgctaatatgaatggcagctgtgttgtcaccctagagcattgatgggattttgggagagatgccaaagtcttgaaaaagggcaaggatccaagtaacttctaatgttgtgttttccattgcacgatactcggcttcagcagaagaatgagagacgacttgttgctttttggatttccaagagatgagagattggctaaggaaaacacaaaagcctaaaacagatcgtctggtatcctggcatgccgcccagtcagcatcagcaaaaaaggaaaccagtacattagcttgagataagctagtttctgcataggctgagactgttggggaggtgttggcagggaagaacagcctttgtcctggggtgcttttgaggtattgtaatactctgttggtggcttgaagatgagggacacgaggtgtttgtagaaactgactcaaatgattgacatcataagtgatatcaggccgtgtaatggtgagatatattaatttgccaatcaagctttgataggcagtaggatcagttagtaatacccctttatccttgatgagtttgaggttgcattccatgggagaggatgttggtttagcacctagagtactcgtatcttttagcaattgtaaagtgaaacagcgttgagaaatagatatccctttactgatgcggcctagttcaaagcctaggaagaatcttagagaaccaatgtctcttaatttgaatttgctattaagagaaagcttaaaagtggatatgacatggtcattgttttttgctacaacaatgtcatctacatatattaacacatcaatgaacatgttttgtgtttttttagtgaataatgaattatcagatgatgattgtgagaagccatctgtgagtagtgtggtgctcagttttgagtaccatttcctagaggcttgctttaggccatatatgctcttttttaagaggcaaacagagtcgggggagcagtatatcctggagggagtttcatgtaaacttcttcttcaaggtctccatataggaatgcattatgaatgtctaattggtgaacattccaattgttcattgcagcaagtgcaagaaaatttttaagggtgttgaacttggcaactggggcatatgtttgggattagtcaagtccttgtcgttggttgtagcctttggctactagacgagctttgaatcgatctacaaccccaaattggtcatatttaaccttatataaccatttacaacctatggctttttgcccaggtggtaatttggtgatgatccatttgtgatattttttctaatgcctgtgtctcagtatccatggctttaagccaatgagtgaattgagaggcttcaacatagtttttgggctcaacttcagaataggctactagtacgccagccttaaactgaggactaagcttgatgtaagagaggaagggctcaattgggtgagccgtggaggtggtgtgacaaacatagtcttggagatgagatggtttttttgttatcctgccagtttttgtggagggttgatgagggagatccgaacatggagctgaagttgtgggattaagaggtgtattggatgaaagtatgacatgtgggaaacacaagtcaatatcagagtttggtttttgtgatagaaaggggaagatgttttcatggaaaacaacatccctagaaatataaatttggcttgtttctatatccaacaaggtgtaggctttcattccatggggatatccaatgaatatagtgttgggattttatgccctaaataaaacccattataatccaatctgatttgttatcaatgagacattggaagtgatttatgttaacatgtacttttcatgtttatggtttgatatatgttcaaaatctgttaagtccagaacatatagtcattcacaatta

SEQ ID NO: 24116 - DNA, 1666 bp, Cannabis sativa
agggtgctacaatattagatgaactggtacacatatcagcttggggaacatatggagatgagtctgatcagtggaacaattcttcatggaacccggatggacattctagctcaacggtatgctcttcttgtttttcaactaactatatgtggtttggtttaatattagatacctataactgcatcgtatgtccttaactatgattgcttgtttggctaattatgatttttctctctcaaactttaatatatattaaatcatgtgtctcgaactttttaggtcgttaaaaattctcttgaactattgagatttcaattttacgaacgtgtcaattgtccatgtacaaaattttaccctcgaagtttgacagataataaattctggcctttgaactttcatcaacattagatgttcgttaataaaattggtagaaatcctttgatacaataatatcaatagttcgggagaaatttttaacaatctaagatttcgtgggcagatttgatacattttgaagttcagaggttaaaaattctaattagtcttaacttattgttttctcattagtttcacatagggaacaaaaattatgttcctactaaaaataaatgaagataaggtaaaagctaataggaacaagttggtgcatttttgtgggagttggaaatgtggacatcttagaatagtctggtaaaaatgtcaaattgaaatcagcttaagtttagctatcagtttcttgtaatctgttaaccaaaaaatgaaagataatgataattatgttccaaaaattgatgacagttaaaccttgtctggtgtcctagcaggtttacagcacaaatcaatttgtttcttctcctagtgaagctataacagtggctcaagaagttgtaaaaactatgctagccaaaggttatgttttagggaaagatgcattagtgaaggccaaagctttggacgagtctcatcgcgtttcagctaccgcagcagccaaagttgctgagattagcaacagaattgggctgacagacacaatttattcaagtatggaaactgttaaatccgtagatcagaagtttcatgtttcggacataactcgatcagctgcttatgtcactgggacagcagctgtagcagctgcatcggtcaccggaagagctgctatggcagctggtagtgttgtagccaacagcacatatttttccaagggagctctttgggtttcagatgtgttaaattgcgccgcgaaagctgcttccgaattaggaagtaatggccctaaataaaagtcttcaagactaaagttattaatgtcctgtttggctgagcttctactttctacttttaacttctcggaaagaaagctctttccgagttaaaagctgaaactcactagttcaggcctaaatagcaccagaagtgtttttgggcttttcaaagcccatctgatatgaaatattgtttgattcattgatactctaaaattgtacttagcaatgtatacccttttggagtctctcagtcaggactgttttgaaagtttaataatatattgttactcaatggtattttatacaagtcaacgttgaccttgtgactagtttgtagttgagctccatcatctaaaatatgatccaaaattatatttgactctccaaatagaataaaa

SEQ ID NO: 24117 - DNA, 6904 bp, Cannabis sativa
tctatacccattaagaagtgttctatgatttgtatttgaatgattattttgatgatgatgcagttctcaacagtgaaattatttcactaaggtgagtattgctgtattggtatgatagctagaaactactcttttgatgtagttgttttggctttgtagccaattatagacctgaagggatagaagctttggatatattgaagagtttacaactgtgaagatagggttttcttcagggttttcttcagctttttgtggggtagtgaaattgtctggttgttatcaatcttaataaggaatgatccaactcttactattaagcaatttcatgacatgtctttttctaactgtccgagaattactagtggggctgcccattcattggcaaagctagtagtatcaaaggaaaattaatatggataccatttatcggtcatattttccaaggttgtatttggttgtttgggcttaattactaattagtattaaaatgaacatggttggttagttgtcaagttatttcttaaaaaaatttcaaggggaatgatatacgataaggcaattttatagcacttatagcacaccccttaaaatagaagttatcgtatatttttaattctgtatgagagaaattttggagtttaatttttttttaaaatcctatatgttattttatttaagatttcttatcatttttttacatattttgaaatagtttataaaatttaattattttattacacacgtaagtacttttttccttatacatgataaaattttgtatatttttatttttagggctataaaatattctaaaactgtacagcataaaaataaataaataaataaattatccaaattaaacagatagggactacgtaccataatttttttcaatgttttaattttctaacttttgaaagtatccggttctgattgacatgaacccgtgctagaaattccagccggctgaatatatttttcataataaaatcatgcttaggtgggaaagcatggactacgattgtgactgctgaacgaacctatttattgctcttgtaaggctgagatgatgaactttgtcgtttaatataactattatcagataaagttaaatatgttccttgaaccttgagggcttgtgtatatgattcacactaatcatttcggaaaccaaatcgaaggtaaatacaaaatttttatttggaacgctaataatatacatttacaactaagaaaaataaaattaaagaatagtaattggagttactaatgtccattaaggaagaaaaagtataatgagaaaagtgaagtcaatgtgttcggctctcatttgtagacgctagacacagaagatttgaaatttactaactcccatccctttccgtcgtatcaaattctctctactcatctttgtcctcatcttcatcatagttgaatggtaatggcactgatttgaatgccctgtacttgcccacattgttcaaatgctcattctccaatctgataaataacacaaaaccctgttactacaaaattgtacatatttatatgtatccataagagtgtgtgttcttgttaattacctgaagaaattccaaataccacgacgaaggatctcaagcaatgcaacaatggctattaaggtctgtgtatgcaagaaagagacctggaaattgagcacagtttgcagccaagcaaatctaagcaacacattcatgccctgcatttatcgaataaataaaatcgatcagtaacagtaaacaaatgaaagttaatttggcataaaaaagttaagaaaatcccatatttcattataacttacaattgcaacaaaataaacactgttgtaagggactaaaagcttgtctctcaaccatcgattcttagagttacgctgaagaaggccccagtcgatgaccaaatcccagtaagttgaaataacggccgcagagattgagaacacccaggccgcaactttccagctcagtgaatggttgatactatgcgctgttctgacacttacagcaacaattgtcaagaagtacttaatgccattgtaaccttgcattgggtccttctcttcgaacaaacgacgaaggcactgaagaaaataaataaattgctaatgttcagtataatttcataataaaaacagtttgaattgagaaattaaagaaaaaagaaataccaagtttacctgaaggaggcgagacatgtatgggacagcagcaacaagaaaaagaaaaattttgtatacactgtggtctttgcaagttgtttctctgtgtttgtagtcaccccaaccgtagtagcaaatgtaaaattggacacttcttaaagcttgaacctgactcgttaactgatccgccaataagaaatcgggtagtgtaacctgcaatagaacaaagttgtacacataagtagctttctttaaagatagaaaaaaaaaataactgagaatgtttgataagcaaaaaatattcttaccttgtacagaggagcaaggagtccgtggaacaagcaggtgaggaaaaagtatcgacttgatcgatatgcgatgttaaaaggacatagcataaccgcagtaactaactgcaaagtgaaaaaaatagtctttcagaacaattaatgatacaatgataaatacatgtacatgtgttatgtatataaatgaagctgatcagatgttttagtttatttgtaatgaaattaagcccttaccacaagcaacaagagtgggagaagctctgttagagctttgtaatcttttgtttttgggtccatttccatgtcgagatttgaaagaacactgccgagagctaaagcagacaaaatgaaactgggaagcagaacttctctgtagcccaattctgttccttgtttgaacccaaaaatgaaggagtagttgactttatatttcctccaaaagtacacatttgcagcatacatgatcatatgcatgacaataaacgcaaataatctgcaacacaaaacgtttcatcagtatatttgttgggaattgatagaattttagttaagcttgaaaaactaattcatgacataaaacttacatgtacaaaggaaacatgttttccatgtactgatttttccctggttcctccatgatattacgagcacggatgatcaaaataagggctagtattagagcagctgtacagccagcaaagaaacctgtagatattatccaataaatacaattagtatgcaagaaaagaaaattgttactgaaatgggtattcaataatcgaaataaacaacagtattgaagtctaaccagtcgaaaatgttgttctatgtgtttctctttttgcttttggccttaagatggacatgcctttagtacggtttgcattggagaaatgcttgatatatgtagcttcaaccctttccataagcttggtaacctgtatatataaatatatatatgagagagagggagagagcggcacaattagttagagtaaaattataacaattttctgataagattaacacaatactggagctgtgacttaatgcgtattgtactcacgtcatcagagctgcccaggtatgagttgtccaccattctcatgtaagctttagatgcatctcttgaagtaatctgcgaaagtgagaaaatccaaatatattagtaatatgccaatgtgaagaaaaaaaatatggttcacgagtatatggatattagaaagcacatttttaatttttggtaaagaaaagtattaccttatcatacttcttcatgatctttgagaatgccaaggtattcaagaaactgagaaattggtagcataatggttagccagatagttagttaaaagaaaagacaataacataatccaagaaagacaaagcatcaaaactatctctatttacctaaagctctttagaagcctaagcttctggtaaaactcaacgaaagctttcttaagttgatcttcaactctcgcaagattttctctgttaaaagtcagctctgtctgcttaggaaccttaagaatttttttaatggtggaacgaggagtctcctgtgtgtgattcattgtcacacgatcaagaatttccaatggagctggtctagttctcctatcactccttggcaactgaactgcaacactttgggtcacagtttggctctcagtagtactttcgctcgtcttctcaatctcatctttatcatcatctccattagtttcttcagtttgctcctcatggttgtttgatcctccctcttcaattttgtccatgaaatcaactcgtcctgttacaagaaaaaaaataaataaataaacattcaattcataactaaaaaattatatatatcatgtcagataaatttggtaaacttactgctagctcgaatgttactgggagtggtggcggccaaaacagcagttgaagtagcaatatcagaagcgagacgagtcatctccacagatctgtcaaaccagcctgttggattctcaactttaattcggaaagcaatcaaagcatccatttgtttgttgagcattgaagcttccttcatcacttcgtccactttggacttataaaaccggtcgactttgttgaactcctcgtctagccttcggaaatataccagctcgtactctcctccttgctctgctgtcctgagaaaggtggtatggtaaccatgggagccatcttctctagttgagttaatcagaatagcttggctttcgatgtctgggctggtggtcggcgaatactggtgcgtgctgaattgtctgtgtatcagaccactaaaagatctgtaaagggtcggccttctcttaagccctgttggcactgctgccggaggcatatttttgtgtctgaaatcttggatatctttcaaaagggttttcagaaattcatagttcatgtaagcttcttgccattccggcaccatttggctcgaaaactcctttccgaacttcatttttctacctttttaacaccctgggtagattagtacaactttttgctagaaaaggaaatcctttgggactaatcttgtctggtgggtgcggaaatatttattggctgagtcgttttcttcaagagataaacatagagaagaataaacctaagacaatgttggttgtaataagatgaaagcaacagagagagatgatggtctggtttagatggaacctccctatatatacacgtgcatgtgtatgagagaagagagggtccgagtctgagagaggcaccttttctttattgttcgcaggcacaggtttcttcgtagaaaattcaaccaagttgggcattcaaagaaagaaaaaaataaagcgtttaaaggggaggggtttcaagatgaacaagccagagggcttctctttagtcaaacttttttacctgctacagtagcactagttgacattattcgtattacgaagaaaaagtgtggaaatttttggacttctgtcataattctttatattttgttatgtttctcttgcctctcgcacactacagttattatttcatttcaccatctgaattttattttatacatattcacacatactttttcagttttaactataattaatatccatacagtggactcgtgggtagcacttagccatttatatggggaatgacgaagctagttactaaattccaaaccataccaagctactccaaactttatttatgtatttttttaagctttttcttatcaacatgaggttgatgattgcatgtttcactgcgctaaataaaataaagattaataacaaggtttcgatattagtgaagactacttaattataataagttggaagcaaaacgtgttaaatatctgcaataaaaaaaaataattacagagcagtggcagctgtagaaacgccaactttggttgctgctaacaatttactactactgcttaatggtaaaagtatctgtgcacacataaatcaaggtgaggcccaaccttaccgctttcaccactttttgattcgaggtttaattagatatatacgtgtcaccctcgccctcattcaatgcgaacggcttacgggctaagtattattttcagaccaaccgcacctaattgttttttaaaaaaagaaaagaaaaacagattgctcaacaaaaccaccacattttcaattcctttcttagctttatgcattaaatattaagtttaactaattattaaaaatatataaactgttaatcgtgttggacccattataccacaccctaacttttttctgaattaagaatgaaaccttgaccttatcataaaaaagcattgattttttttttataattatattaattattattattattaaaggcgactacacagtctttcttttcttttttataaagaaactttcaaatttccatataaaaatacagtggctgatttcaaaaataagataataataataactagagtggcgactggtgacatgtatcctcggtcgtaggggcatatgcctcttcaaaatgtttatttttcttatatttaatatctatattagtacacattttttttttaagaaagtactaatacacctttttaacttatagttgtgcgtattttactctcttactatttatgaacaaagagcttttttcttcctaaattattatccttgtaaaatttatcaatgataaaaattccattgaactataataattgcaaaaagtcgttaagatatagttgtggctagaaatctcctcctttaccgcacttccatggccgacgacaatctcctaccactatctcaatcgatttctatggccgatcccataattatataaaaatgtgtgcatatatataaactagtaaacatcctgcgctttgcagcggatatataaaatattttaaattatatataaaaaaataaattgt

SEQ ID NO: 24118 - DNA, 3022 bp, Cannabis sativa
ctctctctctctctctcctagtctcacacgacacacactgtatagtgaagtgtgagattgtgataaacactatctcaattacagtatctcatgagtggagaatatattataatacataaatatactcatcctatagaatctaatagctcactctatttctaagtgttgaggttggcttggaagattgtggtgtgaactcttcaataatagtcttggattggatgatcgtaattatactaaaagatagcgaggatctcctgataggctaccagagatattgtctctcttttcagtagtgtagatttaatctatatatattacgttgagatctttagacttatggttcatattggataaaactatttttttatcaaacctgcttctacttttctaactctgatatggaccataaaaactaacaatgggtatcaagagctatttttataattatatagattaaatattgggttggatatttatgcattatatacatgttgatatattttgaatggatggaattaattttcttttggatgaatttgaatcgttaattatatgataaaaatttgattaggaattttataattttttattaaaaaaattgtacgccataattgtggtataaattttgatttattttattattaacatttatttgtaaattttgttaaattatgtcaattcaaaatccgcacattcctccattgatgagtgagctcgggcttaaggtgtaaagcctgacctcattgagacaatattatttaaacttcgaacgacgagccacgaacctcgaagggcagcgacttcaagctttgaggctcattgggatgagacacgtgatttttcacgtgggaatgcatggcatgcatggttggaacccaacgtgaaagagagaggagaacctgattgggttcaggttggatgacatccaccataagcactgtctggttttgtggctgcttggacgaagtcgactggcccttctgggccactggttgacattgacgggcatggaaggaagacctctagtggtcccttgttttgggctcagtcgaacaaacaattaggtctcacgacccgactacaccaaactggagctttgctccatttttcctcctcccactaccagtcaagccaccgataacctccctcttcccttgccacctcatggccgacgatgacctcccaccaccaccatcaatcggcctccatggtcggcccctatatatatgtgtacacatacatgtgtatttatataattttttgattttaataatctaattattaatttaaaaattaaaaatatgagatattgtgttcggttttgaaatgtgcattattcttttttatcttaataagttaaaataaagttattgactcaaaaatctggactggacttctaagcaacacctgcttgctagtttagcgagaatatgaaaagttacaaagtaattaatgagagacacaataatttatagtagttcacccctattttgcaatagtaatggggctatgtctactttgaccttttatttctcacgagatggtgttacaacaactgtttaagtatcagaaactttagactctacagagagaaactctgacattgtggacagttttttgaatgtgaattataaactaagggagctctccttttataggtgaaggtggcccacaaaaataggagataagaatacaaataaagtgctttccaccattgatgatgatctaatggtgaaatttagctttcgggaaagatatttaatttttggtgtttggcgggtcccgctgcgagatactcatagtttattttcgtaactcccttgggggttaattgatagcttcagaatttcagctagtgtgtgaggcatgaatttatagagggcttaaaaagatttaaaattcaagtcaaatcgcatcaatcagatgaaaattgagtgagttatggctgttatactgaaggcactgcccaagttgatatctgatgtcaacctaaacgttgtaaaagggtagaaacgtctaagggaagtcctttgagatgcccaagtgatgatttgacactccttagtccttttatatgttttagtgaagctggtcacttgttcttggagatattgctattttgcagaaacggaagactcaaaactttcggcttccgaatgagccaaaattaaagttgtgaatttggctgatctgacttcaagggtcattgcacttgtgaaaaacttgacggatggggacaacaacatcagattcgaataagtagaacccaacgaaccaggccaaatgttgacctggacgttggggcctttaaattaagctcctgagattctatttttgatactttcaaggcttctaaggcttctaaacttgaggatggctctccccccatttttgaccacgccggatttgatggttgcatctaatttgacattcgaggttgattgttaacctgggtgctaggcccaacaccgagtcaactaaggcattgggctctatttctaaggacttgagtttgtggttttctccttgagtgtacttgattcgtcattatttctgatgacgataaagattcctagagcactttttttctgatctgaattggaaacagcccaagttgacaaaaatgtcaacatgggcgcaaggcccactcctaggcgtcaaccttggcgctgggtccctcttttgccccttcaaaagtgttgtttagcccctagaaatagtttatttttaatgtttattgaaggtagagatgatgctcgaaataattttgggagaactccattttttgcggcctaggttgaccaattctcaacctaagcgcagggccagcccaaagggtcaacctgggcgttgtgcccagaattggttatttttccttagaaaggaccttattttccatttttgatgaataaaatttcaattcaaaagtcagatctttgatcgaatgcatggacgacatccaaattgatagattgtcaacttggcactgggtgctcaaaaatcaacttactctgaattt

SEQ ID NO: 24119 - DNA, 2633 bp, Cannabis sativa
  modified_base (862)..(881): a, c, t, g, unknown or other
aaaaattataaaaatatttaaaatgtcgtaaaaccgtatttttacatttttcttttatcatttatatataaatatatatatataaatttttttaaattatcaagttttttctcgtacatagagaccaaccacattaaaaaaactggtccattggcagttggataaggcccaccattaaatgtcactaatgattttgttgttatactcatccaactcatatggataataccaaaataatttcaatttaatttgtagataaatatgaagggtcaatagataatttttagcaatgggtaggagcttgggccaagttagaagcaagattagggcaattatatgttttacacatttaattttattaattaagatttttattttctaaatttttgatatgtactaaatcatacatctttttctaccattaaaaatcttctccgactttgatatttatcatattatgcctctcaaagttcgatatgtactaaatcatattctttagacttttattcacgtttaactttcctcactaaaattagataaaaatctttaaatataacaatctcattatcatagattttcataagagaagatgaatatgcaccaggtgaactagacatatacttaaggtccccatttaaaagaaaccaatttttcaaagatacattttattttgttatacaaaaagaaccattctatacattatatatataaatataaagtaatatacgagataaatttaactctctcttataaataaatacctaagtttaatttttaacgataataacaccaaaattatatttttgaaattttcgtaagtacctaattattaaatattttcattttcttattagtatatttnnnnnnnnnnnnnnnnnnnnaataaaaatttaatgacttaaaccaatcagagattgtcacgtgataatctacttgacacttaacaactaagtacctacacaagtttcaaaattataacttaagtatttatttacaattgaaagttaaacttaagtatttatttgcaaccgaaaattaaacttaagtatttatctcgcaaattagtctaaaaaaataccatattttatattgtgcccccaaaagttcaagaccagccctgctcatatcgctattaatgtaattaaatatcaaatctcacttaagttaattcaatacggaaaatttacataaaatactattttaactaaattttttatacttttacatttttacaacgtccaataaaaacatgaagccaacaagaaaatcatataaaaagtaacagagcactaacagcacaatgtcaataataatatacaaaaacaaaaaactaacaacaaaattaagagtataatataaaaataacatgaaaacataaaaaaattgtattttctataaataaattcttaaaaaccataacaatatttaaaattctatacaaccgtaaaaaaacagaatctgtctcaatatatgaatcagaaacaaatagaggtaggatataagacacccgaataggagttttccgaataggagttttgagtgtttacaagatcactagcttatgctctgacccgagtagcatgagacatgtgaaatcccgtgtgaatcaacaagtagattgctattccttcaatcaaaaggaactcagatctatctactttaagaaggaacatggatttatgagaactcagctgaccagcttctatttataaagctctaatgaactgttcaaacaaagatggcatctttttcgaaaatccatatgatttggttcatacctattaacacttagatgttttaatgaataaatttaacaaagtaactttagaagaactctgtgttaaggaattcagctaattcaaaaagaagaaaccgaaatcgactaataaagagaaaggcatacacacatttatgctttttttcgaaaaccggtagctaaaatacattaacaaagaaagttaagggctacccagtttccatttcactatagattatagcttaatacaatgatctttctcaagtagtcatatgtttatttcaaaaacaatatgaagtttaagcataagttgattttgacattacaaccatcacaatcaaactcccaagaagctaaagacatcaacaatggaagaaaataagggttatccatttgccatttcactatatattgtaacatgaaacaataatctttctcaagtattcatgctaatttcaaaaccaccccaagatctcttccccaaatatcaagtttaagcataagtggtttttccattacagagtttgggacttaagctaaagacatcaacaaaggaagaaaataagggttacccattgttgggattaaattcacttcatcctagtcaagtcagtagttttatcttgacacttactggttaaaacgaaaaaaactagttagttataacagttgcctttgacaccaacttaaaaagagcctcaccaatagctataaatagggtctgtctcaactctctcagggatctccaatgctcatacttgagaattcagagtctagagagagattgtccaaatttacagtgtgtatgaagggttgtatataggtcacttgtgtatttgatcaagtgttccttagtgtgagattgaatgtaattgag

SEQ ID NO: 24120 - DNA, 1657 bp, Cannabis sativa
catagttgtgatgattgctctagtaggtacacttggattcatcttataaagaataaatctgatgcccaaacagccattccatcttttttacagcttgtcaaaactcaatttaatgctcaagttaaaggcattaggtctgacaatgctaaagagcttcaattccctgccttattttcatctctaggcatcatgcattatcattcttgtgtgcaaagaccacaacaaaattcggttgtggaatgaaaacatcagcatttattaaatgttgctagagccttgctattccaatcttatattcctataccatattggggagattgcattagcacagccgcttacctcataaatagaactcctacacctaatctcaagcataaatctccttttgaagttcttagagataagcctcctagatatgaacatttacgagcttttagttgtcttgcttatgcttttactttaggggctgctaggacaaaatttgcttctagagccattccttgtgtttttatgggatatgccatgggaatgaaagcttacaaactattagaccttaacacaaataaaatgttctattctagggatgttatttttcatgaacacattttcccttttgtgcaacatggttgtgtttcctctgatttcttgcaatttttttcctactgatgcatctaagcagcaacataatgatttgtctggtgcaccagtagctaaaattgctacaccagtagctaaaaatgctacacctgtagccgattctgctacagaatgcaatgatcaacaaactgtgattcccggttcttcatttcctactgttgatcctatttccactgatgtcatgaactcaccagtcgcatcttaatcccctttcattgaacctgatgttgtttccataaatgaacctgttattacaactcggtccactaggcaggttcataagccctcttatcttcaagattatcattgttttctttccactaacaatgtgcaatctcaggtgtcaaaggcttccacatctcatcctctctccaaaatcattgactatagcaggttgtctcctcggtttcgtgctactgtgcttgccatttcaagtcattttgagctagaatatttttaccaagctaaaggcattccagtttgggatagggctatggatcatgagattgctgctcttgaagacaatgggacttggattgtggttagtttacctgctcgccaacatgctataggttgcaaatgggtttacaaaataaagtacaatgttgatggttctattgaaaggttcaaggcaagacttgttgccaaaggttatagtcaacaagaagggattgactataatgagacttttgctcctgttactaagcttgtttctgtcaagctcattcttgctctcgctgccattcatggttggtgtctacatcaacttgatgttaacaatgcttttctccatggaaatttgcatgaagaggtttttatgactctacctccagggtatcgtcctaagggggagttgccacctaatgttgtttgcaagttaaagaaatctatatatggtctaaagcaagcttctagacaatggtttgagaagttttccacagctttagttgaagaagggttcaagcattcagcatccgatcattctttgttcattcaaaga

SEQ ID NO: 24121 - DNA, 3132 bp, Cannabis sativa
atagtttatgttgtggcaaattatatgtttgggtttttgttatatgagttgtgtaattatatattttatttttattaattatatttaaataatagttaaaaaaaattatatttaaacaagaacatagtgtaattcgattattgaatctaaagtcatcagctatcatgtctaaatgtaaactcatgtaatttttttcactattatctactaataagaaaaatttagaaaaaaaataatatgaataaaattaacaaaaatttatatatatatatataaaatgaataatagcacaaaaaaaaaaagattaatatcatatgtatattcttatagtcttctacactattacatatttactaataaatatataagaagaaaaactaaaaaaaaaaaataagtaaataaaattgaaaaaaaaaacactagaggaaaaaaaaaaagtggtaaaaaaatatacagaagacttaaaaaatatattttaagactattaaaatagagtaaaaatgagatatttttttaagaaaaaggaaaacaaaaaggtgagaggttaaaaaaaaacacaaaaaaaataaaaatatatatacattacttagatccattaagtttgagaaaatatgaaaagagtaaagataaaattatcataaacagaaaagtaaataatatttttttaaaaaaatttaaattctaaacatcaagttttaaaaaaagtgaaaaataacatataattttgaatataatttacataactaatatttgtatgtattaatatttattttgttttaaaaatataattatatttcttgttaaatttttatgtcacaccctatttatccatcctataaacacattcattgaacatcatactaaattttttaagaaaaatgttaaaatggtgcatactacccttataatgcgtaatattgttattggttcaatttaatattgagtcccatttattttattttattaaatattatagaaaattgctaaccacttatagagtatgcacctcctagtagcggtaggtacattagtacttcctagcgatgctcattttttaaaaattgacagaatgataattgctaagaggcacccatagtgcctaatatcttatgaaatataatatcactattggggaaattctatattggatctcactattttacttcattaaacattataaaaaaaccgctaactaattataaaacgtcaccgcatggtgatattaagcactttagtaccccatatcaatactcaacaagaattttacaacaacatcattggtcttgaaaagcacaagtgaagggacctagtagaacaatagacattccctaaaaaaatctttgtaataaaagtctaaccttggacttggagcatgagaaaaacacagaatgcatgttttttttttttttgttattggtttaattcagctgccactccacagcatatgccacctatttagaaccctattctttcaatgtaaggacaattaattaactgtgttgaagaagaaagtgtaacaaaaataatgtgcttaatttgaactcttacatgggttggtttggactttggaccacaccaatttcctataagtttgtactttattaaggtgttgcctttctagaaatcttgggaatggaataatattctattcactatgcacaaacaaacaccaaccaatttattgaaaacagaagacttttttttcttttcttctttttaataacccaaatgcccataatttaattgttgaaatagtaggatttttgtaataaacattgttattaggcacaacatctctaaatatatcattttgcgattgactagtaatactccttaaaagttattacaataaattatatgaggtccagtacttaattgaataaatgacaatattaacacatagtatgacttttggcatttttcttttaatataagtattattattttaaggagaaagtagtttaattctttgatatatatatatatatatatatatacatttatagcatagacagaaatatatttatatgataatgttctctctcacactttacaaattaattggagtatactgtgtacaagtttaatcgaatagagtacaacccaacatgagataaagatgttctcaaaaatttagataatagaataattagatcatgaaaaatacaacccaatttattttgatagactaaattaatgtttcaacccatttatacaacccaatttactttaaataaactcgaggtcttcgactcaaattaaatctcgttagggtggagagtgtcatcttatctttactcgtttgatatttggggataaaattaaaactgaaaattttattatgtaatttttttataattaatttttgtgtttattttaataatgtaaatatataaatagaaagctgaaagattttacaaaattaggagagagtgagaatttgaggactataactgaaaaacacatttttctttttaaaacaaatgtcaagggaaagtctattttgatctgatttggcttatctgttaattattaattataattaatgtccaaaagttttctctttttgacaatctattatatactttctttttctttctttttttcaagtttggctagagtgtttacatcatttatattgacttttttatttaatttattaaaaacatcattactattatttttggataagaaaatgttgagccattgacttaaacaatctgagctgatattagtattggaaatgtttgtaggaggccctcttgaagggttattttgttaaattatttatctattttggtatttaagaattttttttttagtctatttatttttttataatcacatacgtagttatttaaggtcacttgtaaatttttaaaaattctgaataatttacagtactaaaaataaaatttaaataattacttaccacacgtataagaaaatcagtcgcgcatgtaacaaaatatataaattttattttcgatattataaactatttataattttttgaaaatttataaacaaatcctatataattataacatacacgattataaaaaaaaaaaaattaaaatgttgttatctgactatttgtattagagtatattattggacactagtagtatc

SEQ ID NO: 24122 - DNA, 5633 bp, Cannabis sativa
ctcatgtggatcattagagtcccttgctttggtgctaggaatagtaaaataaaagcagactttgttcgggtgagtgccatgattacttggttgcaatctataagtggtggtctcactgcatccttcttcatctcttaatgaaagtaccaaaatatttactgagattttcagaaattaattataaaaaataagaactgaagaagcaatattaaaaaagaaagactaaaaagagacaaatagttttttacgtcttggggcgttaattagccttagtcaacgaatttgtgttattcattagctcttagcgtgaaaaacttttaggaataccaagagtacatgttcttaagtttgcccgagcaagtatttctagagaattcaacccttaatccataggatccgatgggtattaatagtagtttgagaattagatttagtttccttttcccctctattggggagtttacagtgaataaaacacttgagctgtctcgtgtagtgcaacccacgaaggagagagtttgctaactagacagatggaattcggcttaatttggttaataccgtgtgctttgattatgggcaattgactgtgaattaagtagttgatattcgtttcaggaagtttcaccatttaatctgatatgatgcttagttgagatctgacagctattatttccttatttattcaaaagaataagaaaggaagctggaatggtctttcaagaacacgctgtctcactcctctgatctcatggtaccggacttgcttctaggaacaattcaccaatggcggaagggtatatggtcacagagatgggatacattcctagaaggacttgtccaaatgagcttggtccacttctttttgttgaggaacccactgatgggccttgaatgctgacttgaattccacgtgtccattgccagaaatgtggataacacttactaaataaggttctttaagcaattaacttttttttgcattcaaattactaatatatttacaataaaatttcctaacaattttaaaaaattagacatgttaccttaattaataaaactttaaatacttaataattttttaacgccttacaaaaaaaaaataataactttttcttctcttttcccattacatcatcttttttttttcttaatacagctagagacacaacctcactaaagagtttcttctttctctcaaatactaagatccaacaacaagatttttttcctcaattcccagacctaaccctcaagatggctcccatcgttcacgacatttgatagattggtatagttattctttcattgaactttagcatgacaaacagatggacaaatttggttatggttgacaggcgtagtcgatggaggaatgtgcgcctcccactcaacgagaaaaattaatttaccatcatattctcgtattttaaaaattatcttattttggcataaatttattgatgttgttgtgcttttgaaactgtaaattttaaacattgatcttcttctatattattatttggttaaagattgaaatttcttttaagttcatgttgattgatgtattttggtatttatttagtatttttgtaatacatagtgtaactatataaatttacttttgactaaataatattttaatatatcaaatgctcttttttttattattttcttgttaagaatttatttaatgctcatgttgcttgatgattatttttcccctattggttttaggtttctcacttttaagtttttgtgaaataactccaatgagaagaaaaaagaaggccttaagataccctcctggcccaaccatcgtttctagtttatctctttctatatatggaaagttcaaaaatcatcatataataatccagaaatggaaatagaaaaaaataagggacggtttggaatgatttttcaatcttctatactaggtaatctagctagtattcttatgcatgaagataataaattcggtcgttgtggttttgacaggaatcaatttgagtagaagtttcattttaatgagtttattttctcctttgtttcttttcggtagactcttatcttccctaagcctaagtagattcccttacgacacgtatgcattgtgtcaggctaagctaaaaaattaaatgagtaaatgatattttctactgattttattaagaaagattgagagtttagtcttttttttttaattaaagaaaaataatattatattactgtaatattttataatatattggaaatttaattttaaaatgaattaatactaaattaaaaaaatttatgattggtataagtctaatttttgtaaaaaaaaaataaagattttttccacaaagttaaatattatagttaaaaattttgtgtggtaaaatatttaattaggaacttaaatttataaatatatgtatatataaaaatctatatacatattaatttctaaaagaaaatactttttaataatttaattaaaaaaattaattcatttgaaattgcatagtttattataattatttaaattttaaatataaaaaattatcttttaatatatataaaaatttatttgaataatgacatttttttttttttttgacgagaaagcttcaggagaagcagttacaaggttggaactaaaacattccaacaggattcttcatcttgccccaatgcccttcgcgccagaccatgagctctgcaattgattgttatgcttatgtatcgaagatgaacattagggaaggtagataaaaaacatcttatgtcttcaacaacatccgagagagctgaaaactcaaccttcttactgtggactttatcaaccagcacttttgaatccgtttcaaccactgccaaagggatttgaatgttgatgcaccactccaaactggctcgtaaagacaaagcctctgccattgaaggctgcagattcccaaccgcatgaacagaaaacccggccaccaaattaccttgccagtcctgtataacagctccaaaacccatcttgctttgttcactattaatcgctgcatcagttcgaagcagataataattttgaggaactaacttttccctgcccgaatcctgcaaagtgtgagctccactacatctattaatattagacatagcttcttgataatctgaaatgaatgtgtcaatccaggcaataatatcagtaagggtcatatccaaatttgcaaataactttttatttctagagtgccaaatagcccataaagttgttagcaagagaattaactgatctttattcaactgttcaaaaccatttatcataaaatctttcacatcaacatgcctattagagaaataaaaacttcggagaggcgaggccttccaaatttttgaagctctgggacaatctagcaaggcatggtgacagtttcagtagggtttgtacagaaagaacaacaaggttgaggaatagtttttctaacaaacaaattaaggcctacagggagaatgtggtggaaaactctccaagagaaatttttaatcttaggttgaatatttaagttccaaagagttttccacaaggcattagaaaaagaggagttagaagaggaaggaggaagggaagcattattagcaagatgataagctgattttacagagaaagtacctgaattttcttggttccagataagagtatcaaccctttgagggcccccaattggaactttgagaatagacaacacaaaataatcatcaaagtagtgggacaatctgtttctatcccaaaatcccttattgtctatgaaaaaactaaccttatcaacaggaggcaaatcattacttctcaggcaaggaaattttaaacccggaatccaagggtcttgaagagtcctaatagagcaaccattaccaaccttccacagcaaacccctaatgagaagatctctaccccaaaggagactagaccaagtataagatggagaatgccctagcttagcctcaagaaaaccattatgtctaaaatattttgctttcaaaatgttggccaggagggaactaggatttgaaaaaacacgccaagcttgtttagcaagcatggcctgattatgggatagaagggacctgaaacctagaccaccaaaaaatttcgaagaacaaagagttcgccaatttttccaatggattttagatcctttccccattgatccccaccaaaactgagccattagtctttcaattttatgacagaatgaggccgggagtttgaaacaaggcattgtataagaaggaatagcctgtataacagcttttaagagcacctctttacctgccttggaaaacaacttgccattccagatagagagttgtgagctaaccttctgaagaagaaaatcaaaattagatttctttgaacgcccaaaacattggggaactccaagatacttactgataaaaggtcgcggttcaagtcctaaggaatcaaaaaaataagcagagatattagtaggagtattgggcgaaaatagaatggaggatttagcataattcactttttgaccagtggctaaatgatgggcgttaagagcttccttaagagcattacaagaggaaggggaagccacagtgaaaagaagagtgtcgtcagcaaaaagtaaatgagaaacaggaggggcggtacgagcaacggagatacccctgaaggatccgctttgttcctgaagacgaagggtggcagtaagcccttccgaacatagaaggaaaaggtaaggcgataagggatccccttgtcgaataccacgagaaggatgaagggagttcgtaatttgaccattaatactaaaacgaattgtagcagaagagatacaattgatggattaaactaatgaaattcaatgggaaacttgaacttattaagaatggccaaaagaaaatcccattccacacgatcaaacgctttctccatatcaagtttaagacccacccacccaaacttaccatgttttcgatgatttatggcatgaacaacttcttgagcaataaatatgttgttaaagataatccgctcagacaagaaggcaccttggaaaggggagatgaggtctccaagaacactcttaagacgatttgatagcattttagaaatgatcttatagatcgttgagcaaaggctgattggacgaaaatccttaagagaagaggcattggatttctttgggatcaagacaatgagagtctcattgagagaagaaaaatcagccatattattaagagtgtcaaggatgacagtagtgaggtcattccccataatatgccagttcttttgataaaaggcaggattaagtccatcaagtccaggggccttgtcacccgaaagctgaaataaggcctgcctaacttcatgagcttcaaaaggggagtcaagaaactggatttggtgacttatcaatggcagaaaggagatattgagtagcttcgctattagactcctgagacttacaaagatcaccaaaataagaggacacctccctataaatatcatcaaaagatgtaaccactctcccatcattacatttaagctttcagataaaattagtctttctcctaacagtagctttactatgaaagtatttagtgttcttatcgccagc

SEQ ID NO: 24123 - DNA, 2236 bp, Cannabis sativa
tagagaatggtgactcctagactagtattactattgaacggatgatccaatccggaaaaccaaataagattgataatatactattagtggagatgaaaaacaattaaatatactaaagttattcatcttatttgcaattgtttttttgaaaaggatcttatttgaaatttaatgttacatgaagtaattaaaaagctaataaattaaatgacgaatagggtgtttcagattatatatataatagaatctaagtggaattttcctagatttccacccattaatgtttatgtcctaatatttgtacgaatgtgtgttccttcaaccgatggaagggtcaagtgagaagtgagaagcgattcagatgttctaactcagctacatgaatttatattgcgcttatcaataatatataatatagttcgaaaaaaggttagttgaaaagcaagaatatcgatccctctgtgtcccctttctctttcatttaattcgttcgacaaaaattaaggaagaaaaaaaaaatatttccaatatattcaaatcaaatcattgtttaaaattctactgtacattttttttttttaaaaaaaaaacggaagtgtaccgtgcactctcattcataggcggatgttttttttttcttttccttttctattctagaaatagaagaatcatgtatccctatattttatgtaagatttcactttatactttaactgtaatcttagataattttctgtagttatataaaattttattgtattatacttattttaaatattttataaatttttctaaatctttaattagccacttgaggttgtttttttctacgtctctttctttgtttagacgtgccttgttcgggatttatatttttgctactgcaattattcttatctcaacgacatacttttgagtatcttttgtttagattactatgattagtcttgttctctgtgacatgcatggttttgttttattttataattcgtggttggtttgtctttttatttttcgatgctttgcgattaaattgctgttagtagttgagaataacgagttttctgcgagtaaagagattattagtggtgcagttacgtaccttgcatagtagtcacgaatacaggttgaatgaacctattgcaacatatctactgttgtgttttttgagaggtaatataggtgtttttaagattaactatgatgctgcaatctttttcatttgattttattctagtttttttttttttttttttgtaaaacgatttgggaaatcaatcgctcaattagtttgcttgtttttctgattctcattctagttgtatttttaacaggagaaatgcacaccgattgttttgctgattactattaataaaattgcattattttttcaaaaaataaatatatatctattttgtatttatttttaaaagaatacatgtataatttactaaagaaaaagatccatatagcatttgttaattcttatttttattttatacgagataatttgtttgaagtctatctacagtatagtaaattattcatatattttgaaaacatttacgaaatattttaaataaaataaaattacattgtaagctaaggagcacaatgtcacgagagaggtggggtttattactattagtacctaatttgcttacgtagttgaagtagcacaatgtcgcgagagagctcatcctctctagtgcttaatttgggaaaaaacaataagtaattggggttccacatgcacccggaaacccacttttcatattgtatgtgcgctgacatcaaaagaagccttaagaaattgaaacctttttttcttgttctcgtgagaatttgaagcagccctacgacacacatcataggcctcatatggtgggatcctatgcatgaaattgatctttatttgtcgggatagtgtgaaaatatatagtttcatcagtggtgccttatgcattaactaaatgtgatctatcccatttttaatttgtttctcccatttcggtagcattatttgttatatcaacctttcatattgtccggcattttaattttctgattgaattatatatatggtacgtccgtatgttttatatatacaaactagtaaatatgccgtacttaacgtgcaattgtttataaaaatttgaaattatatgtataaatattaattgaataataaaattatatgaaataatttcaaacatatttttatgtataatttttt

SEQ ID NO: 24124 - DNA, 3073 bp, Cannabis sativa
tctcactataacattacccctatcaccacaccggctgcaccaaccaattgagggattacgagcagctaggccctaccctatatagggttggtcggccatgaacacctgcccaacataggcttggctggctaggaccaatctccctacctgggaatggccgaccaaggcgagcaaccaagctcaaggttggctggcctccaccatacactctcccaaattatggccagccagaccttggcacatttgggtgtacaccctgtctaaggagggccagtcagctaagtccccacagtaacggatccttctgtacaagcatagttggaccaaataagggatatggtcaagggcctagctggtccaaaaactttagaccttatccaagtttaagatgacaatatggaagatgtatataggggcgagaagacccactagcacacatcaaatattttgagatgcaactcgatctacaaaaaattactggttatgtgtagtgtcggatattcttggcaactttgttagaaatagctcagtaatggtactttaagctggctccatggaggttcaattcatggaatgagatttcctaagaattctacacataattctcgtcctcaacgcttataccatcttagcttgaagaccttgtcaaagtcaaacaatgacaaggagaacctttaaaggattacatccaaaggttcatggctgagccctccaaggtcaaaggcctaactgaaaaaggttgatatatagccatattgggggcattcttccactaagtgacttcaataaagatatccaaaggatctcgaccaacaacatgaagcagttcctagacagagtcggtggttttatcaagttggaggaaattattcaacaagcccagatagggcaagtcgaaaatagacagtcacagggcatcctgtagccccataattttccaagcgcacaggcaggtacttgtaactctacccaaacctctagtggtaaaaacactaagggcaagtgcaacaacaacacctttggaagaaatagtaaaaataatgagaagtacaaaacttctcccatgccatgaaaccaaaatgacaaggaggagaagtacacctacttcaccctcttgacggagaaacctgaggccagcttcatggccactcagggaacagtcccatataagaagacccctcccatcaaaaaggagttgagcaagagggacatgtcaaagttctgtcaattttacaataacttcggccatgacaccaatgagtttcaaaaatttaagagggaaattgaattcctaataaggaagaataatccccatctgcataactcagcgacaaggtgcctagaatggagaccgtatgccacctccaatggcgggtcacttaggggtcattattagcagaccccatattataggcgagaccagcaaagtttgggagcgctacgcttagacaatctgtcacgagccttaaagtgagatcttggccatcgaagaaaggggctccaagcaaccaaagcttggggagcccactatctctttcacagaaggagatggtgctcaagttaattcttgcacaatgaccccctggtcagtactacacagatcggtaagatgactgtggcaagatgcatcgtagacaacggggctttatccaacattcttttcaaattaacatatgaaaagatggggctccagcttactgacttgtcaccttgcactcaagtaatgtgtggcctctttggctaaggcattgttcccatggggtacattagattgcccttgatcactattggagtaactccaacgaccagaactctgatggtgcagttcgtcataatcaatgttccctcaactttcaacaccatggtaggtcgaccagccttgtacaacttgaaggcagtgacatccatctactacctctacctgaaattcccaacaaggcatataggatgtttgaagggagaccaacagttttcccgtgtcattattacaacttggtcctatctccaaagctaagaaagagaagatgcccgttaggagctctgaagaagggcccaacaaaggttaatgaagtccagccaaaaacgagtatgcagacatagatcctcactttgggaatcctacacacaactttggacttatagaagactgaagatcaagaagggtttagcaccaaaaataaaattagtgcgaatagacccctctatgatgacccatgccctcaacatcgatcaaaacatctaacctatactatagaataggaagttgttgggcacagaacgtgcctaagtgctcagagatgaaatcgagaggatacaagcccacgacatcataaccgaggcattctctccactttgggtatccaaccctaggcttctgcccaaaccaaatagaaagtggagagtgtgcattgacttcaccaaccttaacaaagcatgtctaaaggactactttttgcttctaagaattgaccagtttgttgatgccacaactttccatgaagtcttaagcttcatggacgtgtactcaggttccaatcagattaagatgcatctaccagatcaagagtacacaagctttatgatagacttaggcctatactgctattgttatagtgagatttctctcacttaaaaactcgagaccaaactcctgtttggaggacacgtgtattcatttttccaagaaaagctaagatgtccatgggagactcctcgagtttaaacctcgcatgagctagaatcagcgagacgatgcaaatatgaccaaagtctaatcgcattcgtgtaactcccattatgtaggaccaaagaacggatttaacttgcatgtaccaggatatgtgcgagtatcctctcgatcttcctgcgaaaacatggacatcaactctctataatgcgagctggtcccaatgacccaacagctttgataaaccgatatagactcgcgtgtctaggttctatcagctcgttataagatgtccataagcgtgattatacaagaacgcagacatcctagacttaactaaatgttaggtatatcctaagcccgcgagcttacaccggaatatgaaca

SEQ ID NO: 24125 - DNA, 2333 bp, Cannabis sativa
  modified_base (1175)..(1180): a, c, t, g, unknown or other
tactccactcattgccaattggttttgagatagaaccccatgattctcaacatggtatccacacctactcagatagtgatcatgtccactctgatacggttcaagattgatgagcaaaaaatagtcatcatcttgagggagaatattgtggacaatgtcccacatagaataaatagcagagaattgagctatatataagaacatgcgctatttcactcattaccaattggttttgagatatatggaattccataattttcaacaatgacaaatatttttttattcacaaggtcggctcttgaaaaaaatagcccaagactacatttaataaaaaattttaaaaattgagcccttttatatgtattattttgttgtaatgtaattttttttaaatatataaatcatatatatatgttaagccctgaatttaagtaggctctaaacacagacttaaccccgccgaaaaccaatcttgcatatatgggtgatactcagtaaactcttcctagtgaaattagaaaaaataaaataaaagagtcaaaacaaaatgaataaaagagcatagatattcaaaaaggactcagataataatgcaaagtactagacaatgtatagtgggtcagtctcctagtctcctaagttcaataatacaaatggcccattgttttgccctaatgatcttcggctaaaccctactattatttctggttgattaaagaaaaagttaaatattagattcagtttagtagttaacttttaagttaattggtgtgttataagttttttttaatcaaattttatatactaaaaaaatgcagaaactaattttgcgtacgtcatgaaataaattataaaatgtttggctttatttgagtatattacatatacaaatattcaaattgctcacgactatatggttggtgtaaaagtatatatacaaatacatattacttttaaagtagtgagtgactcatcatcttaatgtggtgacaaagtacttaaatatatatattaatatatttttataataaatcataaataattgcacaataattttaaaagatagttgtggacattttacttttttaattaccagtattcttaattgagctgatctaataatataattctttataaaaaataaaacctatctactactactaataataataatnnnnnnaataataataataataatgtgcttggaataaaccaagcaaactttggatagtacttttaattaatgtgatcatcgtattaggcaggtttgcttaattaattaagattattattattttaaaaaattgaataaatgtttttctatgtctaaatatattcttgtgttttaggtaagcttttgtaagtggtcaagagttattgtatatatatgaatttagctacactgatttcgcttattattaattacttcattattttatattattttagataagaactatataaataaaagataatatcacctaaaaaaagaactatgatgatattagtcactcacgcttttttataatatgattcataatttactttgatgtgatattattttaatcgtgtaaaaaaaaaaaaaaaatgtaatcgtaaacagggcaatcttatttttagcatatgatcatgaatagtatcgaataaacatatattgcacattctatacttaataaattaattatataaattccagagcttataggattttttttttttttatcattttacaaaaaaacaattgtctttttataattttttgaaactaagatgatgtttggtttaaggtaatgaaatagaatggaatgtaattatgaaacaatttttattttattcattttaaagtattagaatgtcattcttattctagttatgttttcattccttctaactaaatactacataatagtgtgtttgttatgtgtgtttgagttagagagaataaaattgaaaaaagtagacttagagaaaatatgaaactagcgttgaagggaattattattactaccaatttaatttaaaaagtgagatccactttaaaacatatacgatccatggtcattaaaaattaatttaagtttgatattttcattctcatcacgtctaatcctcgtatcaaacgccccaagggtttgtacgtagtagatttatttagggataatttacaaaaaaaaaaaaacgaaaacaacaaaaaaattacaaaagtacgctttgtattgaatttttcaatatgtttagggttatttaaattttatttacataaaatacgacctttttgtatatttttttttgttgtactcttgttattttgttgttaattttttgttatttgt

SEQ ID NO: 24126 - DNA, 1855 bp, Cannabis sativa
tatttgaggagatattggttttggacagtggaactaaaataaagggcagcattgtaaacgagatatgaggaatgttttgttaagttgagtacgacaaaatcaaaattcaaccccactacgctacacaaaacaaaaaacccacaaacaatacatatgagaaagattactaaatcaaaagggttgacaaaaaaacagatttttaaggagaaagacaagacctttttcttcggaaattaagaatgatttgtgggtaaagagcaattgcccaagaagcaaatgcaatccaacccagaatttcgtatgctatttcgaggggaatccaattccatgatgccattccttccttgtgtttttctttctcttccagatccccatccaggggccaagggagggaaaggtttttcctaagtttctttttttagatcttagtttttgaaaataaatattaaatctttttatagtggggcctctattttagttaatattaaggaagaatttctattaattattaataacaagtattcatccaaaggaaacaaaatgaaatttgaaatctgtagtatattaaggcttgaagtaaagagaaacgtatcagtggtggttagaacactcttacgtgttaatatcgctattggtccaactaagtatcgggtaatttaatataataacttttagaaagtatcgctagctaatcgcaacgcgacatgtcgataaggtactaggcaccactggtgcttaataacaatgctctgaagtaaattgtaggcatttataataaaaatttcttcttctttttttcttttatacaaaattcaatgtatcaatctgaccaagaaaaaaaaaaatcaatgtatgaaaagatgttatttaatgatcatacgtattgatgtaaattaagaaaaagtttgtgtttctattaaatttgtcattatattgattttttttatgtcctcattattagggatgcacacggagcggaatattagtgagagtgctctcccagttcccatcaccgttaaggattttaatcctcatctccgttccatccccgcttattccccattagaaacagggaatcccttaatagggcagggaatcccctattataaaaataaagtttgttttaaaaatttaaatgtataaaatcattaaattacataaagataatattacatattatttactattcaatatagtaattattatacaaaaacacaacctcaaaaattgtaaagttaatattaatataataaaaaaatacaaatgcatatatgaaatataatatattaataaaaaaataactaataaattaaacaagtctccgtcgagacggggagtgtcatccacgtccccgtccccgtcccgtttaacattcggggataaaatttgatcacgttcccacctcgttccccatttagatggagaattcccgccccattaggagtcagtccacgcggggcccatccccatagataaaatatgcatccctacttattatattgatttaattggctataaaaaaataactaatattacaggacatatatttaataattagatgatatttttttttaaaaaaaaaaaagcttttgatatttaaaaaaaaaaaaaaaagtatcttataacatgactaattttagagtaataatatgtacacataaatttaatacacatttttttttgttgagttaggtattcaatttcatcacccccaaacatatctcaatactttttatatggccacttaagactatttttaatgcaagatataaatattatgctaaatttaataaaaaaaaattaacaaattttatatttaacacaatatttataattatatttcgatgcacaataa

SEQ ID NO: 24127 - DNA, 7713 bp, Cannabis sativa
attattcattataagaatgagagtacttgcactatatatataactagaaatttttggggttttttagtattataacaaaattctatttatttcaatattgttgatcataattataagtttataactaagaattaccaaatgaaaatctatcaaactagtttaattatatatatgtatagttatattatatgtaccttggataagggctatttttgacagctttttgaccatattttctccatcgataaccatcttcaagatgatcaacctcactttttgtcataaaagcaaatcttggctccttttgcttcttctctcccttcttattactattaccattcttattattattattccctttgctcctgtatatatataatataaagtttaatccacaatatatatacataaaaaaaaaaaaaaactagaaaaattcaataagaaaatacaataaaattcacttacactttcttattagagttactatcatcaacttcttcatcatcatgatcttgatcttctgacccttttcgcttctgatctcgattattactatgattatgaacagaagaatcatgatcatgatcctgatgatccagatcatgatcatgattatcacctccaccagtggtagcagaagaagaagacaatgaatttatattgttattattattacttactggtgctaccacttgtggcggtgatagaggtggtgatgatgatgtcattaaccctaacttttgatcagaataagatgatgacgaaaacccaaaagatgtcgtgttattgttactaatcgacgatgttgctgatgagtagttgttgttgttgtagtagaagaaatcatccatagtataattagggttaatcatcaaactactatcaaaccctaaaaaaccgctagggtttgtaggaatattgggagaagaggtgaaatgatgatctcgatcaacggctaggatttgatcatgagcaagcataagaaagatgatgatgatgatgagtagtagtagaagagattattattatctttggcttcaatatgagacatattatgaagaagaagaagatgaagaagaagaagaagaaaggaaaggtatgagagagagagagaagaaataattgtgtggtgagggggtttcgtctattactataatactacatgtggagggtttgaaattgttatatataagaagaattatattatataattatatatatattggtgtatctatataggtgtatatatattgattaagagatagagagagaaagagaatatgataggtgagaaggtcttaagtttgaatttggacttgatatcatcactttataaagcaaggttgacaaaactcaccttccaatcacaggacaaaaaagtggcttcttgtatggaaacatttatttattatatataatatatagtaaataattaattaattattttttattattactaaccctagagttgtttttttttttataaaatattattactaacctagttgaaaattttaattaaaagaacacatacctattatatatacatatgatcctaaaataattgatgtgatttattaaatgttgagtacctaatattgaaatttaattatgataaattttcaattttttttatatattttatttataattttacaatttagaatttttatatacaatatattttaaaattataaaagtacattttattcagtaaaaaataagaaaacaactaaaaaaattaaaattcaatttaacgataattatatattaactataaataaattataaaaacaataaaaaaaatataactataaataaattataaaataacaaaaataaaaatttattatttgatattttgtaaataaaaaagttaaaagagtaaaaatagaaaaataaaaatctgcattgaagcatgtttgcaatttttttaaaatttttgctatctataaatttttctttaattttatttaaatttttttttaattataaccatttaaagtattagtaacaaaactacatatacctatatatagctagttagctcacttttggagacttatgagttttgttattaatttgtttcactttacattttaatatataaatatttaaaagtttattgattaattaatgaaataaatataatgttcttatattattctattattaatcacagatccctatatagctaaatataataaatgggtatatatctttgattctttatattatataattctattttgctttgttacaatcaagaagataagatactaattattattaattaattaattacatcacttatgatcaccactaataattaacaattaaattaactaattctttccgtacgtacataactcacttacacataatagtattaatatatatttttttaatttaaattaatgtttgcatgtgtattttcttttctctttttcatttttatatatatatatataattggtaactaaaaatattgatttgatatttcatatgtatgtatgaaatgtgtcatttctaatttatatatgtataaatagtagcaattattgtgtgtaggaaactaattatatagattccccatacaataattcaatcaaatattaattaattatatataaaataaataattaaatggttttcacatggagagagagatccatattatatattatattatatataaatatattccatattattatttttacaaaaataaaataaaatcaatatggtgtatatatatatatttttagataaatcataatcgtttgaatgttaaagtgtatttatatgcctagcataattagataacaacaacaataataaagacaattatttatttaatataagagatgaaaaagtcaacgaagactattttagatcataaatgagatgaagttgaatgaagaagaagatgataattgtgaggtggtctttcaatttttattttttttttcttttgggtcaaaataatttcatttcattcaaacattgtatacatatatgtattagggctagtgttttatttttttttaaattaaaaaaataggaaaaataaagtatatgttttttggaattttcaaaaatatttttttaatgtttatttataattttacaacacaaaaaaaaaagacaactaaaaactaaagaaaaattaatcttgtaataactataaataaattataaaaaataactagaaaaataattttataataattataataaaattattaattcattataaaataataataaaaaataatttattatttttattaaaaatttatatttgtaaataaaaaaattggaagtgtaaaataatttttttaatgtataatgcgttttagtaatttttttaaaatttttggtttgttatatgaatttttgctttttggtttagtgaattgattttagaacaaaaaaaaataaataatggaatataaaggttacacgtgccaagactggcaccggcttttgaccgtagccgacagcatgacccggcacgtgggagtgggatatagcctgcttttctctactctgtcctacgtggcagtctctctattattcggcatgctgacgttaaccccacgtcaccttcattccctctctctccttgactgttgtcgacatctttctctttctctctctacaacgatatttttgtgtaagattgaatcacagccgttggatcttacatacatggcacttgattagaggattttgctcatcataaatataaatacccatttcattattgaactatatacataccaggagtcttgtttagaaatagttagggctggtttagtaagccctgttgaatcgtattgtgttgtattgtattgtattagtattatttaatacaatataatgtttgatattgacttgtattagttgatcgtgtaaagttataaatatttttaatacactcgatccaacaccaactacgtgtcgggtcccgagagtcctaagtccaggttcgggtcagagtctgggtttgggtcggagtccgagttcgggtcgggatccaagtctgggtctggccccggatgggtcccgggtccgggtccgagctttggttcgagtccgagtctgagttcggggtgtaggtttggggtctgggtccgggtctcgagtccgggtctggatttaggtccggatcccaagtctgggttcgggtcggagattggtgttgacctgaaatcctttgtaaatatcataatacaagctaaaacggacaatttgttatgtattaaataatacagcatacattgtattaaaaattttggtcgtaataattaatacaatacattgctttatccaaatatagttttatttattatttaatacaatacgaccctcatacggtgttccaaacaagcccttaataattttttataaaataattaaattagaatatgtgaaatttagtattttttttaataaattatgtaattttattaatagtaattaattaattaaatagtcgtaaaataaaattatatgagaaagattacagcatcacaattaattttaagaacatttatattcagtttttacaattctgttccagcaggttcattcaatctcgtagcttgagcactcaataattatgtaaggtatacgtaactgcactactagcaacccattattagtcgcaaagagcttattatttataatcactaacagtgatttaataacgagtcatcgaaaaataaaaaagaactaattacaaaacaaaacaaataaaaccatgtcatacagacacaagactaaaatattcaaaaccttgtcacaaaaacaacactaaaacacttaaaactctatcacaaagataaattaatcgcagtagaaaaaaatcgaatcgcatgcaataacaaaatacaactcgaccaagccgcatctatacccaaggaaggtcaacatacctaattggagaaaagagacaacttcttatagctatataaatttaaaaacaataaaaccctaatcttttaatttaattatcgttagaaaatacaatcttcggtagctataactattttggaatctagtatttatctagtatttaatttcactaatattcagtttaatattatatatatataatagtactattacatactataatcaacggttgaaatggaaattattaagtcaattgatatgcaaaattaaataattaagggctataaatatatatatattatgttatacatgtattaatttcacgtacgtgacacatttatatatatatctaagtttgttatatatagatagagaatttattaattaattaaaaatatataacagcggtcttcttcatgtatttacttttcttggtttcttttatttctatttttcttattaattgagcacacataattaaaaccactactctagaaatctaacaattaatacttgaaattttcaactaatttagtttatatatattatatgtatataattgtatgtatatatacttttttttatataatagtgcgaattatgtggtgcacatctcttttccattttttcggttattttttgtaattctggagatcacgtgttagctatagaagtctcgtaagtcatacctcaatctattttaattgagtcatcgatagtcacttcaaagattcttattacacagatggtaccacctccagtaaggaccaaaccttgcttgaatctctttaatccctttcaagaggacctgggttgagattcgaacacttgacccaaataaagtaaaaacaattcctatcactacaccacacaatacctggtatgtatgtatatatagttaccatggttaaaaaaatgcatttttatatatactaaaagaaagaaaaatagtgatgaaattataaagttaattaccaatacaaatacattttaatatagagaaattatttatatataaataaaactagtgaagtaattagtgagtctactaataataattaattaaattaaaaaataagaataagaaaggttaagacttttgaaagatgatgaaatgaattaagcaagggtacgactttttaaaaaaaaagtaggaaattttgaccgacttttggttgatatccaaacaaattaaattaattattcggtacccaaataattattatttatttatatgtataaataaatatatattttgtttttattttgtgtggtgatcattaatattctttaaattttctacctccaaattaattaacttacacaaccaacaacacccaatgctattaaaaactatttctctttttcttctattttttccctccaatataatatataaatcaatacaaaatgttgcaatttattaattgtttaggaatttaattaataattttttatactatatatataatactagctattaatgtttttattttatttttctttctacttaatcaattcctaaaacatatataattaataactaatgattcttattattcccaaaattttaatatttaatttttttatttacaatttagtccctttttaaaatttattttacatttatatattcattttttgtaaatatgtttatatttatactgtctttttttatatatttttttcttctgtattatattatttttgtaaattatttttgattatgtaatattttatgttcactcttccctctcaacaaaatttttgaatccgcccttgtgtctatttatatttattgacaagtaattgtgatatatatatatatatatttatattcgatcaaaattaatatttttacataaatagaaataataattaatgagtaaaagaggtgcatgcaaaactaataaattgatgagaattattatagcctattattttagtgaagcttgcgtactcctttagatatctaattctaagtgtataaatatatataaatataaatataaatataaatatacatataattaaattagaattagaaaaaatatatacatatatatagattatggacaatcataattatcacgttatgtgtgtcaatattgactcatatgatcaaatcttttaatttgtatttatataaaaatatgttaattaattacttctagaaatagaattccattttctatataaataaattaatattaatattgtgtgtggaaggatgtactttattatgatatttaaaaaaacacatgtgaaaagtttcactatgtataaatatatatagataaattaattatttaaatgatgtaataataattagatcctcatcacctctattttttggaaaaaaaaattctttaatcctttaatactttttttaacctttatgataatattaataattagtcaattcaaataataataataataattattattacaactttgtagtgaacacaaaatgccaagtgaataaagaggaaaagtagctttgaatgacttttttttcatagtcaaattaaaattttgtcgcataaaagaaaacttcaaaaaagcctaattaaattaattataatgattatatattttgaattaaactttaataatcttcttattgaccctcttcaacttgatgagaattaatgaaatttatgaattttagtatatatattcttccacatagctaggtatatttgcaaattgcaaatggaatatttaataccttgtttttgaagaatgaagactagtaaacattttgtgattatatatatatatata

SEQ ID NO: 24128 - DNA, 2545 bp, Cannabis sativa
  modified_base (2108)..(2110): a, c, t, g, unknown or other
  modified_base (2214)..(2223): a, c, t, g, unknown or other
ctataattttcctcctccaatttcgtctatatcttaaattattgggtttagatgaaaatatgtagtgttaattacttctaaatcttctttcaataaatttaaaactaagtctagttacaaatttaagatattaatagagttcctactaatgtaattggacgaaaattacaattctattaacattggacacttgtatctctataaaaaaaaactcattcaatttataatgttattataaactcaaaattttaagaacttataccataaatattttgttaatttacacccaaaaaataactttttaattattattattattattcaaacatttaattgaggttgtagctgtttaacacaaaagataagctaaataacttaattaataaaaaaaaaattattaataggaatgatcgcgctattttgtaatgttaggtattattgtcatcaactatagatattatataagtgactgaaacaaaatctaagtaaaagtgaaagaatgtatacatgtatagatatatatatatctatatatatacatacatagatgtataaatgaagtggtaggtaaattataattggtggctagcataccagaagtggccaggaagactataaacaaatgagaacaaaaagaagaaaacaagaggtgagatgaggtatggtatgacaaatcaatggaacaaaagaggagggtccaccaccaccgttggattttaataccaacatccaatatatctaatcctatccattcatgcatttattactcaaaagagtcaagtatttgactctctgaccagacccagcagactttccagatcctgacaatatttgactctctgacttttccatttaattggagatcctatttatttttttgtttttgttttcttctttgtaatattaatagtaatattaaattctctctttctcactttgtggagaaggacaaagtaagttaagtagctctctctttttgcttctgttgctctttattattagtatttttttttatctctcatcatttttggtattttgttatggacacttctatcaatctatctttgtttttatacaccaaaaaacacaaaacagagttatgaatgagtgaggcagatttctcgtgagttttgtttaactttgtcagaagttgacattcatattcatccattaatgactcactcctacaattttgtttatatttatttgtattgtattatgttacaatgttatgctcgtgtcctttttatttttcaaaatgggtacccacttccacactcacaatcacaaataaacaatcacagtaaaagatctgatgatgacaatcagcggtgatggtagttcggtctcttaaatttatgggcctctcatgtgagacactgtctccctacaatttaatggattctccttctatgagagtcaacaacgctgaaactatgtggggattttatttaactcattactcaatttatatcatcattaccattataatcatatccaactagttctatagttaattcttattaaatttatgctcagtattactaatagtactagatagatgtacattccaataacgtgtttaaggaggagttgcgttgctttagcttgagagtacacattggtcttagattcaagtttttcattaattatttgggttcttttttttttcttttgaaaaaatacattcattcgtaataaaatgttagacttctcggtcgttacaacaaatgttcatagaaatagtagtaacatcaatacacctatagtacgtagttgcgagtaaaagtccatttagctacgttatgagctaaaaagttacaaattatagtagtaaaacataataaacaagaaatgaaagaggaaacgattctgttacaaaaaaaagagtagttttcaatttcacaacgggtttcaatgtcgttgagagaattgataagtatcttaaaatcgctttccactaggataaactgataacctttgtctttagctacctcaagcgccaagcagaccgcagcagcttcatcacaaagagtatcaggaaacgccattttggtcgtatggactcaaatcaccttgctcaggttgtaaagaccgcttagctttannntggaaattagcagataattagggtcttaattatgaaaattatttattagtattgaattaattatttataatgatttatttgaattcaggatgcatttttatgtnnnnnnnnnnaattttataattttgcatattttggtgcccggcaacattggaacgcggtgtatggctatttgaatcacatcttagtatttttagtatatcgggacaatagtttagacattaaaaatgtcgggaatagtcgggattttagaattttccaaaatatcccttagtgccattttatgacttttagtgttggaaaggcaaagtagtcattttgcctaagtgaattttgtctttttgtggattttatttaaagtttattaatctgatttttttagttaagttttatgctgaatattaagtagataaatcaattcttttctcattttat

SEQ ID NO: 24129 - DNA, 1411 bp, Cannabis sativa
atatatataaaaatatataattggtaaggtcccttttttaattgtacctacacaatatatacggcggatgtgtatttgtacattttttggaaaaattttctttatcttaagattattttaagtcaatcacacttagttttagcattcatacccatcaatttatttaatagacatcttcattgtataatgtcattgtcatatttacaagtcttaaaatcattacattcaatctttctcaaaattatacacagtttacttgatattttctcttacagatcactgaaccccgtgacatcacacattactattctcatgtttaacccatattctcatgtttatatataaggtaaaccctttgcaaaggcaaaactaggttggcctctcattcatatcctcaaaataacctaaacatatatttatcaagtcaaataatatctaattaatgtgttaccttatttaaccaatattcacgtgcatgcaagccttgcacgtacgcaaaattataataacaatattcggtaataatcttttatttttatttgaaaaaatctttacaatataagcatcgaaattggccatacgaatattattttgtaatgatttttccctcctaagaaaagaaatttgtacatgttatgtgaaagcatattatgtaaagtactgcttgatatattattaccaaaacccaaggcacattttgtgcagtatataattcatatctaaatatttaaatgaatatttttttgtattaatatttaggaatctttttgtatggatcatggtgtgtgccattaattaattaatatataaaatatggtatgaataggatgataaaagaacaatctagagagagagaaattaaattatatttagattcacagttgcacgagtggtgcaatataagcaatgattttagggtgctattatatatataactactcatacttcactgtcactgtaaacatttacagtgtaaatttctagccaagctaataaattgagacgagggtcataaattatttatttatgcatatacaatataaatttttatttaagaataacttttaatttattataaaaaaaatcaaattttaatttgaacaaattataaataaaaataacctctaatttgtaattaattatacattttttaagtcccgtattaacaaaatatacatctatataaaaataattacattatcttaataaaatatatacatatattttgtaaatttattcacataaaattaataattttattctaaatattaatacatttataaatattatatttactctaaaataattttagtatgatatagtattgataatattttattgttattattgttacattgatattttttggtatttttattttaatttttagtataattctatttaattataa

SEQ ID NO: 24130 - DNA, 3243 bp, Cannabis sativa
  modified_base (2891)..(2891): a, c, t, g, unknown or other
ctcagactccagacctggcccctactttgaactcggccccaaacctagctagccccaaatctcaaacttgaactcaggcccggactcaaaacctgaaccccggacctagaccccgacctgttctcagacctcgaaccccaaactcaaaccctagacccggtcttgaatctcccaaacttgaacgaggtcagagttggggtcaagtttattgtaaagatattataattttacacaaactattaatacaaacaaatatcaaatataatattatattaatacaatacaatctaatacaatactatggttgctagccccctatattagtcaaataaatattagatagtatatattaatttaggaattaaataagtacaatatatatctactcttctctagtggcaattccactaaaattacgtaccaaaatgtccaaactcatgattgtttatcttttcctcgtgcttcacatgatatatatttgggtaattgttttcttgaccatctgttttataaaaactaatgaacggaacttttattttattaaataataatttaaattttatatattttaaaataatataaaatagatcttaaaattattttttgtcattaatttttttagtataaccaatttaaagtcgattttcagtgtaaataaatacaaaaaaaaaaaattataatcagtcttgtcataacacttttatatcaagttattattaaattttaatttcattagaaaggaaaagaatagaaaacttagaaacaaaagaaaaaagctttgtaaaggaaagaacaacaatgtgcctaaggagctttgaaagcgagaaaaaagaaagcatgcgaaggagcaaacgaaaattaatatacgtggacaaatcataacaagtggaaggagggaagctaatgattcttcgcacctataaaatagaagattctctcattcaaaaaaagaaggtggattcttgctcacaccagactaatcgaaattctattggagtatatcttcaagaacacatttgagctaaggaagcaatcgacccaaactaaattgagtgaattgagagaaaaattgtataaaccgatagatattatattttgattaaactgaacatggtgtaaagaatttaaagtgataatacaattttgttattgagctaatttttggcaatataaatatagttaatatatttattttttagcaatataaataattaatatttataaaattgtattttttttttaattttatcattataaattatgttattgttttaaatataacacataaaagatttaaattttaaattattagatctaaacaaaaatatataatattaattactttaaagtatttttttaataaattcaaatcgaaatttatactgataaaattgaatgaaaattataatttacaaacattggtacccgctaaagataaatattgaatttaaattatttacaaacgtaaaactttaagtatttgtgatgctatttacacttaataaatattaatggaaagtttaattaagagcattgctattagacaccaacaatatctaacacttttggatatgtcattttacgattaattagcaatactctttaacaattattatattaagctatataaaatctaattaaaaatatttaattagacaaataataatatctaatcactattaatacattttaacacctcactttagttaattaagctttcccaccaagaagtgtttggtttgattttgttgttgttgtcatatgtataagtggggaccagagaaagagtgatagcgtcagcgaaagcaataaagatcaaaaaagaacaaaaagtgttttgtcctactcacaatgacgtggaaggaacaaaacagctaagactaaaaaggacaccaacaacacttcaaattaaaattcctattttatttatttagtgataggggatatttgtagctaactatttaataatttataagaattgtgaaaaagtcctaatagtatttaacattttcttatttgttaatattgctattaggctaattaaatattaggttctatataatttaatgtaataatttttaaaaaatattgttagttaattacaaaacgacacgtctaaaaaattctaaacactagaggtgtctaataatattattcatacttaatattaataaaaaaaatacaatttttatccaatttcgttaatacagatcactgttaatatcttaaatttattgaaagaaaatttagataattgatactataagtaaatatccaaacttatttataatttagaatgtagatcttatatgtatcatctttaaaacactaacaaagtctgtattgatgaaactaaatagaaatatattttactagcattatagtacttatacaattaaatttctttattaattaatttatgctagttataaactcaaattttttgaatacttacttaaatatcccttatattattagtatgtgatttaattttatagatattctaataattttaaaatgtaattacatggtatcatctatatgaaaaataaattacatttttatacaaaatatttacacaattttcttagatgaaaaaattagaataattatttttattaagatatactacttaaaagtgtcgccttgtaaatagttagagtgagaaatggagagagatatctgatagagagagagctgagattgggaaattgtattaagcaatattgttgattatgttggctcgggttagtgagttaatgtgtgttgagggattacaccatggataacttgctgtgattatttccttgtagctcctgagattgatatctcttattctcattatcaataaagattggtggtaatactttcaaactagagtatgaccaagntcacattgaacttaggatcggaaccagtataattctcttgtgttattgtgtttgacagccatttagattcatctatgctatatttttctagtttaatgtgtttgctggtttttattcttgatttgtttgttttgatttaacttttgtttgtttagtgtgatcttgaatctggaattatagaggttaattcttatgcatcagagctaaatttcctacaaccattaattaaatttgcgacaaatatgaaaaagagatgcagagacggacccaatatagcccccactaacaaaaatattatcttttaaaaaattaaatgtatttttttttttaatttgataattatagaccaaaa

SEQ ID NO: 24131 - DNA, 1579 bp, Cannabis sativa
agtgatttcaaacgctgattatatgaagtctgtagaacctgaccaatagctcgaataagcattgcatttacaacatctgcaatcacaaataccaaactgtatccaaacatgctctcacatcaactaccagctatataataaatgtaagttaaaaaagaaaaatgagaatagaaaaattaatttggtaagagaaataaaggaaaaacacttgcagccttctctgctcacttaaggcttctaaagccaatgaataaacaaaattaattaagttacacatgtgctgacaatagaagtatagccaagccaaacaaaagcaccaaattcaaaatgctatccacgttagatttaataatgggcaatcaatcatgtagaacatacacaaacaaagtgatagagatgatatcatgtgtaagatttaaacataagctatatacaccagcaaatcaaaatgaacatgaagatggaaaagtgaaagattaaacttacccgcataaaagatgattgggttgtcctccatttctgtaccgcccaatcaaatttgacagaaaagaagaagaagaacaaacaaaaaacaaaaaaaaaaaaaaaaaatcagtaagtcattaaacaatgcgtatgatagaggtagttatgaacgggcataaaatttgaatcaattcaacattatttcacaaggattctaaactgcttctactatagaattgttcaatttatgaaacttaagttgccagaaaattaattcaacaataaattataatcatccatggaaatactaataatacaatcaagtcatatttagcaactgggtcaaatccatgaatcagacacaataatgaaatttagtataaaacctgaagttaatcagaaaccacaagtctaaacaagcaggttaagctagagcgataccttttcactgtgagtggcccaagaagagagagtagcaaaggagaaccatgatacatggatcctgcaaaacaaacacaaacccaattttcttagatccttaaaaatgaacgaaattccattggaagactattgaagactaaaccacaatcagaagaactacacaaagagacctgcgtaaggagacaatgatgactgtttgagccagtaaccctcagccactgcaaaagcaataacaaattagtgatcaaaaagtcaggagctagccatgaaattcagcttctaagagagagattacagcgacggaggctggtgactggggtggagatttcgggacgggaagcgaggttgagattgttgggaaaatatatgagaattagcctgaaaaagagtgaagcagtgagccatgtccaaaagcttcgttctttgatccccattgttgtagttgtagtagtatgaggaaggtgtgttagcgaatgcgaatccagaatccagaatccaggaagaagaagaagaagaagaaggaaagagagtgtaagagtgagaagttgaacgaaggaaggaccaaagtccaacccaaaatgtttgtttggggatcgaatcgaaatagttgaattgaagaggcctcgatccgcaaatccaaacagtgcatgtaataataagaagatttacattt

SEQ ID NO: 24132 - DNA, 5255 bp, Cannabis sativa
aaaaataatttttatttaaaaaactaattagtagtttctttcttatcttatcaacattataagtaaccaaaaatttatttttgaaaaaacatgaaaattaaaaaaaacaaacagaatttgggattatttttgtttcaggcatattaatttagaattgaggtattttttgatggcataccaaggtattattgtaattgagatttgctaagaaatttttgtgattaatttgtattttaagtatattattgaaaaaattcttagaataattaggtaggtaaatatatatattttaaatttagtaaaatgataaaatataataaattagataatgaaaatgatgaaaaaaaaatacctttattttattttatttattttttaaaaaatatatatataatgataaaattatgctatataaattcaatagtattacatattaatttattgtaattacaaagatgatatttcaattttttcaaaattatatatgaaataaattatcttttttattaatgataactaagtaataaaattatatcacattctaaccatactattttttatataattttctttgaataatatgataagccaagtgcatcaaaaaaaattacaaacataaaaaatagaaacaaaaacagataaaaattaccaaggtattagtcatggcttggctaaacaagctttggtgttggatgatgattgtatgtggtttgaggaaactccctcaaccattttctctgttgtaaatgactccctctaatttataataacagttcttttctcaaaaaaaaaaaaactaaaaactgataaaattataataaaatagattaaaaaaaaaaataaagtttataaaaaaaaaaataacactaaagattatatttagtaactaataatactaaaaataactaacattagaaattatatctagtaactaataatactaaataatataaattaactgtcttgtcttttgacatgattttgtagttttctctctcgtttattagtcttttccttattgtgtctttcttgatctgttattatttttatggcttccagtagctatcatacggtaatggaggaggaaatgtgggctcatatacctattaaagatgaagaggaggctattttgtcctatgatgctagtgcaacgaatgttaatgagtatgatgataggtggtatatcgtgggaaggtttttgacggaaaggccaattgattttgatgctatgcaacacttgattgcttcgctatggcagtcggagaaggggatgtttgttaaacaattggatactaatcgatatcttttccaattttatcatgagaccgacatccaaaagcatgatgaatcgcaacccttggacctttaataagttcttgttaatctttaaaatattgcaacggggtgagaattcaagattagtttccttgaatgaaatggacatgtgggaacaattgcatgatctccgatcagggttcaaaactgctacaattgctaaggatgtgtctaattatattggtaagtttgttgaatcggatgaaaggaatttcttgggtttatggaggaattatcttcgcgtatgtgtgactttaaacgtaaagaagctattaaagagacgtatgaagcttcgcaatactgaaggggtagagttatggactaatttcaaatatgaacatcttcccacattttgttttatttgtggaattgtggggcattcagaaaagttttgtccatgtcgttttgaggttggtgagggtcagttagtcaagccgtatggggactcgatgagggtcaagctgcaacgtaaaaatcatatgattggtgcgaaatggataaagcagttcatggtagccatggaagatgacccaactgaatccaatgcaacttcacctgcttcagaacatcggccaatttcgacaatgaatggtgtgcttccaggtgccacgtttacgagccttatgatggtggagggtcatgggtcaacttggtgggaagatagggtcttcaaagatggttaatgggaaccctataattgtggaggaagcaatatcaacagataaaaatcaggaatcatcaaagaataatctcaatggtgaggcttgtttgttggtacattgatttgaaaaggaggaggactgatatggcaagtagtgatgggcttaatgacatgggtgatgtggcggtttaagaggtaaatggatcaaaaaacttgaatctggtgggtgctggtatccaggcccaccattcattatgaatatcttatcttagaattgtcatggacttgggaacccatgggctttacgattccttaaagatcttgtgatccaaaagagatccagtattgtgtttctctgtgagactctttctagtcgcctacaggtggagagagtgggagttatattgggatttgagggtatggtggttgtggatgtacatggtaaaagtggtggtattgctttgttatggaaaattgaagaagaagtttcattacttggcttctcggaagcgtatattgaagtgaaagtttctactaaaggcatgaatgagtggcgctttacaagtatgtatggggaacctgatagaagttgacgagcatctacttagaatcttttacgtactttggctgctaattctaattttctttggtgtgtgatgggtgatttaaataatgtattatctcattatcacaaaaagggtggtaatcgatatcctaaacttgtaattcaaggttttcagcaagctttgactaatagtggtcttcaagatatggagttatgtggctatctatatacttgggaatgtggaaggggtactaatcattagattcaagtttggttggatagtactaatcttgcttggttgaacatgttctcatcagctaagcttcataatctagaaatttctactttagatcatgcaccaatttttatggaactgtttcctactgctggttatcattttgctaaacggtttcggtttgaaaatacgtggttacgagagccactttgttatcaagtcattaaggacagttgggagttttgtggggatgatgagaatacagataaagtgttgttttgtgggcagtatctgggtgtttgggggaaggagttcacatgaaactttaaagatagaataaaaaagtgtaaaaatgaggtgcaaagatggaagttgggtcaggatgatgcttcaattgcaagctacaaacaagctaagaaggacttatccgaagtttatgttcaacgagaagtcttttggcgtcaaagatcgaaacagttatggttgcaagaaggggacaataatagcaagttttttcatgctttcgcaactacaagaagatgcaataattatgttacaaagcttaaagattatactggtgcttgggttgattggaatagtggcctggatcagcttatgattaattatttcaatgctcttttttcatcttctcaaactgactggagagaggttactagcagtgtgcaaaatccagtttttctagagcaaaacgctgagttgctgctaccagtttcagatgatgaagtcccaaagctttatttcaaatgcatccgaataaatccatagggcccgatggaatgacccctggctattttcagaagtgttggtcggttgttaagcgtgacattgtcaatatggtaaggcagttttttaatcatggacaccttccttctgattcgaataaaactattttggtcttaattcctaaaaagaaacaccctatggatattggggacttaagacccgttgcatgcaatgtgttgtacaagattttttctatagtagtgtaatgggctaaagagtgttatgccgtctatcatattcgacactcaaagtgtgttcttacaaggtcgtttaatttcggataacattatgattgcttatgagattatgcaccatttgaagagaaaacaaagaggttgggatggttatatggctctcaagcttgatgtaagtaaagcctatgacaaaattgagtggggctatctacgtgctatgatggaaagaatggggtttgatggtcgttggataaatttggtaatgcaatgtgtgtgttctgtttcttataccatttcgcatggaggaaaggagttggggcctattgttgctcaacgagaattgcgtcaaggtgatcctttatcgccatacctgtttattctatgtgctgaaggcttctctagcttgttgcgtagttatgaacagagtggtttgctcatgggttataagattgcacgaggtgcatcggtcatttctcatatggtttttgttgatgatagctacatttattgtaaagctactgaggaagaagcacataatataaagaagattttgcacacttatgaggtggcttcgggtcaaagaataaatttttctaagtcatttgtgttttatagcaacaatacaactagtgaattgcgggatgctatctgtgctttattggaaatctatgaggctgatgaaaatggttattatctgggtctttcatgctcagttgggaggaacaagaatgctatccttggttttcttaaggacaagcttcgaaagagaatacaaggatgggaaggtcgtatcttgtctcatgtgggaagggaggttttattgaaatctgtaacacaatccttgccgaattatgctatgaatgtttttcttctacctctcgatacctgtaaggagttagaaaggcttatggctaagttttagtggaattcggactatagtagtggtaaaggtataaattggatgagctgggatcggttgtgtaaacataagcatgcagggagattgggttttaggagcttgagagactttaatttggcgcttctagggaagaaattttggcgactgttggtgaacgaaagctctttagttagcaggctttacaaggcaaagtattatgcgcatggtaacttgtttttagctgagttgggagataatccaagtttcatttggtgaagcatccttaaagctaaagatctgatccatgctggtgctctatgagtaattgctaatggtgtgaatgtctcaattcttgaaattccttggctttcttacaaaactaatagttttgttgtctcaaggcatcctgctcttgtcaacaaatctgttggttgtcttcttcaaatggaagctcgtgcttgggatgaagatgttgtgagagatctttttgatacccgggatcaggatctaatttttttttatcttgcactttccacctggttcaccgacctcacgagtctgat

SEQ ID NO: 24133 - DNA, 4199 bp, Cannabis sativa
  modified_base (1903)..(1903): a, c, t, g, unknown or other
ttttttttttaaattgggcagtttgcatgcagaattttataacccgatctttatgtcgggttggaaaatatatagtataaaccgactaaaccgaccgatgtacagccctaggtgaacacatctaatgatattgatgaccctatttctgattatgttgatgatgagaaaggattaccaagattagagaatattgaaaatgagtctaatgatggtgatgagtcgggtgaagattgtggtgatggttctgatgatgatgataaggttggtgttgatacctctgctattggtgagaaacaaggtgatgttgttgtcgtgactgaaggtgataagtctaatgatgttgataatgtcaagggcaaagaaattgatttaaagggagatgattttttttttaaaaggcttaagctagcttgagattaatgaatataaagttattttggctggtttggaggctattggaaaagtcaaggtatgttgcttttttatatttttaattttttgagattgtgtttaagagtagttaattgatagttgtaatagagttttattctagtttttaaactgtcagtttgattacttattatttttcttttcagcaagttccaacttctcttcctaattttgaagtggaaaaattagttcccaatatttccgcagaagaagaggatgattctcttgcttgtactccttttcttaacaagagaaagcgtgccccaacattaaaatccccctttgttgattttggttcgtctgatttgaatacctctccaatagaatttatgacttcaggttctcaatcaacataagatgagcgagatttcaagattatcacatatgtcaagggcctttatgctcttgatgatgctttttctggtccagtttctcctaaacttgaggcaaagtttgatgaatagattagcaaaggttgcttaaatatcctaggtaatgtttgtatattcagttcatgcattgttttgtattagtttttttttttttttcttttttttttgagaattcttttatattaagttttattcatattcatttgtttttgtatataggccatttaatgtctatgaggatggggccaaaaaaatctctcctagttttaaattgggtgttgattatgttgatgataaaacttagttttatcatctttcttgttgcgacttgttcattaatgactcggtaatatcttcttatgcaatcaaacattttatagtttatatatagttgtttcttacttgtttttcagttttgcatatgttttgttgatcttgaaatgtgtgttgatgttcttacttttttttttaatttttttttttaatttttttttttgtgtttgtttcatgaatactattttttactatctaagaaagaaaggaaagtattcatttacaacaacaaattgcttatttaatgattccatgcagtctctgtaccataaattttacaaggcaaaatttctgaaaaaccaagatgtctcatgttcatgttgctcatcctattgctcattatatcaaaggttcagaattccttgttctatgccttgacatgaagttgaccatattttattcattgtcaatcttagaaaagaaagtcattgggtttttggttgtcttgatttgaacgagagtattttatttctttataattcacttgaggactaccaagatgaatgctgcagcatggaacaccgcaacaccatgaaagcgtattctgttaggctccccttattctttgatcttcttggtttgtggaaaaataggtccactgttcttaacttgggttttcatcgtaaagctccacttacaaaatttggtacattggacaacccacttacaaaagttggtacactttaataaaatatgatgtaaggatatttttgattaatggatacaanaaagaggtattcctcaacttatatttttttatatttgtgctctaatgcacaaagttcaaattagctataaaaatcaatattaccattaatgcttattcaaaataattaattttatttatattattttaatatcttataaatatatcttattcaaagtcaatgaatagtattaataagtgctaaagtggtaattaaaaatgataatattaattgcagactaaaatttggcccatgctattttttgtgccaaatttgacacttgggctaaatttggtacatattttacatcaccattgaaattaagttttagcaaaatattctaaaaaataacaatacactatatttatagttctccattcgaaatgctcttataaaatttagctcatattatattttatgctattttagaattagaactcatgacctctactatattttatgctaaatttagcacaacttttaatatatgaaatttaaaccaccttatctaatacacgaatgattgacacctaattcaatttttttaagatatgcgacacttgtaaaattaattcattatggtgggttctacttctggatcatgcggtggtgacatctcatccttgagaactatacgaacagcccacaagggtgtattgagcccaaatatcggcccaagttccaaccatacttctcagactcacctccctggcaacctcttgccgcggtctatatatttataatatatgtgtgtggagtagacggctatggaggttgctgtcatcttctttaatactctcggcgtcgcggacattgcttggtgtttgtcgttgctgttgtttcattagccgtctctcttgaattgtcacagcaaggtatttttcttttctttctttatttgttccccggtaatggggtttctgttctttaactcttaaagaaggaaaatattcgtatgaaaacgttagttatagttatagtgtctctatttgaatgtgggtacgctctagctctgatttttgttcgtgtcggtgatattcctttttattttgatctatatagctcaactaagctagttttatagagtcagcaacactattagaccctgctaaataccgtgttttgtaaaagtgggtcttgtatttctttctttttttacattcataattgtttcttctaagtaattcggcttggagtctctgtttgatttactctgttgcctggattgtctttattaaaagatgcttctactttaaaagaagctcaaagtatggacttgctacatcaaaataacatcccttgcagtctggctaatacatcacctgataaccacctttttttttgcttatttttatctgggtatgtacttaggacctgatgtaacttttgataacccaagaggatctgcatgtcaaacagtatctctggattatcaaacatatagaagtaatttaggctcatcatgtgttagtatagcttttctgaagaatttatattactacagcttaagaaaagctcaccctagcctgagattgaagccaaatatgttgcttaagtatctaaagggcactaaagactgctggcacttcacaagactttttccttacgatcttcatgaacagtgttaatgatgtaactaacagtaataacttatataattagttaagtagttagttaatctgttgaggtattagtcagctggtttaacagctttgctgtcttcaaaattctgttgtaatctgctacagccttcttggctttctctctataaaagcaagtcttcagcttctcaaatgctacgcttgaaaattcaccattcattctcttgtcttttgcttaacttagctcagcttcaatatggcatcaaagctatcttgatctgattccaccacaaaaaattcatcttctcaatccactactttcatgaatgccaatcagtttcctaaaaatcttcttttgttgaatcttcgttcttcatttggatcgaagtaactatactttttggtgctccttagttctaccagtagcacgagcccatggactcgaaggatatctccttggcacaatccctgcaccatcaccaatggcttgtaatattcctaaccttgaatattaaatggatttcgactagtttctaatgagttggttaatgaattcgatttttgaacctatgttgggggcatatcgtgaatgcaccacttcagttgaggtctggattgctttttctcaacactttacaacaaaatcccaagctcgatggatgcaactcaaattctttctccaaactaccaagaaaggctttttttttttttttttt

SEQ ID NO: 24134 - DNA, 3497 bp, Cannabis sativa
  modified_base (2963)..(2972): a, c, t, g, unknown or other
acacatttctctataatcatattctccttcataatattccctataattaaattattttgaacacctcataccaaacgtcccctgagtgttatattgatattcgtgtaattaattattgagttttatataacttaagaaaataaatttaagaaatatcgttaactaatcatagggtgtcacctataaaaagtattgggcattctcggtatcatatgagtattagatctcatataatttaatgtaataatttttaaaaagtaccggtaatcaattgcaagaaaatatgtttagaaggttataggcaccactaatgctattaatatcaatgctcttaaataaaacttaggattaggcaagtcgaaatgacactctaaaagggacttttcggtagactatttatctatttatatatgatagcagtctattattgttatgattgtgtatgttgtagttatttaagattatatgtaaatttttaaaaaataatgctaaaattaggtttaaatattttgttgtgcgtgtgattattttttcttatgtgcgtagtaaacaactgtttgaactttatttttaacaagtgtaaactatttgaatttttcttaaaatttacaagggagcctaaataacaacaacatatacgtcataaaaaaaattagactgaaaaattattcaaaatatcaaattagttaaagagtctatcaaaacatctctttaagattgtgtactataaattttctcaaaaacgtttataagcattatatctatttaaaaaaattatttgaattatacgtatttttgaaaaattttaaaatatgcaatttttggtatttttaatagtgtagttaaaaaaaaaatactaaaatagtaaaaaaaaatatataaaaatgcgattgtacggaattttaaatatttttacgatttttatgatactatttacagaaaatacaattttttgatgtatttttatgttgtactttttttttgctatgtgtatgttattttttgttgttatttggatgttaatttttgttacttttatgtagatttcttattatttttatgtatttttataaaataccgtaaaaatgtaaacaaaaaaaatctttaaacgtaaaaatataaatttttacaaaaaaaaatattatgatgtaattaactctttttaatatttagatagttttaattatacttattttttaattaaaccatgaatatcaatatgatatttgataaatttttgaaaaatttaaattaatttcatgtattaaaaaaatgtaaattcaaaagaatttatattctataactacaacatacaacatcaaataaaaaatgagattataattattcgaatattaaaaatacaagggtttaacttttttttttgtgtgtgagtaattagtagttttcaaactttaaccccatagtaaaattttgttaatatgaataaaaattatatttggtatttttttttaaataaaaaataaaagtatgtataactaattaaatcagttaccaacaaaagaattatagccaagtatttttaatttcttcatttagaaagtgacaactaattacgaaactagaaaccctaaagataattaaaatatatggataagtagaagataattaaacttgttttctaatgactattaatttgactaactaattacttattaaaattttatttgttggtaaaatatgaagatatatatctaaattgctataattacatactagcttatatattaattattaataaataattaaatttaaaattaatatttctataattaaatacagttcaataacattcttcaaagtatcaaatatatataatttcgaaatataaagcatcagataaatattttaaaatataagttaatttaatatattaattcttagtcaaagccaatattaatcttgttaaacaagaaatgaaagaactacgtacgatattgcatattgaataatttaacgataaattaagatatgttttacataatatataataatagtgattattaaagaattaataattaatcacagtgaagttaattagtgattattataacatgcatataatgaagcttcgattaattgagatagattttaatttatctatatatatatattcaattatgatgacttgtgcattttgaaagtcaaatagaaacttgtgaagaaaataagtcaaatttaatataatatatagtttgaccaaaataacacaaatccattagcaatgaattattataaacttattacaaattaaaggaatggttctaagtgttctagatttttttgcttaacttaaatgttctagaatatttaatatatttatatatatatagtttcttctcttttttaattaaatttattattaaaaaaatttacaatacgccccttaaaataggtgtattgatacacccttatctgttttggtatctgaaaatatatttagtcaaattttttctttttatgtttatatacattgtaattatttaagacaactatcaaaattttaaaaaatttaacacgtcgaaaatagggttcaaagagtgtgtttcactcgtgattttttttttttattttatacgtgtgtgaaatagacggtttgaacattaatttttatattgaaaattatttcgaatttctcaaaattttgcaaggtatcttaaataattatagcgtatacgactatgaaaaaatttggactaaaaaattcttatagatgctgaaacagttaggagttgcctcattgcacttattttagtgggctacattgtaaaagcgccttttattatatattatttatttagtcggattattagtgatatatatatataatataagaaaattttacaatgcacccgcttaaaatagatgcaccgatgcacctttatctgatttggtatttgaaataattctttctcatgagcatgtacgttatagttatttaagannnnnnnnnnaattttaagaaattcgaaaaaatttaacacgctaaaaataagttcaaataatgtgttgcactcgtgactattttattttatacacgactgaacaatatcgtttattcctagcgttttttttttttcgtttttaaagaataatatatatctcttatattaaatgtagcaatctaataaaaaatttgatttaacgatttagttttttttttttttttggttaaagttagcggttaaaattaacactgttaaatcaatcaattaattatcttttttgttaaaaaaatatttttaaattaatatctgaatttaatttatatttattaaaatataattttgcaattatttaaaaatatcaacaaaattaaataattattattttttatatataaatcttaatttgaatataaattggacgtttgttcaatcaattaatcatactttatataataaatttattagttatagggctcgtttggtacaccgtattgtaatgtattgtgttggattgtgttgtattgtattgta

SEQ ID NO: 24135 - DNA, 4770 bp, Cannabis sativa
aaacctcataccaaacatcccataagtggcattaaagccaagataagcttgactttgttcacaacaattcgacaagcacagaggtagaaagcagagttggaaatagtgtttttgccacactacagctagaggccaccatgaagttggagatggagaaatccatagcaagttgcagctccaagggtacaccggccttatccttccaaaaacacatttttgtaccaatggccatcccattttgatcacaggctactgcctcagactgaaaccattcacattagatttagtcgttgcattttgcgttcccaattttacaaaacataaggtatctccaaggctcctaaaagtggctaccattttagggagttcttttgaaaaaatgtggttcaacgacttccaaattaattctcggttttaaagagtgctttagctagcgaaaagtaatttatttttttgcaattactttaatattattattgttaatttgatttttcatcaacttaaaagataggagatactagaagagaaaataagtaaactataaagaacacatagattttacatgggttaggctgttaatgagaccttagttcatgagtcacctgtattatgatcagattttaaaagtaatgaaggttagttacaattttggcagcgtttttgtttgtaaaccaaaatttggattgtgttacatgtgaaaattggtcctatatataggctacctgataactgattggattaattggacctaatgcagatttaattcccaattaagctcgctaaatagagcaatttacaagattaagactggacagatcaccttacaaagcagctaaggggcctagatctatcatgtctaatggtaatgttgataatcacaacaacctatctaagaaaggtgtgagggtcttgtgtcagagaagtaggtgcatggatccctacgtttattttgctttgtaagaaatttgtcttgctgaatgtattaagggctcgtttggtacgccgtataagagtcgtattgtattaaataataaataacactatgtttggataaaacaatgtattgtattaattattatgatcaaattttttaatacaatatatgttgtattatttaatacataataaatggtccgtattagcttatattataatatttacaaagcatttagggtcaacatcaatctccgacccggacccaaactgggatccgaacctggacctagactcgaacccggacacggacccgggaccgggacccgcacactgaccctgactcggacttggacccgggacccgagacattgacccggactcggacatgggacccgggacacggacccagacccgaacccgtagttgctattgggatcgagtgtattaaaaatatattataaccttacacaatcaattaatacaagtcaataccaaacattgtattgtattaaataatactaatacaatacaacacaatccaacacaatatggcataccaaacgagccctaaggggatagactatagcagtccttattatcaaaggtagcgtgcaggttacactaacctgctccaaatcttttggaaagagtctattgtaccggtagacttttagacctcttcagtctcagagcaaagaggacactgtgatccttggacgacttgtctctagcacggaaggtgctccttccagacaatgtcttctagatacgatatacttaataagtctacaatttggtttcttttgtgcattaaattaattttgttctctaacatttttagaatacttcagtaactttttattagttttgaattactaataattttagtattttttaaattaattttcttaattttgaattaattttttattactatccataattaattaaataatcttgatattgtgttttttgtggaggtctaaatgcaatttttcttaatacttttaaagctaattgtaattaaaaaatactttaaatgaaataaataattgaattgaattaatatatatatatagacaatattcaactttatttaaataacattgatgataaatatcaagaaatttcaaagttcatccagtgcggtctcaatctcatatagttgtaagagaattgtgattgagatattgaacattaagagtttgcagtaaaataaaattacagaatctttacatgaattaccactaccacccactagtattatgaatacatgtaactaattcgggttactagtctagtgtaggacactttagtgaaaatattatacatactagaaaatatgtagagatacaaggatctgggatgacccttggaaaggggcttgcaagcttattaccaatgggagggatacaaggatctgggatgacccttgggttatgggtctgagttttaccctacacccaagaacaacccccaaggaatgcctgaactggtgacagatttacttactcctgacgggaatcaggacatccggaaggtaaatgatctctttgatagggaaacagttgaaaatatcttgaggggcggtaaacctagtggccaaggtagggataaatgggtctggactaaggactctaatggtattttctcaactaagtcggtctatctcatccaagccttgggccgaacccctttgtgtagtgttgctccgtctttatggaacaagctgtggaattcaaagatcttggagtgccacaaagtactatggtggagtattctctcggatgcacttccgattaggcactcctttccaagagaatggtaattgatgagatctcctgtcccatttgcggtaatggggacgaaactatgaaacatttgtttctcttttgtgatttggcatcccacctctggagatcctcccattggagtgttatgcatgttgcggactctggtgctcgcatgtgggattgggttaactttctttggaatcttgggtccagaggggtggatactgatggtgtattcctttacgcttcgattgtggttgacactatttggagggcgcgtaatgacaaggttcataataacactatgggtagcttgataaattatattgactctatatattattgttatggagattatggatcctgtttgttcaaggctcaccaagtagaggacactttgggttggtccccgtcgcctgtggattggatcaagatcaattgcgatgtcagagctggaggggacaccatgtgtgcagtagcaattgcaagggatcataaggagtcgattttgtgggtggcgacaaacaagcttcacttctttgaccctcttttaggagaagcggcggctagtttgttggccttggagacggcgatctcgatgcatcacccttttgttgtggtggagagcgattctgcgattgtgatcaataatcttaaaggtgtcgagacctttggagaattgagaactacacaagtcaatgcaagcagctctctatctttttcaatagttgtaatttttctttcatttcaagaaaatgtaattttatggcacataatgtggccaatcgggcttttgccaacaacatttatggtatggtggaggtatctactatcccgaatgctatcttttgtaatgaccgtgagatctaattgctttttataatatattgcacgctttcttttcaaaataaaaagaccaaatgtaatttttgtttaaagatcattttatagtattaatcgaacacatcaactaacattattagggtttatcccctgaaaagcgtgtaaatatattttttattataaatactaattgactattttgatatatgcttgaatgttaaattattgatatttaatattaaataatttatatataaatattaaaaatttccttattcatatatgaggttgtgacttgtattgtacgaaaaattaagatcacctagccatgaacaaaataatcaacaacatattaaagctatggaatcgttaagtaacagttgttaataccgttcactgatgcccgttattcggtacaagcaatctcgcttcacattgctgatgtagtatgacatctaagtggatgtgttgtatataatagagattatatatgacatagaccgatgtgtaattaagttgtgtttatcaaacatgttgtttactataaagacttaattcatattataaggatgatcaataacaaattggcctgaatcttgagtaatcatgaactcctattcatgctattagtttctttgattcattcgttaaagtttctcaaagaagatgattcttaaaacttctgttttaggaagctaatgatgtggatggttggaaacttgatttacaattgtggaatcttgacttttgtaacagatcaaatgctggttctcttcaagtattaattctagaactgaaaagttgttatgaaatttagattagatctaaattatactttcactaataaactaacgatactacatgataaagaagtaattagaatgataaaacgacaatttgatcaaaactaattacaaaccgacataaagagggctaatcactaaaattgattatatcaatggacacttcaataaacttagtaaatataattttatacttactaagagttttatttcatatttatagtggagtaatcatgaaattaataaataagattattttattgatgagattcaataaataatctaatttattggagcttagtattataggcccatgtccccgtatcgccaccttgcaactgttgggttttatgccctaaataaaactctttgcaatctgattagttatcaatata

SEQ ID NO: 24136 - DNA, 939 bp, Cannabis sativa
gtcccacaaaatcagttgcattcaccttcgtaatatatgaggatacccgagaatcaatcccctaatttccaacagtaatctccagatttccagcattcctaatcgccaccgagcttcctggcatcgccgtacctggggctttcatggctacacccgaccggagccattgagctcctatagtgtgttgtctacgccgtggagccgccttcagggatagatcaaacgacttgacgatttgctcaggcggagtatcaaatagcctatcacaaaatcgctccgagtggcccagaacaccacagataaaagcagaatgtgggtaggtcttcgtatttaaagatgactgtgcatgactgaccattctttttttcgagcttcattttcttcttcaatggcttgtcaatattcaatgaaacccggactcgcagaaagtccctccaaacaccaacaaagttattggggtcagatttcacaaacgtttcgatatagttggccacattacagactgtattttctgtcatgaaacccgatttcatattatggagtcgaatccaaaactctaggcggttcagagacaccaattgagggttctcccctgtctttaatcgttcgaaaattaatggagcccggtcgaaggtccatgggctaccatctataacccttgcaatatcaatttcatggtaaaattgaaacaaaaagtagtttggattaagctttttcacatacatacctcttcccggttgccatagagaagttattttgtgttgcattgcctgaaaatcgatgctccgcttcgtgagaaaccgtccaaccaggcaccaccgatcatcaatccctgaaagatccccctcgtcatcgtccagcagcaacatatcttcatcttcttccccttcatgcctccctaccacatccatattcagatgactccctgaagccataaac

SEQ ID NO: 24137 - DNA, 4634 bp, Cannabis sativa
  modified_base (856)..(862): a, c, t, g, unknown or other
  modified_base (2897)..(2918): a, c, t, g, unknown or other
  modified_base (3397)..(3399): a, c, t, g, unknown or other
aagttgatataaaaatatcacaaattaaactacttttcgtacaatatataactcaatttttacatcttccattggaaagtactagtacagtacactattagtgcattatagcatttctctttcttaattctcggtccaaaacactttcaatacacttttattgatgttattggtgatttttttttaatattggctaccacatattttaatataaagaatagctaaaagtcactattagtatctagcaccttcttcggtatcatactgttattaatgttattaagtattgggtctcatattactcaagaaattaactttcaagaaatatcattaaccagtcgtgaagcgtcacctgtagaagatgttgggtaccactagtgcccaataagaatactctttaatataataaagagaaatattaaagggcacctatggtatttaatacttaatatcgttattgagtataatttaatatcatatcatattattttactttaataataattatagaaaaccgttaatcaattataaaatgtcactctatagttatgctagggagtgccccataatataattttaatgaatgatgtaaaaaattattaagtaattatagagaaatgctaaagggcactagtggtacctagcactctcctatatgtcaatatcgctattggtccaactaaatatcgggtcccatataatttaatataatagtttttagtgaatatcgctagctaattgcaactcgacatgttgagaaaatgctaaataccactggtacctaataacaatgctcatagtatcaaacaacttaaaagcatcttcaacgaaataattatttaatatatattaaatnnnnnnntaatattattttaataatttttctaaatactatttaccatcgaaataatttaaaataaaaattgtccaaaagtaggtagaattagacatttttgatgacacctttcaaaaatgtcactatttaagatgtttgaggtatcaaatattattattattattattatgattattattattatagtactataaatatacataatatacatatacatgcaatagaagaaacataaacataaatatattgatatatcgatcgtgctagtggctattgtgatggggctaacgatagaagtgaagaagacaacaatggtgaaaccagcggcggcgacacctcgacatgtgctgtggaattccaacgtggaccaattggtgccaagattccttcatgtctcaaccgtttatttctacaaaccaaaacaaactcatcataacttttttgattccaacatacttaaggaagccctaagtaaggttttggttcccttctacccggtcgccggtcgcttagtggcttcctccaccgagagcggccgtgtcgatatcgattgtaacggtgagggtgttctctttgtggaggctgaaaccaactctttggttgatgattttggtgactttaagccttcaccaaagcttaagtctttggttccttctgttgaatattctaaaggcatatcttcatatcccctcctcctcgttcaggtaataatttttagaggagtggtactgttaatcttctattacaatctcttagtcaacttctatgttcaaaacacatttcggaatattttttttaattttttttttcacaatcgtgttcgttatgcttataacatcattcctgtaaatttttaaaaaatctcgaatagtttacagtgccgaaaatacgtttgaagttttttgaacgcgcgtggtatcactagaatatcaggaactctgttttcggtactataaactattcaaaatttttcaaaaatttacattattgtaactataacaaatatcgctatgaaaaaaagatttgaaaaaaaaaatatttcgacatgtgatttcaaacgtggaggttgactaagaggttgtaatatataggaggttataattagcactcaagaattttttatttttacactttaaaattgtttttttatatatatttttactgaattttacatagaaactctaatataacaactaatggagcaacttaaattgcaactaaaattcacatagcaacctacatatatagaaactaccgaaaaaactatcggagcaacccaaaccgtaaatttaaaaaaaaaaagttaaaaaatagtaaatgaaatataatttttctaattttatagttgatatactataaatgattaacgggtttttataattagtattaatataaaataagtaagattccatatgtaaaataacttaatcattaacattcgattgatgtgttaattttgtagctcaaataactattattttaagtaaagaattgttattggccactgtctaatattttttaggtggcgtctcatcaatggttagcgatattttttaaaattatttttataagagagggagcagtacttatagttgtcaaaaatacacacacatcatcttaaaatattatttttttaatttttttttcatacaaaaatcactctaatgttgataacttcaaaaattatccactatagttccacatgtcaccatttaaataattaaattttattaaatactataaattaatattataaagcaattttttaagaaaaaaaaaaagataaataatgtcatgtagggctattgctatagataatggtgttgataaaattagattgaaaataatgactatattgtatatgtagccgaaacaatttcatgaataacttttattggagatgctgtatctaatacttaattatactaataattatatgacgttaaaaaatataatagacactaataatatgttttaacatctcaaaattattattattttgaaaatgaaataaaactattcttattattattattattannnnnnnnnnnnnnnnnnnnnntattattattattattaattttatgttttttccttaaagaaaaatctgaatgtgggggcagcagtgttttggtccccaacaccatgaggagatataaacaattttgtcaatataaatattaataacaacaaatgtgacttcatcaagctcacgtaaaatgtttttcgaaaaaaaaaaaaaaaaaaaactcacgtgaaatgtaaaatatacctgtaatatttttaggtttttgggcaccagttttatttagttatttattttattattattattattattgtttttttaagtgccagttttacttgtactatatgaatatttttattttttatttttgatagttatagaaaatttacattttaatttttttaattctgatactttacagaaaaattatattttaatatttttttatattatggagctttttatgtacccaaattaaataaaaaatataattttttatttttacattttannntaattttttttttttgtattttttcagaatttcacataaaaaccttcataacaattaatggaacaacctaaatcataactaaaatccacatagcatttcacatggaaattattggagaaaccacaactcaaactgtaaatttgaaagaaaaaaacaaaaattaaaaaataatatatgagataatttccctaaaaaaaatatctctacattaagagcaaaatcctttaccaaaaaaaattcaaacattttgaaattaatttatattaattattttaacatttttgcaggtaacttattttaaatgtggaggagtatcaattggtgttgcgatagaacaccatgtcatagatggtgtatctgctattcactttctaaattcatggtctgacatagcaagtggtattgaacaactcaaaactccaccatttctagatagaactatactttgtgcacataacccacctacacctatatttcatcatgttgaatatgaatctccacttactaagaaaactactacaaatgacaacattgacattgctatttataagttgagcaatgaacaattgaaaacattgaaagccaagtgtgttaacaatgaagaagaagataacaaaatcaagtatagttcttatgagatattggcaggtcatatttggaaatgtgcgtgcaaagctcgtaaacttagtcatgatcaagagactaagttgtatgttgtggtcgatggaagatcgaggctgcaaccaccgcttcctcctggttactttggtaacgcaatttttactactacaacgaaagttaaggctggtgatttagtacaatcgaaatcgtggtatgctgcaaagcaaattcatagtacattaaagcgaatagatgatagttatttgagatcagcactcgattacttagaacttcagcctgatatatcagccctaagtaggggttcacatacgtttagaagtcctaatcttggaattaatagttggattaggttacctttttatgaggctgattttggatggggtagaccaatttatgtaggacctgctacgattctctatgatggtataacctatttgctatctagtccagatgatgatgggagtgtttttgtggcaattggtcttcaacatgatcacatgaaggattttgtgaagtttctatatgacatatgatgtatgacttaattaattgatgattttctaataaggaggggctttgtgtgtttttcaccc

SEQ ID NO: 24138 - DNA, 2059 bp, Cannabis sativa
aggggattagggtttcttaatcatcttgggtagcgtgcctaaatgttagggcgttacacttagcctccatttcttgaggactataacaaccaaatgttggttttgacatagcagcaattacacatcctgaagagtcacgaacaatagatccaaatccaattttattggtggaagaatcgaatccagcatctgtatttaattttaagcaattgcgaggaggaggctgccaaaccaagtttacttcagtcatagcaaagtgattaattgttgcagccaaacgaggagaatctgaggcaatatttgattggagagtagacgatgcttgtgggaagaaagagtctgtagcagtgtttatctgagcagcaacaggagtagaattattaacaatccctgatctatgttgacccctcaaaccagaagcattcgaaacatttgtatttgttgaagaacctgagaggttatcataattatgcagataagccattgcttttgagtaaattttagtcgagttctgagcttttttcccataaattacattgttcctatcattgcaaatggaccacataatacaaatgagcaattcaaattcaattttggtatagacttgggatagatggaacaaaaaatcagttgtcttagaagcagcaacaaatcaaaaatcaatatgaaaatttgagtgaaaccaaatggatttagcaagtttgcagctaataaagcatgtcccactgattcccaagcattttgacataagctacaggcagcaaatgtgatggttttccgtttgaataatgctacaacaacaggaatggagttttgaatcactctccaaccaaatattttgactttggagggaaggtctaagccccaatatgatctccacaattgttcttgagaaagtgataaagattcattgaactccgaagcaattgaacaagcaaaatggtatcctgacttgactgagatttcaccagcagtgtgatgccaaaaccaatcatcttgagaagcatttagtgaaagtgggattgaaaaaattcgatctacatctattagagagaagtttgcttgaaatttaggtagattctattatctttcactagttatgtaatcaacaactttatttgtagaaggacctgagtaaaaaatagggacaaacttagacctgccagggatccaaggatctaaaccacaatctattgatgagccatcaccaactttcattctgagaccttccttcaataaatctcttccccaacaaataccctgccatgtaagagatgacaaacctcctttcttcgcatcaagaaaattattatttgggaagtatcggcctttcaaaacacgactgagaagtgaattaggattttgaaaatttaaccaagcttgcttagctagtaaagcttggttaaagtgaacaaaatctctaaaaccctaacctcctaattttgaacgacaaaggtacttcgattgtttctaatgaatttttttcttgtctatcaaggttccccaccaaaaattagtcatcatggattcaattttcttacagaacttagatggtaatttaaagcaattcatagcataggtgggtatagattggattaccgctttcaaaaggacctctttaccaccactagaaaagagcttatcagtccaagagtgaagcaacttccaaatacgatcttttatattgctgaaatgttgctttttttcacgttccgagtaagccggtagtcccaagtattgttcatggcaatcacaaatgggcatccctaaaatctgttggaacgaaagctttgcagcctcttgagtgtttggagagaaagacatgagggacttatccgtagtgtatagttcaatgttatatatttataattgtaggtagccaattcacaaatatgtgttgaatttactacacaagtagacaaaaatttgttataaatgtcacacaagtttcgttagcgcatgttgtcctcaaaagtgagtgttttaatatttatactcgcaagtgcacgaatcgtttcggaatatagtgttcatgtaagtgcaaggtcgaacccatggg

SEQ ID NO: 24139 - DNA, 3617 bp, Cannabis sativa
aatttatggcacgtttactatacaaaattcagaatcgaaattaataaagaaatgtaacagaataaatgaagaataatcggaatcaaaatttgtaatgtgttgtttactaaattattttaaaaatggaataataatgattcatcttgtttactttattagaaaacgtaatcggaatgcttaaattgactaaattgtccttttgagttaaactatagtatatggtagttattttataagatatattttaaagaaaaaaattatcattatataattaatattaaaaaataaaataaaaataaataaaattcattacccttaatgacattccttacaaaattggtggggaaagtatttcttttttttttttatcccttatttaatcaagctatcccttttctaattttaataatgcaagttaacaaatataaagaaataattaccttaccgttgatgttaaaaatattttcactacaaccacaacacaaaaaattacactttataattttttttttattattatattaattgtttagtaaaataaataaaataatatcgtattaattaataaaaatcactacaattattatatttaactaataatttaaataaatttactaattaatttaaagataataatactataaaatcagtgaaagtcgataaattaaaatatcatattacaataacctacagtacttttataatccatttgatagtgcatgagtggcatgagtgtgtcaggcacgtactccagtgttgggtattgacaaattggtgttgcctaaaggattgttgacttggtttgcttggttatgggtaccttgatggcaggctagagtgccatggtcatcttcatgtaatggtgcacgggttgtatatgcatgtcttgtacatactctaatgtttggcaaagcttggtgctgtgccatggtggcatgctcttttgatgggcgacctctccttttcctagggggagaaggctctcttggtggaggaggttagtccccacgcctttaaacttgctcttgaagttctttgttatggcgtaagctttctaccaattggacacgcaagacctcattttcttggagcacatcatgcatagtcatggatctgattggtgggcgctccctagatggtgatggagaactttcacagtcttggacttgcccctcatcatccgacataggtggcatatatgggacacttttcttggcgtcgagaagtctttcatccatatggatattgagggacaaaggttcttcactaaggaatgattaatttccttgggacttcaacatcttcctcaaaattggttattctggtactcacattgttgtgagaatagtgagctattgagtttttgaagagaaaacaaccaaacttttcactgcagcactctcaacgaaagcaccaaactattaacgttgttttaagtactgatctaagaagatcgtaaaaaatagaggactgaaatgaattaatttggctaaataaaaccgcaataaataaaaaaggacaccaaggatttatagtagttccccccttgtcgcgatagtaatggggctacatctactttatttttattatttgattccagcacaccgaagttatgttctcaagagtgtgtgaataatagtacaaaaggcgatttttaggcaaaatttatattgaagcttatgaataaaaggctcatgggagacccaataccataaacttgataataatggtggtgataatattcttgggaacaatacaccaatggaaacaagaatagagaatgttctcttattcttggtaactgtgtatgtcaatggtaaaagtatggtgggggcttggtgtcaaaaaagtgtgaagaacataaggaaaatgtgaagatcaaaggtctcaagggatgatgtgttctaggcagctatgtcgaaatttagcaagagtcccaaggttttgaatgcactcaaaggtcttgccagtcatcctttaaccctagtctatcattgtctttatataagactagggtttgttagtgatcccctacaaattggggtatctcacttcaaatcttgtatctttctataaaataatgaataaaaaagatacataaataaagatctatcgaaatatcccttattcatagacaaacatcccacattgtcgccaaaattagttatttcccttgactttttaaacttgcttatgtggcattgtgctttgggaatagcaaaattggagagaagtgaccatgggatagcacacctcggctaaggtaaatagagtgtcacaagtgttgtgacacaactcccctaacatcccattgtggcctatacttagtaaaactacttaattctcgagtaaagtgtgccatcttgtcttgtaacccaattttgagcccgataaccatgagacacacttatatccttcttgaaaatatatttcaaatgcaagttgaaccaagtaatttagataaaaatagagagagttatgcttgtttacttaagagtagaaagtactttttagctccaaatccaacttgtgccatgtcattacgagtcgtgccacctcattatggcgcagatcggccatgcatgttctcggacacctcgggctgtatttttacttgtttttttttcatggcgagtcatatttttagggttttggggtcccaaaacctcatcttgatgtctaaaaccctaagggagacctgcgccatcttttggtgccacaggtagactagggcttatgagaagcctttgatgttgtttcttgcttagtttagtcatatggatgctagaaaaatactttgaccacgttagttcttggccaattggtgggagagacatgtgccatcttttggtcacaaagatggcacatgtcggtcatagttgttctacacttcttggtgactcttctcacttgcttttggtaccttgatgttgtaaatatacattggccaagaaaattcttcaccatttgatgtggtcgacctgtgccacttccttgtgcacaaagatggcacatgtcgactaggtggtttctacaccacttggccttcctaacttaggttttgatgtcttgatgatgaaaaagtacttttggcaaagaatcttcttctcatttggtgtggctgacctatgccatttatttgtgcacaaagatggcacaggtcggctagcatggttattgagtgaaaaatgatttctttcacttgtgttatgcttcttggtgttgagggaccacattttgacaagttttctttggttgtttgagagtagagacctgtgccattttttataccaaacgatggcacaggtcggccatgcattatggaatggcctcattgtgcaatattgactttatggtactgccaaacatgtacaagccccttctaatggaaaaatcaaattcaatgaggatttggctcatccacacgtacacgtcatgggcatcctacttttctatgttctataatcttggatgtaattattgagagtgaagatattatccacaatgtgattattccagcaaagtgtttgattttagttcaaatctagcctatttatgcatgaataagtaaagtccttactgatttttttgagggattaagttctctatgatgaaaa

SEQ ID NO: 24140 - DNA, 2042 bp, Cannabis sativa
ttttgttttatttaagttgatttatgaatgatttgtatgtttaaatgatgctaatattttgttatttttatgttgtaatgtagttatttttatgttgtgttgtagttatttttatgcagtttttaggtattttttttacaattattttgtagtaattttttgatttatgtgaatttgttattgtatatatatttaatttataatattgatttttttgttgctttatagatgtaaatacatatatttagtttttttttttgacacaatgataagttttttttatttattttaaattgacacaatatgcactagtaaatattgacaaataaaaattatattgttatctggttatatttttattgttctaattatttattagacattatattatatgccctatttaaaaattataagactttattctttctattattaatgtaaccactcatttaattttttttacaataaattgtcatcttagttgtcactatttccaaaaggaggaggctaagaaaaggggtcaaaaactatgaagttgtaacaaacaaatttcatgaagagaataacgtaatattataaaaatataatcaagttgttaaaactaatcgaagaaaaaacttcgcaaaataaaagaagatgaggagttgatattgatttacatattgcaatgagattgatgtcttgtcattttttattactttgtagctgcccttttttgttgttttataattatttttgttgacctaaattcttaagtctccttgttttgatgattaataaatatttgattattattttttattaatgatttgctaactttgtagtaagaactaaagaggattaagcttttaagtcaaaactgactccaagggcaaaatagtaattttactaaaattctcaaaagtgacctaaagtgtactccaagactcaagaaactaaaaatatgactccatgaaggttaatttatatttcctagtcttgtaaaatgatttacaagtccacacttaaaatttttaagtatgaaattcaattcacagactcatgctataaattatttaaaaaacaatgatatctaaattttttaaattgatttttaaggtcacatatcatttatctaagataatgcaattggaatttttaaaatcgaataaacaagctagaagttataagcgttttagggccaaaaaatgaaaattgccctctgccccttcaccgaaagattgaatgggtcagtttcacacttctggttctcaaccagacgtccagatgagcacagagatgcataaatttttgtgccgaaagactaaaaataactagtttccccccaaactctatataaactccattttctctcaaaaacttatgttggctgagcatagggctgtacatcggtgaatttagtcgatttatactatatattttctaactcaacgtaatgatcgggttgtaaaattctgcatgcaacttactcaattttttttaaaaaaagtcttaacccgactgatggtgtaacccaaccaaaccgaattagaataacaatcgactttatgacgccttctgtaagaaaattaagacacaagaattagaataacaaactctgctgtaaacatagcatagaatactaagaccagcaagagggattagttatcaagcacccatatctttatatctttctaaggtctaacaatatatcattaagtgcatgagcataacactcacaatttctaaggctttacataatatttgtaactcaggtgtcttatttgcaagtgaaagtgaatcttaacataaacagaaaatcgcagattcaaacaagtaaaatgaacatacccacccttctttgattttttcgagtggccacctttcgcgtgtaatttcccctaactagatagtgcagccttctcttgactcccgccgctcgctgttacgtcggaggtactgacttgagcgaagatgatgacgatgatggccaccgcacatgaggatgatgatggccgccgcatgcgaggatgatagttggatacgagagagagagagagaga

SEQ ID NO: 24141 - DNA, 1546 bp, Cannabis sativa
attgaaatgagttttatttagcgcataaaacccaacacttactcatatctaatttgattgctgcataaccttttgaaccacgttttctattcttgagagaatgtaacaacttgaatgccacaagaacattgtatgtgatcaatctttgtgacaaaaaggcactctgatattcgaatataaccaatggcaaaaatggttggagcctttggacaatcgatttggagactaacttataaagaacagtacacaaactgatgggacaaaattgagtgatgaagttaggcttcttaaccttggggatgagagttattagggtcttgtttagtattgcatgatctaccccattattgagaacttcaagcattgatgcagtgacaagagaaccagcaatgtgtcaataattggtgaagaacatcgcatacatgccatcataaccagagcttttatcattactcatagaattcgcagcatttagaacatctaaagtcatgtatggagcttaaatgatatgcttagaattctcatcaattgtagttggtattgttgccaagattgtattaacagcttggtcatctacaccttgactgctaaaaagggtttgaaaatggctagaaataatatcaaccaggccatgtgtactggtttgagtgttgtcatttgaatctttgagctttttaatacgattagtggcagaccttgcattggcaagttgatgaaagaattgtgtattagaatcacttgactgcatccatgtaattctaaatctttgatgccaataatccttctctttacctaacaactcatccaaaattaattcaaaattttgaagtgctgcaaaatgatcaggatcagttctaggagaattttggagagcagcaacatgttcatgagaatcttttatttctttcttcagttttccaaaagtagcatgatgccatttctgcagatcagccacacaattatagatgttggtagtcacttgagaaagtgtgtttgtgatgttatggttccaatttgcaagaataatatcagcacaatttttttcctagagccatattttctcaaaacaaaaacgagatttgtacactggtgtttcaatctgatcaactagtgcagtaatagttgctttgatagctcgatgatcagctttatcaaagtctaaatgcttcaatgatggagcatgaaaggttgattcccagtgaacatctacaaaaccatagtcaagtcgttccttaacattgtcattcccctgacttttgttagtccatgttatcctttctccttcatatggtatttggcaaagatggcagccatccacaactggacagaaggcatcaatttgtgctataattcgcctaggacccccaattttatcttcagttgaaatgacttcattgaaatctcctaatacaagtcaaggagacagtggagctatgtcaaaacatttcttaaaagcgtccaggtataagctataagagtgacacaaggatgttcccagaacccactaaaatgaaaagacggaccatcctgactttccacaaaacag

SEQ ID NO: 24142 - DNA, 6274 bp, Cannabis sativa
gattctcaaaatgagaactttcaattgtacaaattaaatgcattcaaacattttgcaattcgaaaattcttttgacgtagactttttgattctcttctatgtcaaaggagccatacatctaccaactttccaataagaatacatacgaaaacaataattaaatgttttagaaaaattgctgccgcaacaataatactatagtaagatggtattgcggatagtaatctacaaaggtttggaaaggtaaccaaaaaatgtcaattaaacaaattcagagcaattagagttgtagcttactgtttcaaaacgaagaacaaggacatctctcttctggccaattctatgagcccttgcctgcgcctgcaaatctacctggaaaatgaatatgcatcaatacaaaaaatgaaccatgtggcaaaaaatgcatcacacacaatttcaacttgacaaaataaacacacactgaatgtatatactacctgtggattccaatcagtgtcaaatatgatcactgtatcagcagcttgaagatttaccccaacaccaccagctcgaatactatagcaacaaaaaacatgtcatccatagtcgatagaagttttgcacataaactaacaacatcagaagaaaacattgctccttggcagttcaatacaagtaagccaggcagtagtattggtgcttctaggaacttgattagtaattcaatatgtaattttgactaaaaccctactaaagtccattcaccaaaactactctgcatgctcaacaaccatgtataaaaatgtccacctggcccttttttcatatttctcaagaaaaatatagcaactcattaaacattataatcaccttagaagaaatatgaaaaatggtgaattcggtttgttaaatttgtcaataagagcaccacggtcactaccagatgtatgcccatccaaccgaaggtacagatactgtttccagtgaagatattcctccataacatcaagtagtcgggtcatggtggaaaagaaaagaacctacaagagataatatcccactaattttaaaaattgacatcaattatgatacttaattaaaatatatatatttttattataaacatactctatgatctgttgctttgagcttaggtaaaagccgatctaacatctcaagcttcccacaaagcctaatgacaggtggcagataatgctttggtatataattatcaacctggaacataattcagtatgcaagaatatttagtagcaaatcaacatcaggttgggactcaaaaataaaactaaatgtcaggaaaatgaaaaaaagaacactaaaaaatcagtaaaaactttggagagcttcattatccaatccattaataaacaatttctcctacttataatcatttagtttataaaccatgttgttaataaacatacctcctccgcatgaagctgactaagataaggatgattgcatatattacgaagttccataacagagttgtgcactgagcgagcctgagaaacaagtttttggggtcacataaaagaatagtgataatcccataatagcttaactaggaattattctgcttttaggaaaacaaacataagtttgagtaacaaacacctttgtacttccaatagatcccagattttcttccaccctcttcatcaaaagtttctgataagcagaagcctcacatcttataagtctctcaatcttctcaggcaactcattttccacctgccaaaaaaaatatgaattttcaaggtctgtaatgacaactgatttccaaacttgcaatggaaaacaatagaataatcataatggctatttaaaacatattacagaaataccaaaatgcaatcctacgtaataagtcaaacctaatagctaggtgaacacaccaccaaaaatatcaaaaactcctttcctaaaagaaccatgcttcaaatccattgataaataagaccatttcattgataaccgttaattaggtaatgtcttaattattatagtttttttttaaggaaaaaaaaaaaagaaaaaagagaaaggaatgtgtagactatgaagttggaaattgcactgttacacaaaatataactttaagcaccttgtgtttcagccttcgaagtacaaacggtcggagtacttggtgaagacggtttatgatcaaaagattctcttcttcggagagcaaggccttttttataatgatcaagcaataaattagaaaggcaatcagagaaagataagaagtgtgaatctaaaaacaatgtcttgaagcaccacttacttcatctgctgaattatcaccattgctttgaaatggtttattgaaccactgagaaaaatcctccgatgaattaaagatgttaggcaacaagaagtttaacagtgcccataactcatcaagattgttctgcataaaataggaaacacagactttatcagcatcacttgacccccataaaacgaataataataataataataatttcatttattttttaatcagaacatagcgcttgtattattagtatgaaaataatacaagaggtatggaaaaaaaaaaaaaaaagaggtatggaagtacaagaaccttactacccatatataatcaatcaaacaggaaagaaaatataaagttgctacaacacagatctaaaagcgtaagtataagaatatttacacaaagcattgccaaaccctacataaatcagagaaaggcacatttcttatacagtaataataaaacctgcgtcatcattatcctcatcataataattaatgaataacagtaataaagatggtcaacattgttataaacttatcatcaccgaaataataataactagcagggtagtcattttcaatttatcaaaaataatattaacaacaatgacaacatcaataaaagccactaacataatacaaacaataatagcaacaataaaatttaaacttgttatagttgcaggtataaaaaaggaaataagaggaagaaaaaaaagtgtcttgcctgtagtggagttccagtcaacaacaatctatgaaagctctgataatgcttcaagtcagaattcaatttgcaagaagcattcttgatacgatggccctcatcaattattatgtaatgccagtgaatcttacttaattttggtctatcatgcttgttcattaaatactcatatgttgtcagaaggacattgaatttctgctgcacaattctttccctgcaaatatagaggaaaaataaagtttatacatgccacgactcacaacgcagaaaagtaaatgcaagtgttgggtttctgtatttacttaaataatttacgcctttcctctggaggcccagagtagacaatcctattaatactaggtgcccagaagtttatttctgtctcccatccaggtaaaactgaagaaggcacgaccactagaaaaggtcctctatcattcttggtttccatcaggtaacaaatcaaagaaataacctgcattacatatcatcagattccaaacatatgaactagaaacataatgcagccatcatcggagagttctataatcaacccgtacctgaacagttttaccgagacccatctcatcagctagaataccatttaaatgattattatatagtgaaacaagccaccttaggccattcatttgatacctgatgagcagaagcaaaattataaacaaacaataatggcatcagtaagctttcccgtcaaaccatcagcaaaacaataagaaaacatgacaacaatgactatgaagtaacaatatcacagatgataaattaaataaataaagctcatcaatacaggttaagattatatatatatatacacccatagaaattcaaatctactcactctcttaattttccaccatgaagcatagatggttgctctgcaatgctctcttttatactgcgcaaaatcacatcaatactaagttatttgaaccaagcacgcacttcactatttatagcaggaaaaaacaacaaaaatcttattatcagccacagaaaacccttccaagaaagaagatggggggaaggaagagagcatgtttcccatggaaaacatcaaatttattctgtttcaaataaactagtaaacaaacaggagaaggccaggaaatccaaaacaaccaacagatattcattttattaacaagaggcaaccaaaacttacaagagacgaaaaattccaaatccaatgtcaataagagaacgaaaaaaggaaagaatatgaaataaaaagactgacttagcaactacaatacaaaaaacacactatgctaagatggagatataaattaggagatagtgtcaacaatgaagatattgaagcttccatacctgtgagccatcatgtagtacttttcattgctttccaaataatgctgcaaaaacataatacagaaaaattagtgataataatcagtagtggataattttatttaaacttgggagggggaacttacttttgcttgatcactttcatcttcattgtcaatggcactttcacctttatcaataatgcctggagctcctgggtcatccatctcttgttcaaaccgtgttgtcatagactttgcttcctgcagcttcgatcctagcttctggagatatttctctgtctctttgagaagttgcttaacacgatcagatttggcatcctattatttaacagaagtgtcaggacacgaaaacaagaataaattgtgatcttttgcaaattaaggaactgtaagacagacctgcaccattcgtaaatacccctccacatcattgatcttcaataaattaatcttctcgcgctggatacgatcaatcttctcgcgatgaatacgttccttccttttgtgaaactcctttgcatatttattgaaaactttccaccgttctctcttgaacttaaatacgtcatccagtctttccctatattttcaggtaatgagtgagtaaaacttaatctcaaaagaacaaatacttcagagaaataaatgagaaaagcaatggcactgaaaaaataaaatgacatacttgtgaacttctatctcaccaaagaactccttctgcctctctcgtattctcttttgtcgctcttccttcattttctgctcaaacttttctagttgttttactctccgaccatgtttgtgcttcttcagtgatttcaagcgatcaatctcgggattgattggcttaaaaaaatctttcagaaaatcactgtccaagtaaaatagaaccactgttaaaaataagcccgcactttacacagtatacctttagatttaaaaataacaatacttttttttgctgaaagattcaatttcattaaaccaaacagagaaatttggtgagtataacaatacttgaatgcaagtgtaacaatacttgcttaagtatgaatgcaagtgtcatggcaattgaaagttgttgtgtggattaaaagtgttattaataaggaactggacatcgttgataaaagttagatttccctgggtggatacttacacagggcatggctcttctaaactttctcgttgtgaatatgcttagcttaacatgtactagccttaggtagcatattagcaccttatccaattttttaatttcaaatattttgatatgtaattttccagtgcagagaagaaagctagctaatatattaacttcaaaatataatatcacaaactaaaactaggacatgaataaagcacaattagactaaaacctgaattgaaatatataattgttcaaacttcaaatacccctcctccccaataaaaccagctctcactcatcatattagcaacagtaaagtccaaatgtttttatccactatcaaaaaaatcaagtgacactgtaaaatcttttactagaacattaattattaaacattacatcatgagttaaagtaattccttaaaaaaatatacaattcaattcagcagttcaaggatatagaagtacatgatacataatgcattaagggaaaactactaacctccgaagacgacgttgaagctccaagagttgcagctttttgagttctattacactttttgtttttgcagatatatcttcagaggaactcacgttttcctacataaagtaccaaaagttaagacatgggctgcactgcaaaaatgacaccccattataatttaattttatgcaggcatctttacatacataaaagtagcagacaatcatattaaatttatcgttactataagagagagagagagagag

SEQ ID NO: 24143 - DNA, 1793 bp, Cannabis sativa
tcatccttatcaccctcctctgctttaccccctggcaaagcaatttcacctgcaaaaacaaaaaccccatcaaactccccatttcagaaacacaaccagattcccaattatctcataaacttaaccattacccgagtgagtagacagagtggaggaccgctttgtgagaattactctcagatccccagcatctccttggaaaagacagattaagacagctgctctcttttgtttgaatctttgtgagtttcggctaattggggtagctgattccacaacacccacttgggacacgacctttcctgcactctcttcagaggtagcctcctctgaatcatcatcaaagggcattcgcggtgccttgtagtgacggagctgttgggccaatgccactaggctctcagaccctccaaaccaatttgctgttgaatccatatatacacaaactaatcgtcgtctgttgtaagaagaaaggtgaaaataagttaattgatttgaggcacacaaccaagagctaattgattaactgttaagtcattgtggtagagtaaaggatagtttatattgtctctgtaattctctgttctaatctatcaatctatacacaagtttctctctattttgattctgctattgttcttgtaccagcagagtcggtctaatcattaggtacaagaaaataaacctagctgagaccaatttgaagtctaaattcaccataatcattctttctgaccatttcctaagttcaaaaacataaatttctcaaaaatcagatcagatcttcactacaaagtattaaataatactccatctgagagttatcagtacttataaaaaatcaaactttgagtgttctaagcaaatgaaaaggcaatgatatacagaaccatgattattagatgagatcttcactagaaagtatcaaataaaaggcaacaacagtatgattgtttgagcatttgctaagtttaaaaacatgaatttctcaaaaatcagaggaaatattgagtacaaaacagagtatgaaatagaagaatgtaaataaatttagtgttaggaaaagataccaaaggattagaagatgggatgggagtggaggtggcttcggtggtagtcgtctcgtcggagtgaagcggagcaccgtagttagggctattttcgtaactgtgaagtgtaacagtaaagagtctaagacgacaagggtgggtagttagttacataaatattaagcacattaaataaataatattttggaacatgacaaaatagatcatgtattttcttaaatagtaaagataggactttgaatttaatatttgataacgtttttttaataaaatcaacttgaagacaattcctaacacgaacagatacaaaaaaaatataaacagttttgtcataacccttttaaatcgaaatattattaaattttattttgaaaaaaaatcagttcagggtcctatttatattattttagaaaatacttggtccattttatcattgataaacatggtctaaaatagtatttacactattttttaactttgtgtttttaaatttacggtttaagttatttcggtaattattgcagtaatttttatgagggtaattaagtggattttggttacaatttatgttgctctgtcaattattatgtgagtttttatacatatttttgtaaatatatatatataaaaaaaatattttgaattgtaaaattgaaaaaatcctttttttttatgattatatatgttgtgtttatttaaaattacttgtaaattttaaaaaaa

SEQ ID NO: 24144 - DNA, 2595 bp, Cannabis sativa
ttttttttttttttttttaatcatcaataatcaatagtgttagaattatttaacttgtattactttcatgcatatctctgaaattcaatgcatcgatcatgatggtgatggttttgttgtgtgtgccactagcatgaatattaaataggaaaaggaataaatcaatttgagtatttgacagaggcaccctataaaaagatcaaaataatttaagcaagagtgaatgaccccagcttgaaaggactctttaaccattcctaaaaggaaagaaattattacatagaaatcataatcacatgattttttgagatttagaaatcataaagtgaaatgaaaaaatctacagtagaccccccaaaagaggtgttttgtacatttttttatttgtaattatttataaattttcagaatattttaaatattttgtagtactaaaaataaagtttaaaattctattggatgtgtgattgtttatatatatatatatataaatatatacaccacgtgatagaaattatttttaactttaatttgacaccaaattatttgaaattttttaaaattttataatatacacggttattgaaatatttaattgaaattcttttcaatgtcgaaatgaataaaaaaaaatatatcaaaacatcttttttaaaggagtgcacaataacttaatcaaaagatattatgatgtttttttttcatcactaaaaagatattatgatgtatttcatgaatgaatgtttgctataattattatattgaataaaatataaatcatacatacaagaaaaaaagagatgtagtatttctataatttaaaaactattatatatgcctatgaggtagaaattattatatagaaatcataatcacatgacttgagatatgaactgtcttgtccacatggaaaaataaatggggaaaagaacagtttcaagatttttttagattaaagcaacaaaattagttaaagaaaagcattgaacattacatgatgattagatttttattaattaattaattaatttgttgtgattgctatgcgatcattttctcaataatcaagaaaatgaaatttcgattaagtccaaatataattcaggctttaattcaaaaatatataattccccaataaaataaaattgaataataggatcagtagtatgtggtgatgcactaataaactagtgggataatgctctttgactaccttggaaatcatcccatcatatacttttcgttttcacccctcaaaattaaataagatgatttactagaatattttttttttacttaaaaattaattattggtgtaattaagtattaagtttcatataacttaagacaataatttttaaaaaattttactaaacaatcgtaaaacgctttctataaaagatactgaacactactagtacctaataacaattctcataactctattctttcaaaattcttgaaaaaaaaaatctcaaaattgacattttcttttttgtaggaatactaatctatattcactaaattaactctgttttaaaaggttagtataatccaacttgagtgctaattaatagggaaataattttaaaggtttttttttgctatttgaaaaccaagattaaacatagttgaaaacaatttcatactttcatgattgcctcaacaagatttatgcttcttagcaaaaattaactatctaaacaactaaaataattaaatttatatagagagatgagaacctacaagctagtactgcattacttatattttttttttcttttcaaatgtgataaacttataaatatatatatacaatagattaatgttacgtgcaataaatatataattattttttttaaaataacttaaattacgtaatgctaaatgtaagttcaattttttttttaattaagcaatgcattttttttctctaataatttattaatgtcaaatattattaataattagttttatttgttgtattttttttctctattaaggatcataaaattaaaattaaatttaaaaatatctacgcattttaaatttaaatttaaatttatttatataaaatatccacataatttttatttctaaatatatataataaaattaaattttttatataaatatctacattatttttatttttaaatatgtataataatattataaaattaataaaaaaatattctcttcattaataatatattgtgttaaagttaacataaaattttttttttttttttttgaaggagttaacataaaaaattttaaaaaatagcattaaacaaaaaattcctttacatagatttcaattattgatgtaaatatatattttcacaaatgaaataaaatataatgaaagaaaaaaagaagagagaagaaaataaggaagcacctttaattttctgcaaaaatcttggttactccatgacctctcatctatgtcaatctctgaagaaatattctctctccaaattgcagcagtcagagatgaagtgaacacaactttctcaatactctctgtttgagcacatgcttccactacatttattgctcctcttacttcccaatccactattttttcct

SEQ ID NO: 24145 - DNA, 3550 bp, Cannabis sativa
gaaaataatttaatcagttcttgcgaatatgtaagagcgaaataatgtcgtcaaaaggaaaatcataaccggcaagagataaaatttaggtataaaaataaacatttcactcgggaaaaggtctttgttaggatcccacgttgaatcaagtggtatcagagtcgtgcaccctcaagtgggactgacatcatagaaagcttaaaagaggcgacttgtggattaggcccagagtgggccgtcgtgaacatcggctccaaggaggtgtatcattaggatcctacttaggctaactttcgagagtgagttctacctaagtggttgtatcagtcttagaaacgaagggttggaaatcgaacgaaaacaatttattcccctttgttttatgatccattaagcattattgttacgaaagataatcgagtttttactatacctgttgaaagaacaatggtatccttagcacgtccttgaagaacgactaatcctccacatcgacgacttctccccctcgaatgatgaggagcaatccaacctacatcaccagtatttaaccacccttccttatctaaaacttgctctgtagctccgggattctagtccaacattcaaaataaagaaatcaacataaagatattcgcaatacattacactaaagagaacgaaaaagaaaaaaataataaaactcggtattgattctatattgttttgggaagaatttcctataccttgaagtaacctttcatcacttgtggtccccttacttttacaataccgatttcaccaggcgaaagaaccctaccgctttcagaatctacaattttgaactcggtatgctgaattgggtgaccaaccgagccaagaaccttcagaaaagttacatctatgaaattgtcatataatgtaccaattttcgaagaaaaaagtatgaatgaatgaatgatgaacgcgtattttatgcattcatttactcttatttattcttgtcgaagtcaatctacattctacatctcataaactttataagcaatgaagtgttaacatattgaaagctaataaagccatgcaattttcttaattaaaaacaattcttacattgagatttggtcgttgagcagaaacaacgggggcggattctgttaatccatatccattctgaactttcacaccaattgcctaaaatgtaaaacatagagaaaaagggtaagaagcaagaaactagaataattcatttgagttagctaagtaagaatttagatataacctcgaaaaacttgtcaacgtgtgctggcaaactaccgccaccacttacacccgcctgcacgagcaagaacacaaaattttgtcacattttaatcccttgcttgaaaatcgaaagccatttctctaattttgttgaaattcattagtaccttcgatatcccgatagcagagtgaattttgctatagacaatcttttttgctaacacatgtactggccataaaattgcggcgatgattcttgcccatagccaatcaaacaacgagacaagaatcgaaggttgcttcgggttccttgatagatatgttccctgtgaaattatgtaagtaaactcaattatatttcagtcttggttttgaaacactgtgatctattattcaatgtggtaatcagaacctggtaaatccttttgaagtccatgtatgccatactagctcgtagaaatgtaagcgcgattagcttacgagctgctgagcttgtagaaatttgtttttgaatcccactgcaaatagaatgtaaaagaatcatttgcaagtccttgaaaacaaaacactaaccgaaaaagaacaacaattcgtaaactgatcatacctatagagtgtttcatatactaaaggaaccgaaattatgtactcgggttgatactgtcgcaaatcgtcctatcattacgcgtaaatttgtagttgatatcaaattttaggtgaaacaaaacacaaattaacattaggaacataagagtattacctttaagtttctcacaattgtgtagacttgctcaacaccatgtgtaaatgtaaaatattcacaagctcgttcgtatgcatgccaaggtggaagcatgctgagaaatttatccccaacttcagccgggacaatatcccacaagttatgtatctacgaaaaaagttgattcgaaaaaaatgaggaaatttcattcaaaatctcaagaacatccaaaggagacgggaaagaaaatgaacctgatgcaacagattctgatgtgtaagcatgacacctttcgggtttccagttgttccactagtgtatactagcgtagcaatatcgtcggagtttatggcctcataaacataggattcccctaaagaaaaacagttggtttagaatttgcatgtttcattcgagtcatatttttcgaacatgtagcagagttgagtgacttactaacgtcactagaatcgtgtatcgccctgcgagaatcttgtcccgattgtataatctgtttgtagttatagacaggtatcccttcaactccttctttagacaaactcgatttatccccccaaagcaaaataataaaccgaattttcgccttggaatggaaagcttctgaaatccgattaaacaactcaggattgtcaacagcaagtccgacactgtagtaacaaatagcattgaattcacatcatcatatgtcaagtatgcattaccatatagatcttattttttttctagtcaaacttacataacaacatttatcaaagtagaaaagagtagaacaccgaaagtcataattataagatataaagttaaggcttattaggatttttgtcccccgaactattgagattgttgaattcaagaacttctgtccaattctgctcaattgtactaacgtggtgattgtccaagtacaaaatcgtgccccctgaactttcatccacgtcagacttctgttaataaaattgaacaaaagtcctttaatctaacaatcccaatagctcagggaaaatttttaatggcctaaaaagtttggaggacataatatggtacatgttaaagttcgggaggcaaaaatcctaattaatctaaagttaacagaagtgattaacatgatatttactctgaaactaccacaaggtgttaccgacttgagagtaggtaatgtgttaacacagactatccgacttaaaaatcgcgtgtttgttaatacatggagggagtaaaagaaacagaacttgccctagagggcattccaaacctttcagagtgattataaatttgtaatagttcttcaaccgacgatctcgaccctcttaccacgttgattgctccggtagtcatactccctaggatgatatgagaacagaaaatcagccttcaatttagccaagaactaatgtgtgtggacaagctaaagcataaacataaatttaaagacaaataagatcatctcatgggagacttttcttaaaataaaaattgcatctttgaaagggtagtttgaatgtctttaaaatggaaacactttatgattaaaacacagccaaaata

SEQ ID NO: 24146 - DNA, 7098 bp, Cannabis sativa
atattatatacaacgtggcataaataaattaattaaaacatataattaaaaaaaacagtacgtacgtataaataaagtctgaaaatctagatttttggtgcagtgagatttttttctgaatcgagcaccacaaaaactgttctgattattatgcttaaagggcacacaaaggtggagattctaaaattgttggtgcagcacaatggtgtaagtaaaccaagtacaattattggagtgaataattaataattaataataaaaacatattatattatatcaataaattaataattaatattattagtaaataataataataataataataataatatgtaggcttgtgtgtagcttaatagctatactataaaaaaaaattaacacaattattcaaaaaaaaaaaaaaaaactaacacaaaaaaaggagacagaagtgaaggggaagggctcttacactactcacactactagtctactactccactaaataatcaacttgctaagaaaaaaagagacaaacaccaaattgtgtattaaaaaaattactacaaaataaattatttttagttacaaattttgtgattatattataaattattatttttatgttgtgactaaaatatttgtggctaaagatattagtcacaaaaatattttgttgtaactaaatgtgtttttagtcacaatacttgttgcgactaaaagtaaattagtgacaatttgtatctaaaaattatgttttagtcacaaataattttttattgtgactaaaagtcacatttagtcacgaaaaaattatgttatgactaaaagtttgtcactaaaggtagttattttttttttttgtagtgattgggcaccggtggtgtccaacaatactttatataagtgacaccctataattggttagtaatattccttaaaaattatttttttaagttatacgaaatttaatatttaattacattaataatagtataacactcaaaaaaaaatttattgaaaaaacatggaaaagaaataaagtaaagaaaattattaaaacgtttttctaggattatatttctagtacaaggtaggtaatatataatataggtatatatatacaagtaagtaatattatatattattaatattggggactagcttggagcaattaaatttggccatttaagtaagttaacaagtacacatttgattgttttttgaaaaaatatataaaaatgtttcatgtatatatattttgaaagggaatgtttcataaatttgatatatatatatatttatatattttattatcctatactaactagacaatcatctctcctaatgacctaattgtgtggtatgtcaccgacttttttttgatccttaactatattaattaattataggtatatataactttaagtagagaggttggttttcttttcactttttttttttcttcttttctttcttatcaatacattttaatatatacattctttttaatcaaatgaacacttattggtcagtattctttctcctaagattgtgggagatcttattatagttgagctaatgaattagttaaagatttctataccattaattccaactcattggcttataaatctttacataaatatagaggtgtacaacattatccatataaacaacaaaaggtaatataaagctatatatatgtgtgtaattgtctattgatgattattaatattattataattaagtaaattaaattttgagtttttgttaacaaagttcaaaaaaaaaaagaaaaaaaaatcagaggtaatattgtaatagaatccaactacagtacaatagataagagtcgtacaataaaaggagattatggagtagacttttcctcttttattttttttccttccccaaaaaaataatatatatattttcaaaaaataagaaatgaaaaaagaaagcttccacaacgttgtgtacagaagtcacgtacttaagaaaactggataaacttttatgaacaaacaacaaaaagtttcttcactcacagtataacacttttgctttatttttcatttctaaactaaaattaattattttatttttttggtattattattttgatttttgaacaacacaacaaaataaaaaagtctgactaaatatataaaaaggctggggaatgaagagacgattcatgagacaaaacaagcttaattggtttcatttcactacaaaaaactttgtgtgccttaaaagccacaatataaatattaaatatatatatagttgatataacatctaaattgcagctttctttcccaactattcaaagaaaaataaaaaaaaaaggtttcatttttatttccatacattaatttaatttactcatcaaaaaatacaatgctgtctccaactttatttctgagaaaaacaaatagggttttattgaaacagctatatagaggtagctacttcatgaaagctaaaaccttttgcagtttagaccttattgtttgggaccacacaaccaatgatgcatgcccacaaatcaaaaaacacttttttcttattaacccaaaaaaaaaaaaaaaaattaagtagttttgggattggaagagatgggtgcattaaactctccatagtcttgggctcaccctagtactactcaccttccttcttctacttcattcttctaagctcaaaatgccctagctataacaaaaacactcaaacaaagcttttcctttttactacttttgaacaatcatgcttcatatattatatatatatttatatattcatgtacgtacatttctctctttctctcttaatttgactcttaatctctctctctctctttctctttgtttgtttgtttgtttttattcatagaaatatttacctctaatttttgatatagctttaagctaattttgtgtctttttttaaaggttgcccagaaaagtgtatgtatatatagtagctagctagctatgttatatatatatagagctatataggcgctatatatatatcaaacgacatcatcaacaaatttaaagcaaagcacaacaagtattcagttgttgtcgtttaaagagtttggactagcaactgtgaataatccaataaaggtgtgaatttattaaatttatttatttatttatttataatttacttttctgttattaattattgcaagatttttgttttgtgacataaaataaaattaaattaacattttcatgtagatatgtatatgtgtgtagtgtttggctagggctaattcattatgtgaagaaaaaggttaagagactttttttttgtctaagatcatctcacaaaactgattcttctctcttttattttttcctttttaaaatataaaataacacattgaatattgtataattaattaataatattcatagttttaatatgtatcatcaaaactagctttatatatataacaagtgatagaacttgagaaagaagttgcttgaggaatatcattctcttaattttttttatttttttgtaagattctctaatttgttaagaaaagaaaagatggaattttttgtgcatataaaaaggaggaatattttgtaattattcctgttaatttgtgctgctcaaggaaaaacatgagaatccgagaaaagtgggagtttattaattttgggaaagaaagaaattaattaattaactaattaattaactataattattgcaaccacactaatagtactacttgaattgacaccagtacaataattaaaattattgttattaacattatttagtatgtaataactaatgataatattcatttttgtttgatttttttttctataatttaacattataaatatggtttttgctagaagaaatgagacataaacaaattaaacagctgcatcacacctatatatatacatatatagatatagtactactgttctctctgctgtagaaaatttgatgtttgtctttcaagccctaaatttgtggtggagaaagtctccacctataccttccctcaaattttttattacaaaaatatatattaatattagaagaaataaagtattttcatggtaagttttcacatgagtttgacagtaaaaaatatgagagatgatcatatttataataatattattaataaataggggcatcttaaattaaactaatgtagtaaaaaaaatgaattaaactagggtaggcatatatatataaatagatagagaaagaattgaacactgaagaatccattcagttaggccaaaaaaataaataaacaaataaaaatgtaaataaaatagaatttggaatgagacaaagggaatcaaataatgagtaattgttttattttttttttttgggattatgtaaacaaacaatcaattgcatagttttaagagcacaaatgaaatgtcacattgcatattccacacaaagttgaagtggtagttttgataagacactaataaagagagatcataaaaacccaaaacaaaaaagaaaagaagaacactatctcatcatgctttcttccacatcctataactaataattaattatttattcagacaattatcatgaatatatatattattattattacacatgcagaatcaaaattgaattagacctagaactacatatacttacaatatatatatatataccacttgtattttgcaagtggtctataatattattattattattattaccattgatgtaaaaatggtattctgctatacataatactgacaaaacaatacattaatttaaatgaaaattattagctctttttgttatacaagtccactcttattattattgtcattatatttatagtttataataattattgatgtgttcatagaaacaattaatacacgattttccggccaaaattataaacttcacatcgtaaattaatgtcctcaaaaatctaaccccgacgagtcgcgtgactttatgacatgaatgaactatatatgtatatgtgtaatttaacctacattccaatattgcccccaataatataattgacacaattacagagtctctcttattacaaatagatatgatcacctataaaatatttagggtatcaatcaaaatttaagatttcataattctttgtatttcatcgttaacaattaaacggtttagatttaaagtaataaattaaattgattttcaactgaattcaccgcaatatatctttcatatgttagctagaaatttggataagaatttcgatagtaattaattaatagaacacacgaacacaataattaattaccaatttcaacaaatccatagaatgcactacttttcctggcagaaatatttattaaggttataatcagaatttaatgtcaaaatatatattattattagtacaattaaatattaaatttaataactattataaaaaaatattcactaatatattataatatatattagaattttagctcaaatcacaaaattttaaatctataaacaaaatagaaaataccaatatgcaattaataattatgtcattgtagtaattatcacttaatttaaaccaagaagagtaattatatcggcgtgcaaaataataaattaatataacaaaaaattataattaaacatctgccataattaaatccagtgctcaaattaattacaaaaccatttcaaaaacaatgtgcttatataatatatattatatatataatcagctaaatgagtctttagtaaaattttccaattccctttctcctacgacaatgcacaatatagaaaatccaacttattcataatacatgaattttcaacaaacattgtattaattatacaaacaaaaactttagtcacatcactactagctaccaaattttaactagtggtaacaaagtaaatcttcaaaatttgatttcttatatatatataataatggctagaataaaaccattaattgatttccatttaataataaaattatatagatacaagaggtgaaggaataggggatcattatggagttagaaaaatattactccctacgaatctaccctaaaccaaccactataaagagattgagaatagcacgataagcaattaatgagataataatttacctaagaaaacgagctatacatatatatatagctgtagaaattaaaagtaaaaaaaaaaaataataagaaacgatttttattaatgctggcctgggaatacttactgaaaaataaaactatgtaaaataagataacatgtcatggtcagatgagatgaaatgattcgtagacataaggaaacctttcaattttctgttttgaatccacatttctatatttttactcatgattgataaacgttactatatataatcatttcatctatacatacatatatgtatatatactcaaataatgtagtatatattagcatttaaagacgaatgtacacttaatttcctgcaggttcttcaagcacatcaccagatgaaataaaagcaatatttcccattttaacacataacaagtcacatcaattacataccaaagtttttttattatatattgatttgaaatatttataaatatatagatagagtgagagagagattttgtacattattaactgtaatgcatggctggagtactggagtacatatatatatacatgcccataccaagagggaataataacaataatttcttttgaattatatttttaatttaattttgcgtggtaatagtttgccaatataaaagacgaaactccaagttgtactaataattccattaatttcaaaaccagcaaacatgcatacaggtaaacagggagggaaaataaaaaatagaagcagcttcgaaattcaaaatcaattaaagaaaaacactaataattaaatgaaatcaactcaaaaaatagagatatatatgtaaaaatatttaaagaagaaaaataaaccattccatttcatttcattccaagatcatatatatatatataataaaatcgtatatttgataataattaacattataaccacttcgatccaagatcttaatttttttgtaaacaaaaattaat

SEQ ID NO: 24147 - DNA, 1569 bp, Cannabis sativa
  modified_base (178)..(181): a, c, t, g, unknown or other
tttggttacaagaggaggaagctataaacttgattcaaaaaaattggcaccaagttacaaccgagaatgtggctgctgtttttgtaaataatcttcaacggtgtgctgactctcttcaacaatggcaccagcagaaatttagcagctttaaaaagaacatgtaaagaccgcttagttnnnnttggaaattagcagttaattatgcttgattatggatctaaaaacattagatgtgatctaatgaacagcctgtgatactatgtagttggtgattggtgttgtgaaaataaaaataaaaaaaatcaatgttactataattttttggtcgaggaatgctaccttcttgaatatcaacatatttatttggaataatcacttatttgtgtgtaggtatccaaaagagagatatgaacacatacacacacatttaaatttaatatacaagtctctcttcttttctcctgacaaaatttgtacctgtccatgggatattctgcttccattgatacgttacttgtttttttgttgttaatatttattccaaatgttacttatatatatatatatatatatatatgaaggaatatatatatatatatttcatattgcccaatttttgaaggaatatttcatttgaggccggctgacattgtttatctgaaagataaataacttgaggatcttgatttgatcactaattcacatcatcacttgtttgccaaaatagttaggaagtaagtctacgctcacacatacatatatgaatcattaatataacatgaatatttattaaccccatttactgattcttgtgagacgtatcattttaacttgttttgacgtattgttgttaggcactaggattagtagggtgtgctagcatatagtaaataaaaaggctatttgagtctttttttgggagagtagttttgagtgagaaattactatatataggtgagtaggagagtagagaaggtatgtgtattgagtaattctctctttgcattaaaggagcctaagggctcccttgaggttataatcggctttcctatattcaatataattttcctactgttttccttctggtttattggtttttttgattttgattacttggttctcatcaattgtctattattttaacggttagtaacaatgatagtatatcaggtgtttttttggctacatgaactttgtaatttttctatcaatgtgccagatattttagaaattggctggggtcagaatgagaatgtgtatgtattggggtgatggtgggattgaaatgaatgttggggtttatatcgcgtttgatatatgatttgaaaatattatttttatttgtaattttttttaatattttaatacgacattataataccaaatttagtattgtataaaagtagtactatacaactcaatacaatatgccatttaaacatgtcctgagggactactttttctctctaattcggattcttgttcaggcattctaactttgtaacgccctaatgctaaggcacactacagtgctttttcgattaaaatgcaatctttgctaatcaaaga
